United States Patent Application Publication US 2026/0092266 A1 - sequence listing, part 19

SEQ ID NO: 3110 - DNA, 24392 bp, synthetic construct
  source 1..24392: mol_type = other DNA
  misc_feature 1..24392: note = Synthetic
aaaaaagacagcttacaggcgatttaatacatattatttcagatacaattgctaaaaaagtagattccttaaaagtatttaataatgcttttatcatttcaaaagataccattggagatggatttaatcaagtaaaaggagttaatttatacggtaaatttataaataataaattaaaagaagtagacctgattaaaaacacagaagttatttactacatgcgtaatgataaacaagaactaatcggtataaataaaaatgtaagtagtaaaataaatatgttaatgggagagggaaatgctatagatagcgttacattttttaccaaaccagatgggcaaatttatccagaagacgaacttcccgaaaatgatagaaaactaaaaggttttctttggcgagaaaacgaacaaattttaaaactagaagatatttttccaaaagaagaaatagaactagatactaaagccaaagcagaagttaagaaaaaagaacaagaacccaatgtaccactaagtcctactaaagaaacattggaatttgataaaaccaataaaattaaaacaaacaaagaaaaaaataaatcaaattataaaaaataatccaaaattattttaatccaagatgatgtgttagatttttgatgaaggtaaaaagaataagataaaaagatacaaaaaaagatcagagatatagtttttctagattgacgataaaaaagaatatttttttagattcaaaattatttttatcagtaataaatttccaatacataatctgagttaaaaaacaaattattcttttttatttttattttagaatatttagataataatccatgttaaaagatttttataaataccaagcacaaacctctcctcatccactaggaatggaagtatctcacgccataggttcttatatatacgatacaaaagggaagaaatatttagattttgtggctggagtttcagcttgtaccctaggacatcagcatccacgcgtcaaacaagccatcatagaccaaatggataagtatgctcatgtaatggtttatggcgaatacgcacaagatcccgcagtccaattttgtacgttactagctcaaaatatgcctactcagttaaacaaaacctatttagtaaattcaggtaccgaagcaacagaaggggctttaaaattagctcgaagagtaacaggacgtagtcaattaatttcttgttataatgcgtatcatggaaatactatgggatcaatgagtgttatgggatttgaagaacgaaaacaagcctttcgtccattaattccagatgtagacttcattacgttcaataatgaggaagatttacaaaaaattacaacacgtacagcaggtattattttagaaacaattcaaggaggagctggattcattcagcctcaaaatgattttctaaaaaaagtacgccagcgttgtgatgaggtgggagctttaatgattttagatgaaattcagcctggtttcggacgtacaggaaaactatttggttttatgaactatgatgttattcctgatattgttgtgatgggtaaaggaatgggaggaggaatgccagttggtgcttttacggccaacgaaaaacacatggatttattgagtcaaaatccaaaattagggcatataaccacttttggagggcatcctgtaatagcagcagctagtttagctaccttaaaagaattaattgaaacagatttaatgtttcaatgtttggaaaaagaacaattatttcgtaaattgttgatccatccactaataaaagagattcgtggtcaaggactaatgctggctattatgacagatagtccagaaattacaaatcaagttatttttaaatgccaagaaaaaggattaatccttttctggttactatttgaaggaaatgctatacgtataacaccacctctgaccttatcaaatgaagaaatagaggaaggatgtggcattattattgatgctatgaatgaaatagaggctgattaataatcaaaaattgaacgaaaacaataatcaaaaacgtctttattttgttcattaaattgttcaaaaaaaatcgttttttaacccattataaacgccaactttactatttttagtaaggataataaaaacttaggagtatggatttgagtcacaatgaagaagattatagtttatccttatcaaaatttgaatcaatgttaaaaaccaataaggtcttattttttgattcagaagaatttgaggatatcatcctccattatatggatattggcaaacctagtctagccaaaaaagctctaaaattagggctagagcaacatcccaaatcctttggattgaagttggttcaggtagaaatgctgttatttgaagacaaaatcgaacaagccgaaaagctgctgaatgatttatacgctatagaacccaccaatgaagaaatttttatacaaaaagcaaacatttgttctaaacgagacgatcataaacaagccgttgagtttctaaaaacagccttacaatacacagatgactatgctgatgttcataaccttttagggatggaatatttattcatggatgaactagaactcgccaaaacacattttatagcttgtttagaagaagaacccgaagaacaatccggactctataacgtcatctattgttttgaatttttagaacaataccaagaagccatttcctttttacaaaactatatagacacaaatccttatagtgaaattgcatggcaccaactaggtagattaaactttactataaaacagtaccaagaagcctacatagcatttgattatgcaacccttattgacgatcaattcatgggagcctatatggaaaaagccaaagcacttgaacgtttagaacgctatgaagaagccatctggaactatcaagaaaccattcgattagaagatccaacctcttacgccttattacgaataggcaaatgttttgaaaaaatgggcaatgattcagaagctttaaattattataacaaaacagtacatgaagatcctttattagataaaggatggatagccataacggatttttatatgcgccaagaaaactttcaaaaggctctttattatgtaaacaaagcccttggtatagatgcagaaaaccctttatactggaaacggtatgcctctataaataaagagttagcactatttgaagaagcagaagaaggatatcgaaaagctatagaattaggagatacagaattagaaaccattctattttgggcggatacacaattatttattggggaatatgaagcttctgtagaaaccttaataaaagcaaatgtcttgtttttagatcattatcaaatagaataccgtttagctgggttgtattattctttagataaccctactaaaggattgtatcacttaacaaatgctttacatcataattttaaaatgaagagtattctacaggaactatttcctgccgtatttgatatgaaagctattcaaaaaattataaataaattcaatgagttacaataaatctaaaatttattaaggtaaaaaataacagaaaaaaggttgtagtatttgcttaaattaaaagaatgaatttttctaaaacattaagcaaaaaagggtaatctgaaaaagagaaatcaattttaccacacttctaaattctgatttttaataaaccacctattttagataccgttcaattatatattccgttatagccttcaaaggcttattggtaacaggatgatgacccggttgattgaaaagttcaatatgatcttcatccatcttacaataccaaataacggccttaccatttttaaaataagtaattgtatcgttaggtattattctgcgtaataaaagcaatctttcattatacggaacctttgtatttagttcagcaaaaccatttatttctttattacaagcaacttcaatataacggttattttgccattctagacaagaattttcccttttaaaattccaatacacaataattgataaacacaaaaataagcatataaggattaaaagcctgttacgactagaagaaatcatttttttaggtaaaagatccataggcttattagataaaacaactgaagatccagttttgtcaattgcatgatttttaggtggattgtgtttggatttcaaaaagtctcctaaaggtctaggttgtaaatttactaataaggccattacatctaaaatatcttgattaggagccgatgtctttcctttaaaaaaattacatatcgggcgaaatttatctacatcaaaattgggtaaattgtaaaatgtttcaagaatcatcgaatctttttgagacaatcctttttgctttaaaattttacaaaaatcatttagtaaagctggtgatggttttgataagtaactcgcataaataccctttttttcaacttcatattgagcttttatttctgtaatataatctttataagtaatgtttttcataagcattatacggaattatttagaactatcggaatcctttggaattattggaatttctttacaaacccctagtaaaatcaacacacctttgcctcagaattagttcttgttctatttcgcgataagaacaaatgtacaaaactacttctaaaaaagtgagactaatccgttcgtattttctgtcttggggagtacataaaaaactttctgatatagcccacttcacttcccaagatggtgccataagcactaaaactaggtggtaaaaaattcgaaaacttatttcgaatagccacaaatatgtcaaaaattaattaaaaaagtatgaaaaaaataatattaattgcagttctaaatacggtaggttttactataatctcttgtgaaaaagaaaatttaaatacagcaaatacaaaagaaatggaaattaaaaaagaaagcaggttattacaatttgcagattctacaagtattgaaaggatcatacctgtagaaggaacaggagatgatttggttcctattaaacctccaaaatcttaatttttttaaattaaattaaaaaaaaatagtaaattcggggaaagtatctgtatgaaatttttcctgagtttactgtttttcgtatggtttatagtaattagttgtacaaaaaagcaagaacataaaattgaacataaaaaaataaatcctgtagaaagaatagcctttcaactccaaaataaagccgaaaaagaatggaatgctaataactttcacagtgcatattactattacgacaaagcaaagtcattgtatcaaacacttaataaaaatgaaaacattgtttattgccttattcaaatggctagtatccagcagcttgaaggggattattttggtagcgaatccagtttgattgaagcgttaccttacataaagaaaaataaaacctatcaagctgctattcataatctattgggtatagcctctaaagaacaaaaaaattataatagtgctattgaacattataatatgacttttaatcttgctgaaaacaaacttactcaaatagtttctttaaataacatagcaaatgtatatattcaacaaaaaaaatttgataaagcacaaacgattcttaatagaattttaaaagaaaaagggctagattccttaccctttcgaaaggctatatatttagataatttaggatatagtttatataatttaaatcaaaaggaagaaggattaaaacttttaaaaaaagcgcttcagacaaaacttcaaagcaataatacttacgaaagagtagaaagctatttgcatttagccgatgtgtatataaagttaaatcctcaaaaatccttttattatgctacaaaagcttaccaaaatgcaaccttacataaaagtattgatcaaaggcttaaggctttattactaatcattaagttgccacaaagtactcaaaaacaggcattacaatatgctaacttacaggatagcattacacaaataagaagtacagctaagaaccagtttgccaaaataagatacgatgctcgtgtagctaaagaagaaaatttaaaactaaaaaacgaaaaaatagctacggatcttaaactacaaaaaagtcaaaatgaaaaaaatatttggatttcagcttctgctttactagcaactttaattttttttatttataattatttaaaaaataaaacacaattagaaaaacaaaaagcaacctattttacagaaactaaaattgctaaaaaaattcacgacgaaattgccaacgatgtgtttcaaaccatgtcatttgtagaaacccaaaaaatcgagaaaccagaaaatcgagaaattttaattagtttgttggatactctatatcaaagatctagaaatatttcaaaagaaaatgaatcaatagaaacagggatttttttctttgaaagtatattacaaatgataaacggatataaatcaaatacacaaaatattattataaaaaaagaagatacaatagattgggagagtttatcagaaatcaaaaagattactttatttagagtattacaggaacttttagtaaatatgaaaaaacacagtcaagcgactattgtggttgtttgtttttcaactcataaaaaagctttaaaaatagactactcagataatggaaaagggtttaatatagaaagtataaaaaaaagcggtttggcaaatgtggaaaaccgtattataaacattaacggaaccattacttttgatgctactgataagggattaaaagtaaagataaatattccaaaataaagtattactatgttttcaaaagttttagtggttgatgatatcgatctgaataatattgctacagaaaagacacttagtgaatttgatatttcggttgttgaatatgtaaaatattgtgacgatgccattttaagattaaaaaaagcacatatagacaatttaccatttgagttgttaattacagatttatcttttaaaatagatcatagagatgctaaaataacttcaggggaacaattaataacagaagttaaagaaaaattcccgtctattaaaataattgctttttcaatagaggatagacctcacaaaattaaaaaactagtatacgatcaagggattgatgcctacgtggttaaacatcgttatacggcaagcgaactaaaaaaagctattgaaacaatatggataggaaaagaaaaatatatttcacctagtattcaacttatattacaagataagaccacctccgaaatagatacatacgatattcaattactgacgcaactgtctttgggaattccgcaagaaaatatggaagctaagtttaaagaacttcatattacacctaatagtaaaagtaccatcgaaaaacgtatagcaaaacttaaagattattttaaagccaataataccgttcatttagttgccattgcaaaagatatgggaattatttaaccacatatttttaaaaatatagagaaggtctcctaaaagttgaactcactttataagaatcggatatatgaaaatcatattcgataggtatctgaatattatagtaataaaaaaggctgtccaactttgcactgcccccaaaaagttagatactatttgggggtatttttatgcattacggttttccgtaaggaaatggttattgttggaggtaagtttgccatataaacataaaaaaaataattatgaaaagacgaactgttttatttacaatgtttttattcttactaggaactagtattaatgcacaaaaaggacactataaaggtggaaaggggagttctcataaaggaggccattataaaaattcttctactaatgaccattatagaaaaagaaaataatatgaaatacaaagtagtacccttcatagcttcattggatcccaaaaaaagaacttcagacaatgtcgcaattcaactagaaaatttaatcaatgatctttctaatcaaggctggaaatatgttcgtttagaaagtgtgaccacatttgtaaaccctgagacaggttgttttggattaggagcaaaaccaggttatatgacaactagacaaatggtagtttttgaaaagtagtatgaagtatttagtcctattgagtattcgattgtattggttaactaagccaaagaataaaaaaccaagatgtatttttagaaaatcttgctcacattttatatatgaagaaacgctacaaaatggttttttaaaaggattaaaggcttttcattacagatttaaaaattgtcgaagtggatttgaagtttttaaaaatccaatatcaaatcaagttcaaatgttattgacttcaaatcaaataattgaagaagaagaaatagctaaaagattaataactcatttaaaataatttttttggaaagatatagaaacttaagtggaacatctgctgtatatagctatcaaattggaaatgattttataaaaatcagatttgcttcaggagctatctatacgtatagttataacaaagctggagcatatcatattaatcaaatgaaaacattagcacttaaaggattagggttaaattcctatataaatagaaatgtaaaatataaatacgattagaactataatttttatcataaagtattcttaaattaaaaagaatattcacttttaaacaattaaatatgaaggcaataggattattaataacatttctattttgttttttctccttttcgaagaataatgaattaattacatcaaattatgaatgtctaatacctaaaaaggaagctggcagatgtacaggttctacatattgtacagcttgtagaaattgttcgagatgcgcacattgttccagtggtggtagttgtggtgtatgtagtagtactactactagtacccattatttatataactcaaatgaaaaaaagagcaaaaggtctagaattccaaaatattcatcaaaactaagtagctctaaaaaatattattatgttgatgaaacaataacaatctacaatgatatcttaaatttaagagaaaatccttccttagaatctaaaattatcgaaaaaataacatttggagttaatgttgtttttatagaagaaaaaggggattggataaaagttagagtagaagaaagcgaaaatatagggtatttatatgcaaaaaatataaaataagaatatgacaaaagttaaaaacattaatggaacatcagataacaattgcaaatgtggaagttggttgcaacattggaaaaaatacagtaagcaggatgtagattcgtgttcagagaaaagctgttcagaaaaaaaagatttagttggagctcacgtccaaaaatctgattcttcagatatgagttggtatataatcccgctttgtaaaactcataataaaagtaccgatgatttagaaattacgaccagtagaaaattagtttctgctaataaaaaagaaacttgcgaaaagtaaacagagatatgtaattaagagcgaactactgaacggaggtggtggttcaaatgggaatcccaaaatccccttattatttatatcttttgcttaaacccagattatgcaatagaccttgtaacgaatacggaaagggcaaagaagctaaaaagacacggaatttttttactacattaaggacaaaaaatggagtgcttttttagattcaaagtcctttttatctacaataagtttctaatgtataatctgggttaaatgataaaaaagtcctattttttactacaatgtcataaaaaaagtcccaccgaagcgggactaaagactttcgtctacggcatatagccttattgtgataagattaaagattagaataattttatctgatacaaacatacacaaaaaaagctataaacactttacggttttccgtatttagatgaaaaaagtttttccttacttttaagaccaaattacaaactaaacacaaatgacaaaaatacttggactagacttggggactaactcaattggttgggcaattagagatactgaaaatgaaggagtaaatcaaattctagacaaaggagctaggattttttctgaaggagtaaaatctgaaaatggaaaagaaatatctagagctgccgaaagaacagcctacagaagtgctcgtaaaataaaatatcgcagaaaactaagaaaatacgaaactttaaaagtgctctctattaatggaatgtgtcctctatctgttgaagaagtggaacaatggaaaaaatctggtttcaaagaatatccactaaatcctgaatttcttgattggctacgaaccaatgaagataaaaatataaatccttatctttttagagacaaagccagtaagcaaaaagtgactttatttgagttaggtagagccttgtaccatatagcacaacgaagaggttttttgagtaatcgcttagatcaatcagccgaaggtgtttttgaagaacataacccgcaaattcaaaatttaattgaagatttagatagttcaaatacgatcttaaacgaattaaaagagtattatattaatcttggaattatagatgagacagagaaaagtggttttaaaaaggatttagacgaaggagaaaaaaatctaaagaaattatacacttcattagtatccattacaaaaaagaatgcaaatgatattgaaacatgtaaacaagagcttattgcgcgtctcaataaaaaggcagatttaggcaaagtaaaaggaaaaattaaagacatttcacaagcaatgcttgatggaaattttaaaaccttaggccaatatttttttagtttatacaacaaaacaagaataagaaaccaatatacttctcgtgaagaacattatttagaagagtttatcataatttgtcaaacacaaggaattgaaggaataaatacaaatgaaaaattacccgaaaaaaagtttacgggtttagctaaagatttataccgagctattttttttcaaagacctctaaaatcgcaaaaaggattaataggaaaatgttcttttgaaaaaaacaaatctcgatgtgctgtttcgcatccagattatgaggaatttagaatgtggtcatacttaaacaccataaagatagggacacaaagcgagaagacattacgtttcctaacactggaagaaaaattaaaattagttccgaaattttacagaaaaagcgactttaattttgaggttttagccaaagaactggttgaaaaaggagctagttttggctattacaaatcttctaagaaaaatgagtttttttattggtttaattacaaacctacagatagtgtttctgcttgtgtggtttcggcttctttagaaaatgcaataggaaaagactggaaaattaaaactttcgaataccaaactagaaatacggaaaagaaagaagttacaaaatctgtaaattacaaagatctttggcacttactttcagtagctacctcagatacgtatttgtatgattttgccatagataaactaaaactagaacctaaaaacgcaaaagcatttagcaaaacaaaactgaaaaaagactttgctagtcttagtttggcagctattgcaaaaatactaccttatttaaaacaaggattactgtactcgcatgctgtttttatggcaaatattgagaatattgtagatgatgacatttggaaagatgaagagcaacaaaaattcattcaatcaaaaatagttgaattagtagataattatatagtagaaaaaagcaagctagaactaattaacggcttattgaaaatatacaataccgaagacaaagaaggtagaaaggtatattattctaaagaagcggaatcgctttttgaggctgatttgagaaaaaagcttgtccccttttacaaagcaaatattattattgaggaacacgaacaagaaataatatttcaagatttattccctattctaatggatcaattaaaaaagcaagaattcattaaaataggtaggttagataaacaaattgaagcttttcttgaaggtgaaaatgaagagggacaaatattttgtaaccatcctgataagttaaaaaaactctatcatccatcagatatagaagtattcaaaaagaaaaccattaaagacgaatggggcaatgaaaaagtagtattaggcagtccgcttaccacttctataaaaaaccctatggcaatgcgtgctttgcatcaattacgcaaagttcttaacacactaatagctaatgatcaaatagatgaagacactcgcattcatattgaaatggctcgtgaattgaacgatgcaaacaaaagaaaagggatacaggattttcaaaatgaaaacaaaaaattcaaagaggacgccattaaagaaataaaaaagctctatttagagcaatgccacaaagaagtaaatcctacagaagatgatattttaagataccagctttggttagaacaaggaaagtgtgaaatatacgaggaaggcaataatattagcatctgtgacattataggtagcaatccttcttatgatatagaacatactattcctagaagtatctcacaagataattcgcaaatgaacaaaaccctttgtagtcaaagatttaatagagacataaagaagcaaaaaatgcctattgagttatcaaactacaacgatattttacctagaattgcacactggaaaaaagaagctgaggaactaactcgacaaattgaaaccatttctaaatctataaaatcagcagctacaaaagaggcaaaagataaaaacataagaaaaaggcattacctcactttaaaacgcgactatattctgggtaaatatgaccgatttacctgggaagaacctaaagtaggttttaaaaacagtcaaatacctgatacaggtattataactaaatatgcgcaagcctatttaaaatcctatttcaaaagagtagaaagtgtaaaaggtggcgcagtggctgagttcagaaaactttggggcatccaagaaagttttatagatgaaaacggattaaaacacttcaaagaaaaagacagaagcaaacacacccatcatacaattgatgcgattaccattgcgtgtatgcctaaagacaaatatgatttgttagctcacgcgtggcgtttagaagacgaacaagataaaaaagcagcaaaagttttaatagaacaagccaagccttggaaaacctttaaagaagatatagaaaaaatagaaaccgaaattttagtatcacattttacgccagataacgtaaaaaaacaaactaaaaagattcttcgtgtaagaggtaaaaaacaatacgtagccgaaatagaaagaaatgcaaatggaaaagctattcctaaaaaggatgctaatggtaaaataatttataagcttaacgaaaaaggtaataaaatacctatactacaacagggcgatacaataagaggatctttacatcaagatagtatttatggtgccattaaaaacccactaaacactaatgaaattcgttatgtaatccgtaaagatttagaaagtttaaaagcaaatgatatagaaaacatagtcgatgaaaatgtaaaagcaaaagtaaaagaagcagtaactaataaaattttacttatttcatctaacccccaacaaaaaaacaaatttgccgaaggtaaaaatgtttggatgaacgaagagaaaaaaataccaattaacaaagttagaatctatgctaattctgttaaaaaccctatagaaattaaaaagcatagtactttatcaaaatcaaaacacgaacacaaacaaactgtgtacggacaaaatgatgaaaattatgctatggctttgtatgaacttgatggaaagcgagaatttgaattaatcaataattttaatttagcaaaacttcttaaacaagatcaaggttactatccattacataaagaaaaagaaataaaaggtaaaaaagttttaatacccattgagaaaagaaacaatagagatgtaattttaaaaagaggtcaacaggtagttttttacgataaaacagttgaaaatcctaaagatatttcagaaatattagattttagagaaagagtatatttaattgaaggtttgtctattcaaagacaaatagtatcaggtaaattatacgaatttggcataataatgctaagattttttaaagaagcgagaaaaatagatgttataaaaaaagataattataaacctgatggtccatttaaattaggggaaaataaaccgactagaaaaatgaatcacaatcaatttactgcctttttagaaggaatagactttaaagttttaccatctggaaaatttgaaaaaatttaaaaacaataacatttgttctttgacataaaaattagaaatcgatttagcgagattcagcggagctaaacacgatagtgtcaaacgcagattaagaccctcaacaggaactgaagctctcgaattcctgtagtggtttacaatgttttaaagaagacaaatcgcggcgtttatctttgaataagttttaagtttctgaaaaaattaaaaattatgatctagcggttaaaaaatggtgtaaatttacaccaacaaaacacaataacatggcacgtcaaagcatcactttagccaatcaaaatgatgaatggttaaaacagcaagtcgcaaacgaagaatttacaagtaaaagtgaagcgattaactacttaattcaacaggcaagaaagcaggaagaatattacgaatatgttagaatgaaaatagaattaggcgaaaaaagtggtttggctaaaaaacaaactaaagaagaaatgcttgccgaatttaaaaaacgattaaatgtataattatgatttaagcgaacaagctaaaatagatttgttgcgtatttatgaatatggaattggtcagtttagtctagaccaagctgataaatattttgacatgatgcacgattgttttaataaaattgctaaaaatccatatttattccctttggcatcaaatattaagtcaaattattacaaatgtgtttgcggaattgacaccatctattataaagttgttacaaatggagttatcattacaacaatagttggaaggcaggattttgaaattcaaaatttagttcattgacatacactatcaaatcgcaaataaccaaacctcatactgattggtttgattaaagattagaaaccgagggacgaggttcaacgaagtcaaaacacgatattatttggttaaaaattacgattgtaatttcagttgtggtttacaaacaccaagtcaatatttgttataggtgtgtttgtgattataattgattaaagattagaaaacacgatatttcatcatttattaatgaatcaaaattatcagttgtggtttgattaaagattagaaaacacgatattattttatttttttcaaaggtcaaggatggagttgtggtttgattaaagattagaaaacacgatattacaaatataaattatgacaactttatcattgttgtggtttgattaaagattagaaaacacgatatttaaataaaaaaagtttagtaaaagtttaggttgtggtttgattaaagattagaaaacacgatatttctgttaataatagtaatcccgtttatatggttgtggtttacaaacaccaagtcaatatttgttataggtgtgtttgtgattataattgattaaagattagaaaacacgatattttttaaaatagttatcaaaaagatgttaacgttgtggtttgattaaagattagaaaacacgatatttaaatcatcagtagttcgtattgtggatatgttgtggtttgattaaagattagaaaacacgatattactgtttctaattttgcattgtcccagatagttgtggtttgattaaagattagaaaacacgatattactatagatgatataatttaagggtataaggttgtggtttgattaaagattagaaaacacgatattttagtaatcaaaattaattttgaattgcatgttgtggtttgattaaagattagaaaacacgatatttttagagtgcaatacggaaatttccgagtagttgtggtttgattaaagattagaaaacacgatattaaaaatttgttaaagttttgttgaaaagtagttgtggtttgattaaagattagaaaacacgatattaacaaaaaaaaaggaggtacaggatttgtagttgtggtttgattaaagattagaaaacacgatatttctttaaatattatttcaggagctcatatgttgtggtttgattaaagattagaaaacacgatattccgtatcatgtctgattttattatggcctagttgtggtttgattaaagattagaaaacacgatatttttttattttatttatataaatgttttccagttgtggtttgattaaagattagaaaacacgatatttaattttcaagtttctcctttaggattaaggttgtggtttgattaaagattagaaaacacgatattaatgattgttttttgttgtaatattgaacagttgtggtttgattaaagattagaaaacacgatattctattttacctccaccccctgcctgatatgttgtggtttgattaaagattagaaaacacgatatttataacacttccaaaagccgaatatttgtagttgtggtttgattaaagattagaaaacacgatatttggcgcaacgaaacagagattacaattgaagttgtggtttgattaaagattagaaaacacgatatttccagcagatcatttagctttaaaattcaagttgtggtttgattaaagattagaaaacacgatattaaaaattcaatttattacacgaatggggaagttgtggtttgattaaagattagaaaacacgatattttttgcttattatttgatacagttcttgtagttgtggtttgattaaagattagaaaacacgatattaaataccagcaaatatttgaacactaaccagttgtggtttgattaaagattagaaaacacgatattaatggtcttttggttgctttctgttatatagttgtggtttgattaaagattagaaaacacgatatttatcaatagcaaattcgtagcgcactatagttgtggtttgattaaagattagaaaacacgatattgaaattagacaaagtttaggagtggaaacagttgtggtttgattaaagattagaaaacacgatatttttagacgtaattgggaaatggttaaagaagttgtggtttgattaaagattagaaaacacgatatttctttttctaataattctgatgctcgcttagttgtggtttgattaaagattagaaaacacgatattattttacaagaatggcaagaataacagttgttgtggtttgattaaagattagaaaacacgatattgaaaagaactattgattaaagagtagctagttgtggtttgattaaagattagaaaacacgatattttaaatccacaaaatgggcaaataagataagttgtggtttgattaaagattagaaaacacgatattaagaacgttaaccgagatacaagaaagtatgttgtggtttgattaaagattagaaaacacgatattcggaacggttacgctcgaagagtttattaagttgtggtttgattaaagattagaaaacacgatatttcggacgattatagaaatttagtaaaagaagttgtggtttgattaaagattagaaaacacgatattactttgtagctaactatacaatggaagaggttgtggtttgattaaagattagaaaacacgatattgttgatttaaacgtaacaggaggacaaatcgttgtggtttgattaaagattagaaaacacgatattaaaaaggattttagacacaattagtcacttgttgtggtttgattaaagattagaaaacacgatattacgcacaagatcgaaatagaagagcttatgttgtggtttgattaaagattagaaaacacgatatttctttatcgattaacagctcgagaccgtcagttgtggtttgattaaagattagaaaacacgatattagctaacagcttagttattaaatatcaaagcattaagccaaaatatcgttaaaaaaaatgcttcttttttggcacgttataccaagattgaagcatttttttatttctaaaacagttccagttgggtgggttgtggtgctttaggggtttctactttaccccaaaagttttgtatgttcccaaattgcttgtctgtaattcgtaacatacttacttttcctgaaggaggcaggagtttgtgtacacgtttttcatgtacatcggcactttcgctactggcacaatgccgtatatataccgagtattgcatcatactaaaaccatctttcaaaagttggttccgaaatccagaagcattttttcggtctttcttagtctcagtaggcaaatcaaaaaacacaaacaaccacataattcgatacccgtttaaatccataattttgggtattttatctttttacgatcgcccgaaaaacactgttgtaaggaacttgccgttttttgtaatcctaccatcaaaggacttttttcgtctttaaaatacactgtacgcgtaagtatttgtaataattcagattttatagctgtattcagttcttgctcttcgtagcgctgtattagttcatatactttttcatctactaaagggcgaaaaggttccataatatcatctgctaaagcaaaagcattgtatttatttctatgatgaatacctaaggtgtttaataaaccacttcctgataaagatctagctgtggctgctcgtaataaagtataaccgtaatttaaaaaattattaggataatctccaaagcgttcccgcttgaaacgtatatcaaaaaattgtttccaatactgactggctgcaactccttccatattactactatcaccacttaaaaccttagaagctaaaaaaggaaactgattttttaaaccagttatacgctcaagtaacaaaccttgatttgtaattttttcaacaatggtttgttgccataattgtttttttagcggaatacttgcttcaatctgatatttaaagagttcttgttgtatatggtgactattcaaattcaaaaacataccttgtggcaaatgggatgcgttgcaaataatgacagcactgttatgttctaataataaatttaaagctgggagactaatatagatttcttgactttcaagtaccaaaaagcctatatcttctatgggtatagtagcctctcgtaaaatcccttttataattaattgattgttttttgtataaagagatgatttattttcaattagaatggttttttttagcatttatttttttacgatgaatataacagctcttttagaacttctattacggaaaaccgtaaggtctttaaaaacatagaatttacttttgtcaaaaaaggtaaaatgaaaaaaatatttttagttttagtatgtttttgttgtttttggaaatgtaaaaaagaaccgataaaagtaccagtaaaaccagcggtaaaagtaaaaatcgaacccaatgacatcaaatctgttacaccacaagaagctcaaactttttataaaaatcctgaaaagaaatacgaatatcgaacaggaaaatttaacgaatatgagtataattacgatgtaataggaactgatcaagataataatgtggttacaggcaatattattacacacaaaaaatacggggcgggaatactttataccaatgacaaaagtgatattcctgtgaaagtagagtggataggttatggtaaactaataggaattgattctaataaaaatgaatatgaacttaaaataaaagaataacaataaaacgaataagtgtatattaatatttatacttggtcttatttctgaaaacggaagtacctatttgtggaggtactggtacaaaaaaatattttaaagtatcttgtgaggattaaatagagctataagcaacccatttataacgcttcattaaactcatattatgtgttagattttgtgataaataggaaaaagataaagaaggtaaaaagggatataaaatttttaccacagctatagttttacattgaggacaaaaaatagagacttttttagattcaaaaatcactttttatctgtaataaatttctaatgcgtaatctgggttaaaattaagtttaaatttgtcaggaattttagactttagatttaagttgaactctatattattttatgtaattttggaagtatgtatacatctagcgatatatttgaaattagttctaaaaaagaattcgaaaagcttactttaaaaatttttcgttttcagtataatcataatttagtttatcaaagattttgttctttgctaaaaaaggatgtaacaaatgtaaaaaggatacaagatatcccttttttacctgttcaattttttaaatcaaatgatgtattgagttctacagatccaatacaaaagatttttacaagtagtggaacaacaggaatgacaacaagtaagcattgtgttacggatttatctttttatgaagaaagttacagacaagcttttaaacaattttacggaaatgttgaagattatgtagttttggcattattaccctcttatttagaacgtgaaggatcgtctttgatttatatggttgacgatttaatccgtttatctaatactcctgaaagcggattttatttaaataactatgacgaacttatagaaaaattgataacactagacaatgaaggacataatattttattaataggtgttacttatgctttattagatttagtagaaaaacaaaaatttaatttaaaaaataccattatcatggaaacaggaggtatgaaaggacgtagaaaagaaatgattagagaagaattacatactattctttgtaaaggttttggtgttcctgtaatacattctgaatacggaatgactgaattattatcccaagcttattctttaggaaatggggtttttgaatgtcctgcatggatgaaaattatcattcgcgattctgaagatgctttaaccttattacctgatggtaaagtaggaggagtaaatataattgatcttgctaatattaattcatgctcttttattgctactcaggatttaggaaaaatactagataataattcttttgaaattcttgggcgatttgataattcggatattagaggttgtaatttgatggtagtataatacttgtattatatcggttttaacgacttctatagacgaaatataaaatataatttctaagacaacacaataatacgttataaaaatgaaaaaaacacttattgctccatccgttcttgctgctgattttgctaatttgcaaagagatattgaaatgattaatacaagtgaagccgattggtttcatatagatattatggatggggtttttgttcctaatatatcttttggtatgcctgtattggaagctattaaacgatatgctaaaaaaacaattgatgtacatttaatgattgtagatccagatcgttatatttcaacttttaagaaactaggagctgatattttaaccgtacatttagaagcttgtgtacatttgcatagaacccttcaagctataaaagcagaaggaatgaaagcaggtgtagctctgaatcctcataccaatataacattattagaggaggtaattcaagagatagatgtagtttgtattatgagtgtaaatcctggttttggaggacaatcatttatagaaaatacgtattcaaaagtagaaaggttaaaagcattaatagaaaaaaaaggagcctctactctgattgaaattgacgggggcgtttctactaaaaacgcaaaaaaattagttcaagcaggtgcagatattttggttgcaggtagctttgtattcaattcaaatgatcctaaaaaaacaattatagatcttaaagaagttgttaaggaataaaagggcttgacaatagataactcgtttacttcatccaaaagtatttccaattgtacctaaaatgttttaaaaaaaatcctttttttgagtaaaaatagccaaaaaaaggattttttcaataagtgttctaaactattatccccatttaaaaggaggatttcttctcataattaattaataaattaataaacttactataactctgcattccttctttttgttgatttagttttaaaaaatggtcgtaaaatatttcaaaaccagtattgatcattgattcatgtactgaccaaaaggtttcactttcttgaaagttttttaaaaccccaggatgaatagtgctaagtatgctttttaattctttttgatctttagaggcaatatgggctagacaataacgtaaagcataggtatacccagcatattgaaagaacaaatttttgttatgagtacaagctaaaaaaccaataaagttgcattcgctttcactagaatagcctatttgatgagccatttcgtgacaaactatagcgggtaaattataagaaggaggcatatcgtttacttgtgcttcatttgtgaaaggatttaaataacctccaaagcccatatacgttagtgggtaactaaataaggaactttttatgctagaatttgtataatcaaaaaagggatgtgtgttttttaaattagcatatcctaatggagctaatcggaatatttgagttgttttatagggactaattacttttttatttacattatgtgtgagtttaaactgaagtttattgcttgtgtagataagccttttggtaaattgtaagagttcttcttgacgataatcagttcttaaattcattttttcataaagaggcatcctataataattataagcccaaagtaaatgaaatataaaatagcctattactagcattttaaagaggtgtttaactttttctatccaatttattttttggtttttataaaaccaatataggagataaatacttaaagaaatataaataagatcaccaacagaaaaaggaatccaaccaaaaatgattctatttagttttgaaataataggatagcacccattactataatactgttctataatagcaggaaatttagaaaatacgcttagtaatactaattgaaatataaagaatgctaaaaaaaaaatgttttctgtaaatagtatctttttgatttttaagggcttcatatcttttagttaatcaataaatttagcttttaattctggagttggaatcatacaagtttcttttttaccataccatttgtaacggtttttagcaacaaagtcataaagaggatcgcgtaatgccgttgggattattttaaaaatagatagccaattaaaaacagataattttttagcaatttctagaacagctcctgatttataataataggcttggttaggaatatataatatgatactatctatatttcgattagtgatacctagatatttaagtatttcttgtcctaattcagattgcaaagctacaaaacgaaagatgtcattatgatctctttcaacaatatattgtacccagtaattacaaagattgcatactccatcaaaaaggatgatttgtttgtcttttggtaggttttccattgattgatatttaaaaattatttaggttgaatatattccaattgttctaaacttactttggaagtaaagattccgtaatttacaatggcattattcttttcaattttatcaatcgtacctatagattttccatcaatcatgcgaacacggtcgcctaccttaaggggtattttaggtttgttttcttctatttttttggcaatttctttcttttcttttttttctttacggatttcttctactttaatttgtacttcttcaagcacttctttttcaattttttctttaacttttttttcttttagggtaattttttttcgttttgaattttcaatttctaccatttttaaaaattcacctatcagatcttttttatttttatcattaaaatattttccggaaatatcatctactttctgtcccatataaatcaaacgttggtttgcatcatataattcttgataacgttctaatttatcttgaattttagcattgatggtttccatttttttactttcttcacgtgctttggtttcttcttcttttaaattttgtgaggttttttctaatttagagcgttctttttgaagtgaagaaatggttttatcaaatcgtactttacttccttcta

SEQ ID NO: 3111 - DNA, 24380 bp, synthetic construct
  misc_feature 1..24380: note = Synthetic
  variation 15021..17070: note = note, n is a, c, g, or t
  source 1..24380: mol_type = other DNA
tatggctacagacccaataaacactaacattgtttggttttcttttggggaagcactttataaatttgatgttaccgatccagctgctccagtatttgaacaagttgcattgccaagtggcgctttattatacggaattgttatagacccaacaaactcagaccgtattacaattactcaaggtgttaatgtttatatctcaaacgatggcggtacaacttgggaagacccttctgctggcttagaaattttagtagatagagacgatatgattttgagtgcttctgttaatcctctaaattcagtccaatatttaatctcaacaacacaaggaatctttgcttcagcagataaaggtgaaacttggaatcaaatattcgacgagcaagtagatagagcttactattctagcgaaaacgatgatcaaatagttgcaattacacattattcagatggatggttatatccaaaagctgatgcgcgtattgtgtactcttttgacaacggtgcaaactgggaagaaatttctgccgaagcccttaattatttaaataccgccagttctaccattcaatttgttgatgatagagcccatgtgtattttggaacttttgaccttggattggtaaaatattcaatagacctatttttccttggtacaacaacaaatgaaacagcttcagaaattgcaatctaccctaatccaactaatgatagttttagtgtagtagcttcaaataaaaatatcgaaagcataaccatctataatgttaccggtcaattagtaatggcaaccacttctcaacttgaaaatattgatatttctcaacttgctagcggaatgcatctggtgaaaataaatacttatgagggtacttatttcaaacgtctcttaaaaaagtaaataaacgaaacccttacggtatttcatatataagtatgaagtaagaggttttctttaaatggcgattaaattaaaatatatatcctgctatttaaatgagctatatttaaaaacttatagttttgtatagatcgcatagatgaactgaaaacaattgaataataattaattttctataggttcaatatacaagcgagaatcattttcgcgtataattaaatgaccaaagcatatttgctttggtcattttttagtaaaatctgtgtcataatttttaaattaaatatgttgtaataattttaaaagaaaaatcaattgttctataaacattttatttttttcattcttctccttactcctcatttaaatcttgaagcgcaaatagaaacacaggctaatgtcgttaaacgcatagaacatggtgtaaagctattagcggaaaaacaatacgtaaaatctatagaagaattagttttagcaaaagaaatcgctaccacgcatcaatggcatcttcaaagatttaacgcaatactaaatataggtactaactattatctaatgatggattatggtgaagcatttcattattattttcaagcctatgaaattgcaatagagcacctagaaaaaccacaacaaatggcagttttcaataatattggtgctttatatggggaagaaaaggatctattaaactctaaggaggcttttcttaatgcttataatcttgccaaagaaattgatgataaggaacgtataggtagctatggtattaatcttgccattgtactaaatgaactaggagagctcgatagtgcaaaatactatattgaagaagcgctcccttatcttgttgactctcataatgttctgcttttagcaaaactgactaaagcagaaaacttctttctgcgaaatcaattcgcgaaatcaaaacaaattgccttagaaattttaccgctaattaaaagtgcgtcactattaaaagcaaagatgactgttaaagataaaatatctgtcctattactcttagctaagatttatataaaagaaaatgaattagatacagcaagaacatatgctttagtggcaagagccaacgaaaataaaatcgaaagccgtgttgacacctataattgccttgctgatatttttcttcaatcaaatgaataccaaaaagcaatggcttataaagattcagtgataatggctaaagatacactgcactccataaaaaatactgccctatataaaagcgagaaagtcaaatttcaaattaaaaattacaaacaaaaattgttacaatctaaagaagaattagataatgaaaaatatttcttttataaactaattttagcaattacaatttttatgggatttctaatttggatttataaaaacaattctctaaaacataaacaaagaaaaaaaattgtcgagctagaattaagtaaagagaaaagcgaacatttattagccgaaaaacagcatcgcgaacatgaaaccttggtgttattagaaaaagaacgacttaaaaatgaactggatagtaaaaatagagaccttaccgctaagacaatgtatatagctagtaaaaatgaacttttagaagaagttattcaatccttatccaccaactcccaaattattacaaatagtgaattaaaaaaacaaattagccaattaaaaaatcacgtcagaaaagacacttattgggatagctttacagcacattttgaagaattaaatcgcggctttctcgataggctaatgaaaaagcatcctaacctaacagcaaatgatattcgtttcttaacttttaactatatgaatttaagtaataaggaaatgggctctctacttaatattaccccacagtcctgtcgcaaaagaaaagaacgtatttcaaaaaaaatggacgtccctgaaactatatctcttcacgcgtatctttcatctatttagcacactgtcacgtattgtaacaatgcatgtcacgttatgtcccaccccttctttggagtttaatcggctgtgtttctatatttatcccctataattttaacgccgaattaaaagaagctattataatagcgccttttgatttattctaataattaactctaaaatcattctaatgaaacacattaacttttcaaaaaacatctttctagccacttgcttatttggctttgcatcgatgagcgctcaattctcacaaacatcaaaaattgtaagtgaaaatagagaaggtcgagcagaattcggaacctctgtagctctttcagataattttgccatcgtaggtacttcacgcgaaacctcggcatctggggcagcatatatctacgctaaaaacaatcaagaaacttgggacttctctcaaagattagcagcagacgacccaaatgctggtgcagaatatggtggaggtgttaaaatatccgacgattatttagtagtagcagcaggtagagcagatgttaatggtacaattagagcaggtgccttatatgtttatgattatcaaaataatagctgggaatttagcacaaaaatagttgcgtccgatttaagtagcgatgccaagttagggatgaaccctacctccttagatgtacaaggaaatacaattgtagcaggagctccaggagaaaatctttggactggctctgtatatgtattcactaaagtgaatggagtatgggaagaaactcaaaaaattatgagcccaaacccacaagcaaataatatttttggaataggagtttctatttctggcgatcaattgttaataggcgctcaaggagttgaaggtagtaaaggagcagcatatttattcacacaaaatgcgagtggcatttgggaatacagccaaaccatttcagcctcaaatggagaagttgaagattactttgggagttcagtaactattgaagatgataaaatagttgtgggttcttacggtgccgacttagaagtaggaacagcgtatatatttgaaaaaaatactcaaggtacttttgaagaagcacaaatacttaacgcaaatccgtcaacagacagagtgcaatttggttgggccactgctataaatcaagattatattgctgtaacagcacctcatatttatggcaatgaagtaggggaggtttacttatataaaaaagacgcatcaggaatgtgggtagaagatcaaataatacaaggtgacgataccgcagcggaagatttttatggatggagcatagcaatgaatggcccagaaatgatcgtaggatcacccagagaagaccacgacgttaacggtaataacgaaattggcgatgctggttccgcttatatttttaaaaatccaaacattttaggagttacagataatgaaatcaatagtagccttgttcagttatatcctaatcctacacatacagatcttaaaattgaaagtatctccaaaaaaatatctgcttaccgagtttacaacgtaagtggtgcacttttacaagaatttactagtgttaatacgaatattagtgtactaaatatatcaaactatagccacggaatgtatttcttagaaattaatttcgaagatggttcatcagtatcaaagaaaataattaaaaattaatcaaaaagtttcacatttaaatagatactaatgaataaaacaatattcctcactataacaattttgcttagcttatcttattggcaagccgcagctcaattcactgaaagctttgatgccaatttaccaacagaatggacagttatagataatgatggtcaaggaacatcttggcagttccacgctggtaatggatatcgtggagacgggggcttatggatataccaagaagattttgcacatgatgattatctcatttcaccacagtttactgtaacttcaggccttacagaccatatctcgttctatgcaggtggttctggaattaattttcttgaatcctttgaagtaaaagtatctaccacaggtactaacccctcagatttcaatacactgctaggttctgaaaccacaatttcaaacgtagatactcaaggagattatgtaaattatgcctacaacctagcagcttttgacggacaagctgtgtatgttgctgttgtagctacttctacaagatcatttcgtttatatctcgatgaatttaccgtagatgctttgcctagatgcccaaaaccatcaagtataaatgtacagaacttaacagatagttcggttgatttaaattggaacctcggtggtaacgaagatgaatggagtgtgaaatatggacctcaaggatttaacccagaaacacagggagacctaatcgccgttactggaacccctaacacattcattgataatctggaagaagcaaatagctatgatgtttatattaatgctatttgtggtacacaaggagaaagcgaaatggccgggccttttacctttaaaacactctgtgcacctgctactcttccatttttggaaggatttgaagaaaattattccaatggcaccaatcttggaaattgctggtcccaagaaattatttcaaatacacattggaaagtaaataattcaatagtcgctggaaatagaggcccacgcacaggcgattttaatatttatttacctaaaggaagcgatacctggatgttttaccctatcgaagtacaaagcggtataaactacaccctaagtttacatgctagacaaagtaattcagaaggggcagatattgccgctagctacggtaattctgaaaactctgtagatatgattcacgaaatatttccaactacccaaataactagtggagactatcaagaagtaagtggaagctttataccagccaattctggagttatatacattggtattagaggtcatttaatctcaggcttttttccattttatttgtcagtagacgatatttcaattacagaaaatcaaacctgtcttatacctacaagccttcaaatagaaaatgccaccccagatacagcaactattagttggaatcctgaaaacgctgaaactgaatggttaattaaatatggcgaaccaggctttaaccccactactgaaggatcctacttgcaagttaatggtagtcccaatgccacaattacaaatctaatgcctgcgcatatttacagtgtttttgttcaatcgctttgtgggggtactgatggtaatagtttttttgccggacctattaccctaaaaactacaccaataaatgacgatttgtgtaatacaaccaccctcactgtcgatgggctatgtacctctgggtcatataccaatgttggtgccactttacaacgagatgagccccagggctcatgctacgatgcggcaggaacacaaacagtgtggttcagttttgttgccccaaacagcggtaacgtaactgttactacagattttgaaggaggaaccttagaagatacagaagtagcagtttttgaatctgccacagattgtaataaccttgctaccttaggaatcgaaataggttgcgatgaagatggaggtattataggcgatggttttttatcagtcgttaccttaacaaatctaattgaaggaaatacctacttcatccaagtcaacggatttgaaagttttggagaggggacttttgaaggaactttttgtatcgaagtacaagacgatggtatagactgtatcaccccatcaaatatctcggtttctgatatcacagccacaacagccttagtcgattggaatccagtaggagatgaaactgaatgggaaattaaatacggtccaacgggttttgaccccttagttgatggtgaaagtgttttagataatgacggagtgccaaatgaaatcttaacagacttgttagtagattcagcttatgatgtatatgtgcgcgctatatgcgatgccactacccaaagcgattttgaaggacctcatgccttcactacttctacactgtctatagatcaatcaaatttactgtcgtttagctattatccaaaccctgttcaacatagctttactgtagaaagtaataaacgtatgagtaacattcaaatctatgggattaatggcgcaattcttaaagaagccaccgtcgctgcaaatgttattgatataaatatttcaaacttttcaaacggaatatattttgtaaacgttatttttgaagatggttccaaaacagttcaaaaactcgtgaagcaataattccctcaattctataattctcaccattttttaataaaaggaggctgtctaaaagggcagccttttttcatgactatttttggtgtattttgaatcttcatggtgtgaaaagaacccttgtatggaagaccaatagtaagaatcaattgggccttccgcctcccaactatgatgatagtattccaaataaatatcctgtttgtattgtcaatatgatcattgacgagaagatagtacggcttttgaaaagacctatagaggcagtagtgtctctagcaatcatcctcgcgatttattgaaaatattaatctacgcttatttgcggaacctatctagttggttattatgggcagagaaaattcaaagattaattatgcactccctttttaaaatcagcaatccttcaggcattgctattgctgctatgagcagggctaaattgttaccctctgcggagatatgtaataagtataatcctgaaaaatactggagatgaattaaataccaaacttaagaaatttggcattttactatacgattgatttacatattttagtgatggttttaacttttatcacccctttacaacccttttaaaaaagatagaaactacttaattaaaccatttaatatctactattttttaattatatatgattaatggtagcttttcatgctgttgttttaattgcataggcttttaatgagaaagtgtttgatcaatttaatcttcaagaaaataagcactctgtgtcaatccactggctaggtaagcttgcttttactttggagatttaatgttggggtttattgcctttttctttgaacctgttggtgtttaatgcttgtattaataatatgagagaaatacaaattgcttttacattcctagaccaaactagcttggggagtgtcttaataataattaaggctataaattttattttcaataatgtattttacaatatatcacccggcttaagagctttgaatgtgaatatatcagctaaaacgatcacgaagcatccctcttttagaagctgaaaattccgattaggcgattatcctcccctctaaaatcctaattcttcggttcccccaatacagcatacttaacgcaacgatagcgcataaaaacataattcccgtcatggggagcggcgtgtcatcgctcagcatggataccagggcagtaatcagggcgccgattcccaactgcagcgcccccataagggcagaggccgttcctgcgctcttttcaaaaggcgccaaggacaaggctgaagtgtttggaaacgcaaaaccttgtgtgctcaaaaatagaaatgccaaaacgatcatggagtacatttcgatgaggtggaatatagtaccgaaaaacaaaagtgcgcccgcaataacttggcatattagggtgacttttacaatttgttggctcgtatatttttttagcagaaacgtatttacctgactggcggtaaccaagcccatggcaataatcccgaaaatccatccgtattgtttttcagaaaccccgtagagttccataaacacatgcggcgaaccagcgatataggcatataggccacttgcggcaaaagagcccgtcaaggtataagtatagaattgtggtgttttaaatacagtccagaatttggtgattatcggccttggttttaaagacatcgttgtatctggcggtgcccccaaaggaagccaaaaataaaccagaataatgttaaccgctgccagtacggtcaaaattataaaaatagaatgccatccccaatgagccgtggcgaacccgcccagagtaggggcaacaattggcgaaactgcaatcaccaacataagcagactgaatacttttgctgtttccgttactggaaaaagatcgcggaccaaagcccgcgcagctaccattcctgcacatcccccaagtgcttgcacaaatcgggcgaggattaaggaatctgcggaagttacataaacgataaaaacagaagcaaataaataaataaacaacccagtcaacaatggaatccgtcttccaaatcgatccaataaagggccatagatcatttgtccaacgctcactccaataaaataactagataaggaaagcgccacccgccccgtggtagaattcaggtcgcgcgctatctcgggaaaccctggtaagtataagtctatggaaaatggtccaagggcagaaagtaggcccaggataagtattacaagagttcgttttttattttgcattgtctttttaagagtttgcaaaattacaaaaggtgctgctgttacggatcaagattaatagatcattatggaaaatttgagagatgttgtttgaaggattttgtggatatgacttgtaagcttatatgctaaaagttaatgagagtgtttttagatggctattcacaggaattccaaattcaaaccattgtttgacttgttgtgaattgctttagctctcattaatatttttatttgaatcgctgaacctcttctgtcggtctcggaaatgcagcgcattcacgacttcgttacttttaaataatagcacaggagtaattgttttttagttgactattaaaccctaggattaaacaagtaagttaaaatggaaattaaaaaataacttcacaaaaaaaaagtcccaccgaagcgggactaaagattttcatctacggcatatagccttattgtgataagattatagattaggataatttatttcacatttcaaatatatcaaaaaatttctttgcctgcaatgtggaatcccgtaaaacggataaattattttttggtagtttagtggcatcataaaaaatttataagttatggcaagaatattaggattggatttgggaacaaattctgtgggatgggcggtggttgaaagagaaagcggaattttctctttaatggataaaggtgttaggatattttcggaaggtgtaaagtctgaaaaaggtatcgaaagttcacgggctgccgaaaggacaggcttcagaagtgcaagaaagttgaaatacagaaggaaattgcgaaaatatgaaaccctaaaagtactttcgaaaaacggaatgtgtcccttaactgttgaaaatgtggaagattggaagaagtcgggttttaaggattaccctctaaatcctgaatttttaagttggttacggactagcgacgatgataaaataaacccatatatctttagagaccgagctagtagacataaaatctctctgttcgatttgggtagagcattttaccatatagcgcaacgcagagggtttttgagcaatcgtttggaccaatcagcagaaggtatttttgaggagcattgtccccaaatcgaaaattcaatagaagacctgaactttacggaggatatattgatggagctgcaggactattttaagactgttggtattcttgatgagtcagtaaaaggtgggtttgcaaaggatttggatgaaggagaaaagaaattgaaatctttatacaattcactaaaagggattataaagaaaaacgaaggagatattgataaatgtaaggaagaactaatataccgattaaacaaaaaagaagatttaggaaaagtaaaaggcgaaattaaggatatctctcaagcgatgctagagggtgggtttaaaactctggggcaatatttctgtagtttgtataacaaagaaagaattcgtaaccattacacctctcgagaagaacattatttggaagaatttatcacaatatgcacggtacagggtattgagactattaatgaaaatgaaaaactaccggaaaaacgtttttctggattggctaaagaactctacagagctatcttttttcagcgccctttaaaatcccaaaaagggttgataggcaaatgttcatttgaaaagaacaaggcacgttgttcagtttctcatcctgattttgaagagtacagaatgtggtcatatctcaatattatcaagataggtacacaatcggaaaaaacaatgcgttttcttacggacaaggaaaaatcacgtttgattcctaagtttatgagaaaaaaggatcatttcaattttgaggatttagcaaaagaactgattgaaaagggcgcttcgtttggattttataaatcgtcccggagaaatggatttcattattggtttaatttcaagccaaacgatacggtttctggttgtccggtttcagcgtcgctaaagaatacactaggcgaggattggaaaataaagtctttcaaatataaaacgttaaattcaaaaagtgcacaagtagaccgaacggttggttatagggatctttggcacttgctttcggtttcaacctctgatgcctatttatatgaatatgccaaggataaattggggctggatgctaaagccgctaaagccttcagtaaaataaaattaaaaaaggattttgcaagtgtaagcctgaatgctataaacaagattttgccttatctaaagcgaggcctattgtattcccatgctgtttttatggcaaatatagagaaattggtagatgaagaaatttgggaaaaccaagaggagcggttgagcatccaaaatggtatcgctaaaattatcgaaaccaatacttttgagaatggaatttctggcctaatcaattctattataaaagactgtaaacagaacggttatttctattctgatgaatcaaaacatttatacaaaaagcaactggatgaaaagttagagccctttattaaaggatttaaaatagagaataccgaacaacgggaattaattgcgaatgaagccttcgtccggttgttaaagcaaataaaggagtttgaatatttgaaaataaaacggttagatgaaaaagtggtcgagtttattctgggaaataacgagaatggagtaatttattgttccgatgaaaaacgagttaacaaactatatcatccgtcagacattgaggtgtttaaaaagaagataatcaaggatgataacggaaatgaaaaattggtgcttggaagccccataacttcttcggtgaaaaacccaatggcaatgcgtgctcttcaccaaatgcgcaaagtgttgaatgctttgattctggaaggacaagtggatgagaagacaatcattcacatcgaaatggctcgggaattaaacaacgctaatagacggaagggaattcaggattttcaaaatgaaaataaaaggaagcgtgaagaggccattaaggaaataaagaaactttatttggaagaatgccacaaagaagtggagccaactgtagacgatgttttacgctatcaactttggatagagcaaaatagatgcgaaatttatgaacgtggaaataatattagtatttgcgatatcattggggcaaacccaaaatatgatattgagcatacgatacctagaagcatttcgcaggataattcgcagttaaacaaaactctttgcagtagggaattcaatagagacatcaagaaaaacaaaatgccgattgaactctccaaccatctcgaaatattacctcggattgcacattggaaggaagaagctgagaattacgatagggaaatcgaaataattactcgttccataaaatcggtagcgacaaaggaagcaaaggataaaaaaataagaaggagacattatttgagcttaaagcgtaattatctacaagggaaatatgaacgttttatctgggaggaaccaaaagtagggtttaaaaacagtcaaattcccgatacgggcattattacaagatatgcagaggcatatctaaaatcctattttagaagagtggaatccgtaaaaggagggatggtcgctgagtttaggaaacaatggggaatccaagagtcatttattgatgaaaacggacaaaagcaatacagaccaaaggacagaagcaagcatacccaccacactatggacgctataacaattgcttgtatgaccaaagacaaatatgatgttctggctcaagcctggaaattggaggatgagcaaaacaagaccaaagccagggctattattgaagcagcgaaaccgtggaaaacctttaaggaggatatggtaaaaatagaaaaggagattctggtttcacattacaccccagacaatgttaaaaaacagtctaaaaagattgttcggatcaggggtaaaaaacagtttgtggcagaaatagtaagagatgacaatgacaaggctattccaaaaaaggattccaatggcaaagtaatttataaattaaatccagaaggaataaagattccaagataccaacaaggggatactattaggggctctttgcatcaggatagcatttatggtgccataaaagatccattgaacaagaaagaaatccgttatgttattcgcaaggacttggaaagtattaaagcttctgatgttgaaaatattgtagatgaagcggtaaagaaaaaagtaagggaagccatattaaacaaagtgttactcatttcatcaaatccacaacaaaagaataaattcgctaaaaacgaaaaggtatggatgaacaaggataaagagataccaataaacaaagtgcgactttatgccaaatctgtaaaaaacccattggaaataaaagaccatagtgctttgtcgaaatcaagacacgagcacaagcaaaaaatatatggacaaaatgatgagaattactgtatggcaatatatgaactggacggtaagagggattttgaactagttaacaattttaatttggcgaaactcataaagcaggacgaaggcttttaccctatgtctaagcaaaagaaagttaaaggtaaggtggtagaaatgcccattgtaaaaagcaataaccgtgatttggttttaaaacgtgggcaacaagtgatattttatgataagaaagtagaaaatccaaaaagtataactgagatttcagattttattggaagaatgtacattattgaagggttgtcgattcaaagaattgttcgcccatccaaaaaaattgatgaatatggagtaattatgttgcgatatttcaaagaagccagaaaagcagacgatatcaaaaaacaaaaattcaagccagatggtgaatttaatctcaatgagagcaaacctttacgtaaaatgaaccacaatcagttttctgcttttgttgaaggcattgatttcaaggtgttgcccacaggaaaaatagaagaattgtgaattatttgtcattccgacagaggaggaaatcggagattcaaggtcgttaatcccataagagtaaaaatgtaactattatgattggatttaacggaggcagtcatacatactatgtatatatcattaccaataaatgccgttccacatattatattggagtgaccaataatcttgggagaaggttacgggaacatcgggaaaatatagaaaagggaattaaaacatttgcatttaggtatcaaatacaccacttggtttgttatgatagattttcttagattcagctgtaaatagcaagggtaaagtaggttaaggcttggcggaggaataaaaaactggctttgatccgtcctttatatgcttcttttgagtttttggaggatcgattttgggtaattaacttgtcatttcgaccataggaagaaatctaatcagagtgagttttggagtgttgaatgaaggttggtggaatagcgggacaagattccacctgcgttgggattgataaatccgaagttctttgacatagcccctttgttcttaatggaccaaaccacaacggaaaaccgacctttcggtttttgtcgcgacggtttcttcgttatgatttgattaaagattaggattcacgatattgttannnnnnnnnnnnnnnnnnnnnnnnnnnnnnnnnnnnnnnnnnnnnnnnnnnnnnnnnnnnnnnnnnnnnnnnnnnnnnnnnnnnnnnnnnnnnnnnnnnnnnnnnnnnnnnnnnnnnnnnnnnnnnnnnnnnnnnnnnnnnnnnnnnnnnnnnnnnnnnnnnnnnnnnnnnnnnnnnnnnnnnnnnnnnnnnnnnnnnnnnnnnnnnnnnnnnnnnnnnnnnnnnnnnnnnnnnnnnnnnnnnnnnnnnnnnnnnnnnnnnnnnnnnnnnnnnnnnnnnnnnnnnnnnnnnnnnnnnnnnnnnnnnnnnnnnnnnnnnnnnnnnnnnnnnnnnnnnnnnnnnnnnnnnnnnnnnnnnnnnnnnnnnnnnnnnnnnnnnnnnnnnnnnnnnnnnnnnnnnnnnnnnnnnnnnnnnnnnnnnnnnnnnnnnnnnnnnnnnnnnnnnnnnnnnnnnnnnnnnnnnnnnnnnnnnnnnnnnnnnnnnnnnnnnnnnnnnnnnnnnnnnnnnnnnnnnnnnnnnnnnnnnnnnnnnnnnnnnnnnnnnnnnnnnnnnnnnnnnnnnnnnnnnnnnnnnnnnnnnnnnnnnnnnnnnnnnnnnnnnnnnnnnnnnnnnnnnnnnnnnnnnnnnnnnnnnnnnnnnnnnnnnnnnnnnnnnnnnnnnnnnnnnnnnnnnnnnnnnnnnnnnnnnnnnnnnnnnnnnnnnnnnnnnnnnnnnnnnnnnnnnnnnnnnnnnnnnnnnnnnnnnnnnnnnnnnnnnnnnnnnnnnnnnnnnnnnnnnnnnnnnnnnnnnnnnnnnnnnnnnnnnnnnnnnnnnnnnnnnnnnnnnnnnnnnnnnnnnnnnnnnnnnnnnnnnnnnnnnnnnnnnnnnnnnnnnnnnnnnnnnnnnnnnnnnnnnnnnnnnnnnnnnnnnnnnnnnnnnnnnnnnnnnnnnnnnnnnnnnnnnnnnnnnnnnnnnnnnnnnnnnnnnnnnnnnnnnnnnnnnnnnnnnnnnnnnnnnnnnnnnnnnnnnnnnnnnnnnnnnnnnnnnnnnnnnnnnnnnnnnnnnnnnnnnnnnnnnnnnnnnnnnnnnnnnnnnnnnnnnnnnnnnnnnnnnnnnnnnnnnnnnnnnnnnnnnnnnnnnnnnnnnnnnnnnnnnnnnnnnnnnnnnnnnnnnnnnnnnnnnnnnnnnnnnnnnnnnnnnnnnnnnnnnnnnnnnnnnnnnnnnnnnnnnnnnnnnnnnnnnnnnnnnnnnnnnnnnnnnnnnnnnnnnnnnnnnnnnnnnnnnnnnnnnnnnnnnnnnnnnnnnnnnnnnnnnnnnnnnnnnnnnnnnnnnnnnnnnnnnnnnnnnnnnnnnnnnnnnnnnnnnnnnnnnnnnnnnnnnnnnnnnnnnnnnnnnnnnnnnnnnnnnnnnnnnnnnnnnnnnnnnnnnnnnnnnnnnnnnnnnnnnnnnnnnnnnnnnnnnnnnnnnnnnnnnnnnnnnnnnnnnnnnnnnnnnnnnnnnnnnnnnnnnnnnnnnnnnnnnnnnnnnnnnnnnnnnnnnnnnnnnnnnnnnnnnnnnnnnnnnnnnnnnnnnnnnnnnnnnnnnnnnnnnnnnnnnnnnnnnnnnnnnnnnnnnnnnnnnnnnnnnnnnnnnnnnnnnnnnnnnnnnnnnnnnnnnnnnnnnnnnnnnnnnnnnnnnnnnnnnnnnnnnnnnnnnnnnnnnnnnnnnnnnnnnnnnnnnnnnnnnnnnnnnnnnnnnnnnnnnnnnnnnnnnnnnnnnnnnnnnnnnnnnnnnnnnnnnnnnnnnnnnnnnnnnnnnnnnnnnnnnnnnnnnnnnnnnnnnnnnnnnnnnnnnnnnnnnnnnnnnnnnnnnnnnnnnnnnnnnnnnnnnnnnnnnnnnnnnnnnnnnnnnnnnnnnnnnnnnnnnnnnnnnnnnnnnnnnnnnnnnnnnnnnnnnnnnnnnnnnnnnnnnnnnnnnnnnnnnnnnnnnnnnnnnnnnnnnnnnnnnnnnnnnnnnnnnnnnnnnnnnnnnnnnnnnnnnnnnnnnnnnnnnnnnnnnnnnnnnnnnnnnnnnnnnnnnnnnnnnnnnnnnnttcttcataatgtgtaaaaatttaaagttaataaataaatagcgggggccggcccccgctatttatttaacttacacactttatgagatagtccctttttttgttttaaaacagttctaattgtgcaggtggcggctctttgggcactgcggtcttgccccaaaaattcattatattgccaaactgtttatcggtaattcttaaaatactcacttttccaagtggcggtaattgcctataaactcttttttcgtgtacatctgcactttcactgcttgcacaatgtcttatataaacggaatattgcatcatggcatatccatcttttaaaaggttttttctaaaaagtccagcattgcgtctatctttttttgtttcggttggtaagtcaaaaaatacaaataaccacataatcctataggcatttaattccataattttggatagctaattttctttgcagtaccattataacattgctgtagagaagttgtagttctagtaattgcgaccatcaacgggcttttggttgttttgaaatatactgtttccgtaagtatacccagcaatgccagtttgatatctgtggtaagctccttttctttaaagtcgatcattatctgcaatacctttgcatccactattggtctataaggctccataatatcgtctgccaaacagaatgcattgtatttattgtgatgatgtattcccaaagtgcaaaggagtccgcttgccgcaagggagcgcgctaccgcggctctcaaaattatatagccgtaatttagaaaggagtttgggtattcgccaaaacgttctcttttgaaatcgaaatcaaagatatgtttccaataatgtgcagctgcagcaccttcacggttatcggtgtcaccgctcaatacttttgattcgtgaaatttcattacttcaaaagatttgtctgattttttcaaaagttgggcttggtactttattttcctttttattatttgttgccacaactgtttttttaaaggttcggaagcttttatttggttgctaaacaatttttgttgggtgtgatgtccttccagatttaaaagcatgcttgagggcatgtgtttggcatcgcaaaaaatcactgccacattattatcaataagtttatttaaagcgggaatggaaatatagatttcttggttttcgatcacgacaaacccgacatcctcaatgggaacagttttttctccagtttcaatcttgaccactaattgctcccattttgtggtaatggatgttttgttggtaaaaaagagtgttcgttttaacatgccagcaaatttttccatttacaaaaaagtaacttctttgttttgtatgggatgtgtctataaaggttagtccccaaatccaatcctaaaattcgtttcataatctttatgcttaattatttgaagttctaaacttataaaaaaataaattcatctctttacggaatcccgtaaagaccattaaatattttttatatatctttggattacaattttgaaagcaattcacaataaggattattccgttgtgaaaacatttaagccgcctcaccttccaatgtggggcattttttttggttaaatgtttcacaagctccataatctataatagatacagtaacgagccaaaacagttaggttggttttaccacctacgctttagattaacggaattcaattctctttcagtttttagttcctagaaatcccagaagttccattttcggtttcgatttcgatttcattttcacccaacccccaaaacccgcatccccctagcatccttcatctccaacaactccccgttcacattcctataaaaaacaaccccaaccgcactaaccaccgccaccgcttgaggcatagcattagcttcagccaatcttaagctaagagttacggacgcaatcatcttttgcttcaaatcaattggctcactttccacaagggcgctaaggcttctgtgttttggctccaagggcacatatttgttttcatctgggctgtattcataattacttacggtagcagcacacaagataaacttaaagtgggtagcctctttgggcgccgttatttgttccttaggctttaggttaggagaggtccaagaaacctcgtttctgcctgggtttaatgtggctttgttttttataccaccaatgctatagaccaaaggccgggcatttacaaattcaaacccttctagcaaactgccgtttttacgtatatccagcttccgttgtccacgaatgccagtgcccaagccaacaaccaaacgcatcgcgccactcaacctgccagaaaaatagcgatcgccaagctctttcttattgcgcaaaaaggccatccgcaaaaccttggccgccatacttgccccgccaagttccatcatattgtcccgcgtacctttactttttgggtgcgtcaagatgtgattcttgctcaccgtggctttttgttttacgatggttcccttttcgtcctggctaaagctcaatccgcccatgctgccagatagtttaaaaaaatcattctttatccgtgccatatcaaagttttttataaaccgactcgtgttacaaaatagcagccacaagccgataatgggttcaacaacaaatataaaatcatacactcagatcatcgagatcctatgtctagcaattggggagaataactttggagattcaaacgagcagatgcaacgttctataatacaacaatttactaaaataactcaatttcagttgataagcaaatcccagttccaaaaacacctaaatatcccctcgtcaaacgaaaggactaatagaataggaaattagtatttaaagccaaaataaagccattccttttagaaacaagaagaagttaaactggaaatattaaacccaaggtagcgatttttacaactacagaaatctccataaacaccggtggtttaataagacgataaggaatctttacagcaacgaaggtccaggtcaggtccgggtgaggtgcgggtaaagtccagatgggttaagggtgaaattgctaaaaaaatgaggataattaaaaaagccaagtgattttgaccatatctatgatagaactactaatatacaaaaaaatctaatgttgaacatctcacatctaaaatttcacctctactcttcacattccccatccactcaacaagtaaccctcgctctcccagcaacgcaagccttgatttaagtttttacatcacaaccgtctttggattgtattccatagtgcaaagcccatagcccatagcctatcttggagatatcaatccattccggaaggaggctctaggcgcgcgatgtaagcaccaacccttcaaaaaaacagcatagacaaaatgaatgaaatcttttttatgatctcgattaagttaattgtttagacaacatagatataagcccattttaaccgaaaattacaaaacccgcaaaattttccaacaactaccggctaccgactaccaactaccgactaaaaatagtacttttgcaccctcaaaataaattacatattacataaaaattatcatgaagaagacattcgacgtacttatagaaattccaaaaggaagccgtaacaaatacgaatacgattttgaattaaagaaaatccgttttgaccgtatgcttttcagcagtatgatgtatccagctgattacggttttatacctgaaacctacgcccgcgatggtgatccattagacgtattggtgttgggtcacgagcctacattcccaatgtgtgtgatggaagtaaaggctattggtgttttccatatggaagatgaaaaaggaccggatgaaaaaattatctgtgttccagtatcagacccagtttggaaccaattagacgacttacaggatctgaacccgcacttgataaaagagattgaacatttctttaaagtatataaagatcttgaaaagaaacgcgtagatgttggtggttggggagatgcaacagaggccattgaaatttttgaccagtgcataaagcgctatgaagacactccggaagtacacgggcgttttagtatttagattttagacgttagacttgagatgtgagacttgagatttcagtcgtttcatcttaggtaataaaaaggacataagccgaaggacgtaagacgtatgacccattcagggtttcgtcttacgacctttctatttgtgggattgaaaaaatacctcgcttccgtgtgtccttccaataattataagtcacgagattgcgtcttaactttttattatatgatgtagtttgttgtagggaattgatatttggtcggttatatttataaaggtaaagatataactaaaccattctttactgttgttacaaggtattcaaaacagattgaaagtctgttccattcgtgaagtctatagtgccctgtttgcgccatcagtttcaagaaaagaatgaacctacccagttagcctaaggaaggcagaggggttcgtgtaaattagtgcaattcgtggcggtactttgaatgcaagtaaatcacaacaatactttaaaaaagcttctttgctttaagagttatggacgttggaggctagacgagattaaagctcgattttttacaacttttcatatataactcaatttcatttttcaaataactttaactagtttgttctgttttatattgaaggagcttaggtctcagggcgcaacaaaataattgatttaacaaactcggtgatttcctgtttcatatcccaatgcatttccttatttttggaatcgaaaatttacaaccaacccttaatctaaagaaatttatggaatcaatgatgatatacgcgccaattgctatggcgatactaggcttaatctttatggccgttaaacgttcttgggtactgaaacaaaacccgggcgatggtaaaatgaaagaaataagcgatcacatttacgaaggggctttggcctttcttaatgcggaatacaggctacttgccgtgtttgtggttatcgtgagcgtcgctttggcagtggtatcatacattgttccaacaacacatctattaatcgtagtagcctttattttcggagctgttttctctgccttggcgggaaatatggggatgaaaatagcaactaaaacaaatgttcgtactacgcaggctgcgcgtacaagtttacctaacgctcttaaagtatcttttggtggtggtaccgtaatgggccttggtgttgcaggtcttgcagtattaggattaacagccttctttattttcttctttcattactttatgggaggggtttggacaaacacaatggatatgaccattgttcttgaaacgctggcaggattctctcttggagcggagtccattgccttgtttgcaagagtaggtggtggtatctacacaaaagctgccgacgtaggtgccgaccttgtaggtaaagtggaagcaggaattccagaagacgatccgcgtaacccagcaactattgctgataacgtaggtgacaacgtaggggacgttgccggtatgggcgccgatttatttggtagttatgtagcaacagtattagcagcgatggttttaggtaactacgttataaaagatatgggcggtgcaattaccgacgcatttggcggtataggcccaattttattgccaatggcaattgcgggtgttgggattattatttccattattggaactcttttagtaaagatcaaaagcaacgatgcgaaggaatcacaggttatgggtgccttaaatattggaaactggacctccattattttagtggcaatttcttgctttgcactatgtcgttatatgttgccagaaacgatgcaaatgcgtttcttcggtttggttgagccggttcaaattacttcaatgcgcgtgttttatgctacattagtaggtcttgtggtaggtgccaccatttcatcggtaacggaatactacacaggactaggtaaaaaaccaattcttaaaatagttcaacaatcatcaacaggtgccggaaccaatattattgcaggtttagcgacagggatgatttctaccttcccttcggtattactttttgcaggtgctatttgggcgtcctatgcttttgctggcttttacggagttgcccttgcagcttccgcaatgatggctacaacggctatgcagcttgccattgatgcatttggcccaattagcgataacgcgggtggtattgccgaaatgagcgagcaggaaccaattgttcgtgaacgtactgatattttagattctgtgggtaacaccaccgcggctacgggtaagggttttgccattgcttctgctgcattgacttccttggcactttttgccgcttatgtaacctttacaggaattgatgggatcaacatctttaaagcgccagttttggccatgctttttgtagggggtatgattcccgttgtattctctgccttggcgatgaatgccgtggggaaagctgcgatgcagatggtaaatgaagtgagaagacagttccgtgaaattccagggattatggaaggtacagggaaaccagaatacgataaatgtgtggctatttcaactaaagcttctttaaaagaaatgttattgccgggagtacttacaatcggttttcccttggtaattgcatttgtacccatgatttttggaatgaacaatatggaaatcgcagaaatgctgggtggctatatggccggcgttaccgtgagtggggtgctttgggcgattttccaaaacaacgctggtggtgcttgggataacgctaagaagtcttttgaagctggtgtactgattgatggcgaaatgacctataaaggaagtgaggcccataaagctgccgttactggcgatacggttggagatccttttaaagatacttcaggaccttctatgaatatcctgattaaacttacgtgtttgatcggacttgtgatcgcaccgattcttggaaaccacgatggtgctgtgatggcggcagaaacatcttccgaagaagtttactttattgacgccgaaggaaacaaaaccattttgaccgaaaagcaaattcaatatattgaaactggaaagactatcacagaaggtgataacctaaaagataagacagaaacaatggttgaaatgttgaaaaatgacaacaacgatcgagtaactgcgaatgtgactatcactaaaacagttgatggcgttgaaactactgaaaccaaaactttcaccggcaccgaagaagaagttcgaa

SEQ ID NO: 3112 - DNA, 24377 bp, synthetic construct
  misc_feature 1..24377: note = Synthetic
  source 1..24377: mol_type = other DNA
agtaatgttctttcaaaaagtcttcaaattcttcagcagggccatcgtgtagttcttgtagctttgctctaatttctggaattagaaccttttgcatggcgtgtgcattagcaatgatatcacttgaagctccatgataagtacacaaaaaagtatctgttgcaatgggtgaacgatcgacatgaaacgaatacacatcagtagatatgaaatcaaattcatcatcgcgctcgtaacacttcaataaattaagcgttggcgaagcgccaaaatcagtgagtagttgtaaatcatttaaaattatttcacgagccttattccctttttcggttagatggagtgcggttagatcgtcgggagaaactacggttatattttcttttaggcgtaagtgggaaacaatctctttaaaatcgccatctaaatttctgtgccaacagagcgcattggtttctccctgaaaggcagtacctacaagcgcagagaaagtagctactatcccaatttggttgctgtctgaaaaggaagggttcatagtagtaaaaggcaatttttttgtgctacaaaaatatacgatacaagttagtaatagcaaaagcagcaggataaacttttaaaacaagattctagtttttgcaaaggttgtaaatcagggctagcaggactggttgataaataattgaaattcacgtacaaatacttgttgtaggaaaattcagatgtttgtatattggttgactaaacaactaaaaacgaaaaaactgttatgtcacaaacatcctttgaagattcattcgcgcaaatactccgtgaaaggatcaataattattttaaagaaaataatatttcggtaaaagcgaaccggagcatgaaaataaaaatggttactggtttgttatggtggtcactttcgtacctgttcatttatttattttcttttgacaaattatcttttttcttgttgtatgtttttcacggatggggacatattttcttttcttttaatgtgggccatgatgccttacataacgcaatttccaaaaaaagctacataaataaattgtgggcctacagctatgatcttttaggggtgaatacctatatgtggcgtttcatgcaccatcaggggcatcattcttgcttaaatgttacagatgaagatatgtcactcgaaacggctggctttttcaggctttcagacaaacagaaattaaaaccttatcataggtatcaacattattatgctttcattatttacggtttgtatttgttgtattatgttttctataaagatttcaaatatttttttatgaaagaaaacatacacttaaagggtgtcaaacatcccgtatctgaatggattatcctctttattggcaaagcattttatcttttgtatatgcttatactaccattagtgttgctgccttttggatggtcttttattgtttttacttttgtttttactttattcatgattggattggtgatgtcgtttactttccagacaacccatattatcgattccacttattttccaaatcacaatgacgaatatgaaaattatgtttaccatgtatttgcaactactgccgattattcagttgacaacaagctgtcgaattggttttttggcggattgaatattcatattattcatcaccttcgttctgatatttgtcatatccattatcagaaactcacccacatacttaaagaagttgcagctcagtatggtgtaacctacagagaaaacaaaacggtttacagtgcgttcaagtcgcatatgacggctttgaaattattgggcaacggtagtttggatagagaaataagcacaaatcttaattatgcacggtttattaagaactgatttgtctgcggaggcggaggctctcgaggtcaccgcttttgagatgaaaaaccaatagcggggaaatgttttccgtgcttataatctaattttaaaaagctacaaaattacttttgtagcttttgtttttatcgctcttagtttggaaacttttgcacggattccttaggctgtcgttgcactcgagtgtaaatctgtgttgatatgaggactttcaatattgttatttcaatttgtatatacaaaaaaagagcatcatttctgacaccctttttttgatttacaatgtggccttatgagcagtaattccagtaataaataaatctacttcggcaagttccttattgatacgttcaagatccagttctttttccagtaaagctacagaaccgtagctgtcttttctgttttctaacaaaaatttcttgtactccagtcttatttttcgcttgatttcgttttccttagttggtccttctggtaatacatcaataacggtttgtacagctgaaatttcggctaatacaccttgcaatactgcttcaatttctaccgaagtactgctgtaatttgctgtgatacgttcctctgagaattttttaaaagctaaatctgctttttctttctctgcccatgctaataacacatcgcaatctgatgctagtgtaatcttgttaaatgaatacatattttttagttttaaaattatatgtaagaaatatcaaacaagatgccgatttgtttaagccaaaatgaatttagcagaagattaactatttgtaagaaaaaacataaattatagttaaaaattataccaaatcattgggcttgtcgttatttatggttttgatcttttgtttcaatgttttagactggagttctaatatcatttttttaatgccaagtctttctaactggtagtcactgttcttttttaattgaagcaaagctttgtttttaatatgttgatgtaaaatattgtttttttttggtattttagtctccaaatagtcaagtaattgtagagcattaagattttcgtttctaattttttgcacaacattcatgcgtttttcaagtagtagttgtaagtaaactgtttcttgtaactctttttccagttgtttcaaggtaagttgtttttcgttttcctgatattccttgaataatttatcgttcctttttgatttctccatataggttaacatgctagtcagttcaatcatagctgtcaaaggtaatcccctcttgccagattcatacatagatatttgtgatcgagttacaccaagcaaagctgctaattcttcttgcggtatacctaatgtttcttttaatgattttttgtgtttcataaactacttgtgtttcaaaatacttgaaacaaatattttgccacaaaaatggtttcaaattattttatagaaatattatgaaacaaaaaaaaattaaatgatgttaacggaaatcatttaaaaattgatatagtcttatttaataaaggttctgtttataaattatatttattaataatatattcagtaatgggttttaatgttttattggtgaccggatgatatccaggtgtgttaaacagttcaatatttccatcattatctttacaataccaaattgttgctttaccatttttgaaataagaagttgtatcagtgggatttatttttcttattttgagaagattttcatcaaaaccgatttttgtattagtgttaataaatccattagatccagcattacaatcaacctcgacgtaacgatcatttttccattctaggcagtctttatgatttaaataggcataaagaaaagcggcaataaaaaaacttattatcaatattcctaaaccaattgttactttttttattgagaattttgggttttcaggatttttctgatttgataaatgttttgcaagtggtttttgaggtagattatcggaattatttgataatccttcttcaatgttatctactttaatctctattttctgtttaatgtctagattgtcttcttcttttactggttcaatttttgaaaatatatgatgaggtctttgttcgaaagatattaaaatggcagctaattctactcttatttttttatcaggattttttgttttccctgttaaaaaagatattactggtttgaacttatcggtatttgaattatttacagacttttttaatgattcgttttcttttgtttcaaaaaacaacttcattatttcttcatctgctttcgataagcctttatcaataagatgtacataatagtctctgaccattgctggggataagtctgaaaaaaatcctgtgacatcattttttttaatgatttcgaattctctccatatagcaattttataatcttcaaaagtagttttactcataagcacttcaaaatttatcggaataattggaataatcggaaaactgtctttgtaatctccgaaatatcggaaatacaggagcaatctatcaatagagcggcaaatgtggggcatctttgcttcagaattagttcttgctctatttcgcgatatgaacaaatgtacaaaactagttcaaaactaagtacggttttccacattggtattttataagggaagtatagataaccctttgtgagagaacctacttttttcttcccaaaaaaataacagagtactctaaaagcaattttagggatggttttaaaagatctgaaagtggtgttcggacggccatacctatgtaattttttaacaaggaaaaaaatgagaaatttagtttttgttgctgctctagcaactataggatataatatggtatcgtgtgatactgacagcgttgatagtgtaataaatgagtctgcaagtaaagtgaatcttaatcaagtgtctaatatgatgctaagagaaacagatacaatttctatcaatgatactcttactactaatcaacttactgagccaggaccaggagacgatgttgtacctatcaaacctccaaaaccgtaattaattttgtgagttttaaaataagaattagtacattcggggaaagaatcattatgaatcgttccccgtttttattttgtgtatttttttgttttttattcttggcttgcaatgagtccgatgagaaaatggttcaaaaaagtaccgttgttaaggaacacaataaaaaagcaacagattatcaaaacaaagcagacgcatattatgcacaagcaaaatacgatagcgctttttattactatgctagagccaaaatttcttttgactcaatagaaaataagaaaaacatcgcttattgtttgcttcaaatggcaagagcacagcaaaccatgggagattattttgggagtgaggataatttaatagaagctttacactttataaaagaagataatgaatatttacctgcagccaataatttgctaggaatttctgcaaaagaattaaaaaattatgaagatgctcttcgttattataatataacttatcaattagcaagtgatagcttgactaaggccattgcgtttaataatatagctaacgtatatacaaaacaaggaaattataaaaaatctgttaatcttttgggtaaagtgttaacttggaaatttctagatacccttccaaaacgcaaagctatttatatgaacaaccttggctatgcttttactaaactcaaggaaaatgaaaaaggactagatttaatgcagcaagcactttcaatcagtaataaggaagatgattcttatggtcgtatagaaagtcatttgtacttgtcggaatattatttgccatacaatttacagaaatcgagaagctttgcacagcaagcctataaagagtcgactaaacacaatagtattgatgagcgactggaagctttattgttattgataaaaacttcaggaaataatagtgcttttgccttaaagtacgcggtgttaaatgatagtattacccaagtacgaaatagtgcaaaaagccaatttgcaaaaatgcgttatgatgctcgattggtcaatgaagaaaacctaaagcttaaaaatgaaaaaacagcaaatgatttacaacttcaaaaaaacaaaaatgaaattaatttctggagcttcagtgcggtagtattagtaattattatcatttttcttttctattactttaaaaataaaagaaaggaagatcgattaaaagcctcataccaaacggagacaagaattgctaaaaaagtacacgacgagttggctaatgatgtgtttcataccatgtcttttgttgagactaaaaaaatagaagaacctgaaaataaagaaactttgattaatttattagataacctttaccagcgttctagaaacatatctaaagaaaacgaatcaatagaaacaggggagtcttttattgagaatctgatcgaaatgataaacggttacaagtcttcaaaacaaaatgtaatcatcaagaaagatgaaaacattaattggagtagtatttcagaaatcaaaaaaataacactatttagagttttacaagagcttttggtgaacatgaaaaaacacagtcaggctagtatagtaattgtaagtttaacaaatactaaaaatgatataattattgattattctgataacggaaagggaatggaaatgcagcaggttaaaaaaagcggtatagcgaatgcggaaaaccgtattcaaaacataaacggaagcattacttttgataccaccagtaatggtctaaaagtaaaaattagtattcccaaataaaagcataaatatgttttcaaaaattttagtggcagatgacattgatttgaataatatcgcaaccgaaaaagcggtgaatgaattgaatatctcttcggcagaatatgtaaaatactgtgatgatgctttattaagattgaaaaaagcagaaatggaaaatgatccatttcaattactaataacggacttgtcctttaaagcagatcacagagatgctaaaattacttcaggtgaacaattgatttcagaagttaggaaacagtttcctttactcaaaataattgccttttcaattgacgaccgacctcataaaattaaaaagttactccatgattatggtatcgaaggttatgtggttaaacatcgtaatacctctagcgaacttaaaaaagcgatagaaacagtttggggcggcaaggaaaaatacatttcaccttctgtagaacacgcgttgcaagataaaacaacttcagaaattgatgattatgatattcaactgcttactcaattatcattaggcattcctcaagaaaatatggaagccaagttcaaagaattaaatattactcccaatagtaaaagtactatcgaaaaaagaatcgccaagcttaaagattattttcatgccaataacacaattcacttaatcgcaatagctaaagacatgggactagtctagtctttattgttataacttatttcaaacctgcaatttttttgcaggtttttttatgcgttacggtttcccgtaagggattggtttttattgggtttaagtttggagtataaactttaaaataatatttatggaagtagcaaaaaagaaaatgtctttaaagaaaaaagcattaattgtattaggagttatatgtttcattgcttttttatccagtttgggtaaaagtggggatggtgtaaataacagttcaatacgaattccaggagaacaaaatactattgagataggtgatgttttaaagactaaatattttgatattactgctaataaaatggaaatcgtaaaatatgtaaatacaggaaatcaattttcagatttgaaggaagaacctgggaatttatttttaattataaatgccacatataaaaatattgatagcgaaagcagaatgctttttgatggttcaatttggattaattataacggaaaagattatgaatttgataaatctgaaccagtaatggcagaaggttgggggctaatgcttgaccaaattaatccattaacttcaaaaacaacgaatctagtttataaaataccagaagaaataaaaggagatgtttattggcaaccaggaaggtcaagttcagatgaaaagatttatctgggtaaattataacaaagaaagataatcgagtatgatgtgactgggaagatatttctcggaacataataaataaattaattaattaattagataaaagcatatggcaacattcgaagaattaggtaataaattggaagaatttattaagagtatttcaaattttaaaattggtaaaacggggcaaagtattgaggatcgatttaatgataagtattatgatgattatgccgaatactatgtggtaggatctgcaaaagagtctaaggtaatagataattttgaaaagtatttgatagatagatttatgaatcatgaaaattgtgataatgagcaaattggaggtggtgaaatgactgagtctgacaattatattgtttatgtcatgtataacaaataatagttatggaacttcaaacacaactcaagcaattagcggataaaatccatcagcttaaagacaaaattgaaaccgaagaatctactaagcatgcttttgtgcttccgtttataaatctattggggtatgatactttcaatccaaccgaagttgtaccagaatataccgcagatttaggaattaagaaaggggagaaagtagattacgcaattgttcaaaatggcgagcccattatgattattgaatgcaagaactggaaagaaaatttatccgttcatggatctcagctgttccgatattttcatgttagtaaaactcgttttgcattgttgacgaatggtatacaatatcaattttttaccgatttggacgagcaaaacaaaatggatgaaaagccatttcttgaatttgatgttgctactttgaaagatagtgcggtaaacgaaattgccaaattccataaatccaattttgatatcaacaaaatcctagataatgctagttcgctcaaatacatcaaggaaattcgcaagcagattgatagtgaaattgaaaaaccatccaatgagttcgttcgcttatttacttcaaaagtgtataacggtcgattgacggaaaaagtcatggaagaatttaccgaattagtacaaaaagcttttggtcagctgataggggaaaaaataaacgagcgattgcattttgctctaaacaaagaagtcataatacaagaaaaggatcaaattgaagaagctgaagcaaaccgtttgaatactaccgaagaagaattggaagcttatagaatcgtggtggctattttaagaaggaaactatctaccagcagaattgtttatagagacacacaatcctactttggaatactgttagatgacaacaatcgtaaacccttatgccgtttgcatctcaacggaggtaaaaaatacatcggattgtttaatgataataaagttgaaaacagacagtctatagaaactatcgatgatatctacaattatgaaaatgagttgttagagaccgttgggttgtatgaagtggagtaattaataattaaaagataaaagttatgggaaattttactaatgcagatttagtttacgatgattattctccaactgttgatggtggtgacaatccaaaatacattggagttttggacagaaaaaaagtggataagacagaagaatatgaagtggtttatttctgtaatcaatttttgaataagcataagttaactaataagacatcatttcaaaaagtagaaaaattacttcgtgatgaagaaattacagatgttgatgatcgtgaagaattaataaaatggattgaaaagaattggaacaaatagataaagccttgaatcttttatagaacaccccataagggtgttttttttatataaaaaagtcccaccgaagcaggacttaagattttcatctacggcatatagccttattgtgataagattaaagattagaataaaattatctatcacaaatataggcaaaacaattttataaaagtttacggttttccacattttaaacaaaagactttttcttatttttagttacaaaataaacaaacatggcaagaatactaggtttagatttaggaacaaactcgattgggtgggcgattagagatactgaaaatgaaggcaaggagcaaattattgataaaggagttaggatattttccgaaggagtaaaatctgaaaaaggcattgaaagttcgcgtgctgctgaaagaacaggttacagaagtgcaagaaaaataaaataccgtagaaaattaaggaaatacgaaactttaaaagttctttctgtaaatgggatgtgtcctttgtcgattgaagaagttgaagaatggaaaaaatctggttttaaaaaatatccgcttaatcctgaatttctgaaatggttacgtactgatgaagttgaaaatcaaaacccttatgtttttagggatagagccagtaaacaaaaagtagctttatttgaacttggacgagctttctaccatattgcccaaagaagaggttttttgagtaacagacttgaccaatcagcagaaggagttttcgaagaacataatccacaaatccaagctttaattgaggatttagataacataaatttgattttggaagaattaaatggttattatctgaatataggaatcatagaattaactgaaaaagttgtttttaaaaaagatttagatgaaggtgaaaaaaaactgaaaacactttataattctttagttgccataacaaagaaaaatgaaggagatattgagaaatgtaaagaagaactcattgccagattaaataaaaaagatgatttaggaaaagtaaaaggtaaaataaaagatatttcacaagcgatgcttgatggaaattttaagactttagggcaatatttttatagtctttataacaaagggaaaatcagaaatcaatatacttcaagggaagaacattatcttgaagaattcattacaatttgtaaagttcagggaattgaaggaattaacaatgctgaaaaattacctgagaagaagtttacaggcttagccaaagatttgtataaagccattttttttcaacggccattaaaatctcaaaaagggctgattggaaaatgttcttttgaaaagagtaaatctcgttgtgctatttctcatccggattttgaggagtacagaatgtggacgtatttgaacaccataaagattggaacccaaagcgaaaaaacattgcgttttctgacacaagaagagaaattgaaattgattccgaaattctacagaaagaacgattttaattttgaagttttagctaaagaacttgttgaaaaaggagcaagtttcggctattacaaatcttcaaaaaagaatgagtttttttattggtttaactacaaaccaacagacagtgtttcggcttgccaggtttctgcttcattgaaaaatattgtcggggacgattggaaaacaaaaacattcacgtatcaaacactaaatgctaaaaaagaagaagtaaccaaaacagttaattacaatgatttatggcatttgctttctgtttcgacttcggatatttatttatatgaatatgcaaaagaaaaattgggattagatgataaaagtgcaaaagcttttagtaaaataaaattgaaaaaggattttgccagtttgagtttatctgcaatcactaaaattttgccttatctaaaagaagggcttttgtattctcacgcagtatttatggcaaacatttcaactattgtggatgccgaaatttggaaggatgttgaacaaagaaactatattcaaaataaaatcgcagaaattattgaaaattacacttttgaaaaaggtttgttggaagttgttaatggtttaataaaagaatataaaactgaaaatgaagatggtaaaaaagtatattattcaaatgaagcagaaccagaatttgcaaatgatttgaagaaaaaattacttggtttttataaatcaaataagattgaggatgaaagagagcaacaagccattttcaatcatttgttaccaatttttaacgatcaattaaagaaatatgagttcatcaaaataaagagattagatgaaaaagttttagaatttctgaaaggagaaaatgaaactggtcaagtattttgtagtgaagaaaaaggaacagaccaggagaaggaaaagaaagtaaataataggctaaaaaaactatatcatccatcagatatcgaggttttcaaaaagaaaatcattaaagatgattttggaaatgaaaaagtagttttaggaagccctttgacttcatccattaaaaatcctatggcaatgcgagctttgcatcaattgcgaaaagttttgaatacgctaattcttgaaggagaagttgacgaaaacacaagaattcacattgagatggcccgtgaattgaatgatgcgaatcgaagaaagggaattcaggattatcaaaaggagaataaagttttcagagacaatgccataaaagaaatcaagaaattgtatttggatgaatgtggtaaagaagtagaaccaacggaagacgatattctaagatatcagctttggattgagcaagataaatgtgagatatacgaacaaggcaaaaatatacggatatgtgatataataggaagtaatcctgcttatgatatagagcataccattccaagaagtatttcgcaggataattctcaaatgaataaaacactttgtagtcagaggtttaacagagaaataaaaaagcaaaaaatgccaattgagttaagtaatcatttggaaattttaccaagaattgcacattggaaagaaaaagcagataatttatcaagagaaatcgagataattagccgttccataaaagcagcatcaacaaaagaaataaaagacaaaaaaatacgaagaaggcattaccttactttaaaacgagattatcttcaaggaaagtacgaccgttttatttggacagagccaagagttggttttaaaaacagccaaattccagatactggaataattaccaaatatgcccaagcttatttaaaatcgtattttaaaagagtagaaagcgtaaaaggcggaatggtcgccgaatttagaaagcaatggggaattcaggaaagttatattgatgaaaacggattcaagcaatacaaagaaaaagaccgaagtaaacatacacaccatacaattgacgccataacgattgcctgtatgaccaaagacaaatacgatgttttggctcacgcatggaaattggaagacgagcaaaacaaaaaagaggcaaaagctataatagaacaagcaaaaccctggaagaccttcaaagaagatttgctgaaaattgaagaggaaattttagtttcgcatttcactcctgacaatgttaaaaaacagtccaaaaagattgttagagttcgtgggaaaaagcaatatgtcgcagaaatagagcatgatgcaaaaggaaaagcaattcctaaaaaagatgttaacggaaaaataatctataaggtaaatgataaaggagaaaaaatgccaagattgcatcaaggtgacacagtaagaggttctttgcatcaggatagtatttatggagcgattaaaaatccattaaaaactgatgaaattcgttatgttatccgtaaagatttagaaagtttaaaagccaacgatattgaaaacattgttgatgaaactgtaaaagagaaagtaaaagaagccattgccaataaagttttattactttcttcgaatgcgcaacagaaaaataaaattgctgataataaaaaggtttggatgaatgaagaaaagcaagttacgataaagaaagttagaatttatgctaattcagttaaaaatcctttagaaattaaggagcatagtttattgtcaaaatcgcgccacgaacataagcaaaaagtttatggattaaatgatgaaaattatgcaatagtaatctatgagggtattgataaaaaaggaaaagtaaaaaggtcgtttgagtctattaatactaaagaagctgggcaattttataagttgagtaataaagaatttgcaaaaagctatgatattgttacaaatccacatgataaaacggatttgccattaaaatatatacttaaaaagggaatgatggtgttgttttttaaggaggaagcttcagaacttttagagttggatgtaaaggatttgaataataggctttataaattatcaaaatttgatgcacaaggaagattgacatttagaactcattttgaagcgaggcaagcaagtgaattgaaagagatttataatgttgattttgaaaaaccatttgaacaaattagacttcaggtaagtaaacttgatatgattgttgaggattacgaatttaaaatagctccaacaggtaaaattatttttttgtagatttaaaaagttctttgacataaaacgtcaatcttaaacatctaaaccacaacggaaaatcttctgattttctgctaacggattttccgttttggtttgattaaagattagagaacacgatatttaatatcaaaggtgggggtacttttgcagagttgtggtttgattaaagattagagaacacgatattgcagatggcgaatcacaccacgcaaatatgttgtggtttgattaaagattagagaacacgatatttacaaaggtataaatcaagacacgaagcaggttgtggtttgattaaagattagagaacacgatattcccgccgctactttctatatcgatagccagttgtggtttgattaaagattagagaacacgatattgaacctgaggagtttatgaactccaaattagttgtggtttgattaaagattagagaacacgatatttgctcagggagattttgcaagaacctcagggttgtggtttgattaaagattagagaacacgatattgaatttaaacttagagacaataaatacagagttgtggtttgattaaagattagagaacacgatatttgaggtaaacctactgttaagataacacgggttgtggtttgattaaagattagagaacacgatattgtgttaaaggtggtatatttgcaaatacgagttgtggtttgattaaagattagagaacacgatattattggctagttcaatggctaatgcaattcagttgtggtttgattaaagattagagaacacgatattttaggtgatggattggatattgatcagatagttgtggtttgattaaagattagagaacacgatattaacagttttctgttttgatgatgcagtatagttgtggtttgattaaagattagagaacacgatatttgaattaggtggttttatgataccaaaccagttgtggtttgattaaagattagagaacacgatattgtctcaaggaggtaaacgaatgatgttagtgttgtggtttgattaaagattagagaacacgatattagatttgtttgatgattttatgagattgaagttgtggtttgattaaagattagagaacacgatatttgagcttaaagaattggttaaaaatgaaacgttgtggtttgattaaagattagagaacacgatattaaaagcgaaattggcggctaaacctgccgcgttgtggtttgattaaagattagagaacacgatattatctcagttatacatatacgggggcgataagttgtggtttgattaaagattagagaacacgatattaattattaaaactacttgggtcacgccacagttgtggtttgattaaagattagagaacacgatatttaaagaccctaattgcagaaagcacgcgcagttgtggtttgattaaagattagagaacacgatattatatgtagtagcgacatttggagctgcatagttgtggtttgattaaagattagagaacacgatatttttggtttttggcaaagaaaatgcaactgcgttgtggtttgattaaagattagagaacacgatatttaccaaatcagaattatcaatatttacactgttgtggtttgattaaagattagagaacacgatattaaagacacaaactctgtttatccatttaagttgtggtttgattaaagattagagaacacgatattagtagcggcgttgtcttctgatatttaagtgtttaaggtgaaatatcgtaataaaaaatgcttcttttttgcagtgataaggcaagattgaggcatttttttattttaaaataattccaactgtgtaggttgcggctctttgggtattgctgccttaccccaaaaatttaagatattgccaaattgcttgtcggttattcgtagtacagaaacttttcctaatgggggtagtaatttatgaattcgcttctcatggacatcggcactttcgctactagcacaatgtctaacatatacagaatattgcatcatgctaaaaccatccttcaacaaattgtttctaaagccagaggcattttttctatcctttttagtttctgttggcaaatcaaaaaatacaaataaccacataattctgtatccatttagctccatagttttggatattttatcttcttacgctctccagtaaaacattgttgcaatgaactagccgttttctgtaaagcgaccattaaaggacttttttcttctttaaagtaaactgttcgagtcagaatttgtaatagttcagacttaatctcggtatttaattctagttctttatatcgctgcattatttcatacactttttcatcaacaataggacgaaaaggttccataatatcatctgccagcgcaaaagcattgtatttacttttatgatgaatccctaatgtatttaaaagaccacttccagagagtgttcttgctgttgctgctcttaaaatagcataaccatagtttaaaaagttattagggtaatcgccaaatcgctctcttttaaagttatgttcaaaaaaagttttccaataaaaactcgcagcaactccttccatatttgaagtatcgccactcaaaactttggttgctaaaaaatcaaaattgtttttctttcctgtaattttttccaacagtattccttgattggtaattttttctactatcgtttgttgccaaagttgtttttttaaaggaatgcttgcatctatctgatttttaaatatttcttgttggatgtgatggctgttcaagttcataaacaaaccattgggtagatgagatttattgcaaataatgacagcagtattattttcgattaacaaatttaatgatggtagacttatgaaggtttcttggttgtcaatgactaaaaagccaatgtcttctattggtgtagttctttttttaagttcattttcaattattaattgattgaatttagtactaattgaactcttgttttctactaatatggttttttttaacatgaggtaaaaattaattgtaatttaatttttaaaaatgattagtttttacggttttccgtattcataattgtatatggattattaattttaaaataaaaatagcgtatgactaaaaaactactttttatatattttatagggttaattttagtttcttgtagacaagaagctcaaaaacctgtacagaaaattgttccttttgtagagaaaatacttcctgaagacataaaaacaattacccctgaggaggcaaagacatttcataaaaatcctgaaagaaagtatgaatatagaacagggacttacaataattatgaatatgattatgatgttgtaggaacagatagtctgaaaaaccatgtgaaaggaaatgtgattgtaaaaggaaagtatggggcaggtatgcttactgactcattgggaagagtatttgatgtggaggtagaatggacgggatttgatatgctaaaagccaaggataaaaaaggaaatacatataccctgaagaccgaatagttctactttcagtattgacttaaatatttatatgccatgaaactaatctgtttactactattatgtattacttctcattctgttgataaaaaagtttatgtttgcttttcaaaaggagcttcaagatatcattataaagaacattgtaggggattaagtgcttgtaaacatgtggtaaaaaaaatgactattgaagaagctaaagaatttgggttcactctttgtaagtgggaagactaaatagagattgtaaagatgcgttacttcaataccattttattaatttgtttgctatttgttagtacaataactgcccaaataaaggtgtgttcttggaatgtagaaaatataggtaaatcgaaatcggaagcagatattgaatttatagctactatcttgcgtgattttgatattgttgctcttcaagaagttgttgcgggttatggaggagcccaagctgtggcgaaattggcagatgccttgaataggaaaggagcaaaatgggagtatgtcgttagtgaaccgacttcagggagtacatacaaaacagaacgttatgcttttttatggaaaagtcatcttttaaaaattaaaggaagtccatggttggaaaaaaaatatcaactcttaatagacagggagcccttttatgctacgtttaaatttgggagtaaagaatttacattggttaatttccatgcaataacaaaaagcaaacaaccagaaacagaaattaagtattttaaatttttaccatctcaatatccgagtttgaatttgatttttgtgggtgattttaattgtccacaatcacatacagtatttttccccttaaagaaaatggggtatgagtctgtttttaaaaatcaaaaaacatcgttaaaaaaagtatgcaaaaaaggcaattgtctagcctctgagtttgacaacatttggtttgatggaaagaagaataaagtagtaaatagggatgtaatccatttttatgaaaactttgaatctcttgatgaagcaagaaaaatttctgatcatattcctattgtagtagagttggaatggttgtaatgttcttttatctatttggaatgctaaatttaagacaataataaaaaaacctctcaaagtgagaggttttatatgaaattttataggatagctgaggttctcgatggtagctgagcgcagtcgaaggcagctgagactctcgatggtagctgagcgcagtcgaagctagtattgatatacaattgcattaatactcatacccgcacctacagaggcaaaaataatcacatcgcctttgtttaactgttggttttcgacttcgccttttacaatcaaatcatacaaagtaggtacagtagctacgctactatttcctagtttgtgaatgctcataggcattactctttcgggtgggtcttgtttgtatattttgtaaaagcgttgtatgatggcttcgtccattttttcattggcctgatgaatcaatacttttttcacttcgctaatatctatgccgcttttgtctaaacaggctgccatggctttaggaacttggcttaaagcaaattcataaattttgcgtccgtgcattttgatataacgcacatctggatcatggtctttattgaatgaattgccaaagtataagtaataggcttcgtcatacgtaaatgtcgccgattcgtgagctagaattcctcctgcttcatcggtagcttctattactgttgcacctgcaccatctgaataaatcatagaatctctgtcgtgcaaatcgactactcttgatagggtttcggctccaacaactagacattttttggccatgcccgctttaatgaaagcttgtgcgtgaatcacaccttcgacccatcctggacaaccaaaaagcatatcgtaagccacacattttgggtttttaatgcgtaaatcatactttacacgcgttgctaaactcggtaatatgtcggtttgaatagcgccttgttttacgttaccaaaattgtgagcaaaaatgatgtagtctaactcttcagggtcaatgccagcatctgcaatggctttttttgccgcaatggtagcaatgtctgaagtaagtaaatcgtcagtaacataacggcgttcttcgattccagttatgtcgtgaaatttttcggtaatggtttcattgggcaaagggaatggggtgccatcatcgttcaaaaaaacgtgtttggcaaaatctttattggttacagtttcggttgggatgtagctcccagaaccagtaattcggacattcataagtgtagataaagtttacactaaattaaccataatattaactaattactagtaatacgctttgtttgctttatttttactaataatctaaataaaaagttataaaattagtaatgctgtttttatttatgtgttttttttcattaactgtattttgtggtgcataattttagaagttcaaacggcattttcgaaaggtaattactgtttaagccacagtttgttataaatttgactacgtatgttattgagatttgtttttttactaattactttatcctgttttgcgcagcaaccttctcattatgttgtaggagaagaggagttggcaggggtaagtatttatagtttactacaagataaagacaaatcgatttgggtatctactaataatggtttgtacaattatgatgggacaaagttctcaaggatagaaaccagtcttattaatgatttgtcactttttggtttaaccaaagatgtctttggcgacatttacttttttaatttaagtggccaaatttttaaaattgaggacaagaaaatcaaactcttctggcaagttcctaaaaaatacaatagtagtgttttttatatagcatttgatagcgataataatttgattatttcctgtaaaagtcttttgaaagtaactaaaaatggatcttataaagtttgtcattcttttgatagaaatgacgcttgccaaatgagtatcgacgaagaccgaaatatttatttttgggataataacaaggtgtttaagtttgatggagatcatttaacctataaacaagaacctaaaggcacccagaatatattgatggttcatcaatctaaaaaaggggtagttagtttagtttcaaatttagaacctgttgttgtttataaaaattggaatggggattctaaacgaatcgagtttaatgttcctgttcaagaaacaattagttatatcagttacatttctgaaaagtatgactactattggttggcttcttccaataatggaatttattgttttactaaaaatggctcttctaattataatggtaaaaagttatttcaagattattttatttcgtcatatttagaagacgatgacggaaatatttggctagctacttttggtaaaggaatgctcataattcctaatatgaaaattgtcgatttttctaataattcaatcatagggaatgatgacttatcaaaaattacgaagaaaaacaatgtggtttattttggaggtgtaaaaggaaatgtttacgagttgaaagacaataacatctctattgtaaattcaaattttaaaaagatagaatcattactttatatccctaagaatgatctgttttttgtgaatagttcggtctataaaactattttctcctctcaaaaagctgccgaaaacacatacaataagtatgatgtgtatgaatcaaaaaaaacagattcggtcttttttgtaactcgaagaggtcttttttgcttagaaaaaaatctagaggctacaaatttaaactatgacattcgaagttattgtgtttacaaggatgagaaaaatgatattacttggataggttcttcaacaggtttagaaattaagagaggaaatacaatcactaaggttgaggtttcaaaacgccctgtttttgctaatagtattattgaggtggatcaagaaacatggatagcatcgaataatggtatttgtgtttttgaaaaagacaggtttaaaaagaagtttagtaagaaggaaggcttgatatctgataaaataaacaaaataattaagcagaataattacgtctatattgcttcaaacgaagggattcagcgatatgatttattaaaaaaacaatttagcaattttacgaaatcgaatggattgatttctaatgccgtttttgattttgaagttattgaggaacaaatttatattatcacagcaatggggattcagaaatttaatttcaacgatttgcaagtgccaattttgcctcaaatcaattttgaaagtgtaattgtaaatggttctgaacaggttgaaaataaagttgttttagccaataaaaacaacacgatagaatttcatttaaaaacaattttacacggaaataaaagtaatttaaagtatgtctatcagttaaaagggtacgatgcggctcctctagaaaattctttttttgaaaatacaatcaagtataccaatttgcctgctgggaattatgaactagtagtgtttttaaaagatgcgaatggaagtgtaagtaaatcgtctaggtttagttttgaaattgaagaagtattttggaagaaaaccaaaaatattgtgttgttctctttgctgcttttagcactgatttacggtttttacagaattagaattcgatacattctgaatcaaaaaaatattgaactagaaaaagaacgttataaaattgagttggcaaaatcacaattaaaagccttaaactcacaaatgaatccgcattttatttttaatgcgctaaatagtattcaggaatatattttattgaacaagaaagagcaggcgtcaaattatttgggtgattttgctgatttaatgcgaagttatttggaacatagtcagttggatagcatatcattaaaagatgaaattgaaacgttgcaattgtatttaagtttagagaaaatcaggtttgaagacgacttgagttatgagtttacaattgataaaaatatcttattagataatatcgaaattccttcttttatcattcaaccttttattgaaaatgctataaaacatggtttgcttcataaacaaggagataaaaaaattgatgtttcttttcaattactcgattctgatactatacgatgtgaagtagttgataatggagtgggtcgagtaaaaagttcagaaataaataaaaacaagaaacgaacttcgtttgctgtcgatgccaatcagaatagattagaattgttgaatcaaaaatttagcaataaaattggtttagaaattgtcgatttatatgatgacaatttgccaacagggacaaaagtaatactaacattaccaatttttaagtaaaatgaaagcacttataattgatgacgaaagcaaagcgagatcgctattgaaaacaataattagtgaatatgtttttgatattgatgaggttatggaggcaaccaatttattagagggtgttgctgtactacaaaaaaatgctgtcgatattgtttttctagatatagaaatgcctaaccattcgggattggaattgttttcttttttaaatcctagtgagattaattttgaattagtttttaccacagcttatagtgaatatgcaattaaagccttcgagttttcggccattgattatttgttaaaacctttacgacctaataaagtagttgatgcagttgaaaaggctaaaattaaattagaacaaaatcaattgcaagaacgattgtttgagttgaagaatgcgttaacaactgaaaaattcaataaaattgctttgccagttgaggaaggtgttttgtttgtaaaactagatgatatttattttttacaggctgaaagtatgtacacgcagttttatttaacaagcggcaaaaaaatattgattagtaaaccactcaagtattttactgatatgctcgaaaatcgtgaaatgttttataaatcgcatcgttcctatttagtgaatttaaaataccttcaacgaattgtgaaaaaggatgggacgtctattgaactcgaaaataatgcgctaattcctgtgtctaaagacaaaaaagaagagctgaataaaatattagaaatgctaatgtagtgtctatttagaagttgataaagttcattcagaagttgttcattaattaaaaaataggtcaagcttaatttagtcttaaattctaaattaagtcagacatgaaaaaagtattactatttctttttacctcaattttaagtttgccaatttttgctcaagtaccagcatttgaatggggaaaacatataggagggacaaacgatatcagagtttgggataatgcattcgattcaagtggtaatgcatatgttgtgggggattttgttggaaccattgattttgatccagatgcaactggagtgcaaaatagaacgtcagctggtcaacaggattcttttgtttta

SEQ ID NO: 3113 - DNA, 24374 bp, synthetic construct
  misc_feature 1..24374: note = Synthetic
  source 1..24374: mol_type = other DNA
tattgcccaaatttcttctttctcaaccagaagaaaattccgcccaaaagtcctaaaattgccaaaggtgtcaataaattaaaccattgccaattcgttttttcttcgtctattcttcttctgtcaagcaagcgggattctatatttctgtttctgagttctatgagattagaatcatcgagaagccaatctaggcagtttctcagaaattgttcgtttccataaagttggtcggttaataaatctgctcctaaaggtaagttttgacctttcatcatttgatttcggccaacatcaccatcagaaataacaatcattttattgtttccagcaacttcatttttgaaattagggaaaccgtttttttcacttctattcgcataagcagaagtaaatttaccttctaaactcaccgcaaaaatcttaggagtagtaggtttttccattacagaaagactgtcaagattcgccatttctgagagctctacataattaggaaccgatttagcagtggttctttcactcgattcgtaaagcacttgagttttgatattttttcttcctaaggtatcaattgcagttggaaattcaaattttacaggattgatgtttttggtaatcggattgttgttttcattaattcccaaaggaaaataaggccaaattaagttggtgtattgaggatttcctgccacttcgccaacttgcagtctaatcaaagcagatttttggaaatctttaatcaaaggtgcattgattcttacgccataattaaagaaaaaatcggtcatattaatgtcgataggataggccatgagttttttcttggtcatcaaagtatccatttctgcattcacagcgtcaatcatccaaagtgtttttcctccgttgataatgtattggtctagaatcactttttcgccatcagtaaaggcttttctaggctttgcaatcaccaaagcatccattctttctaaattcggaagatcttctagagtcaattcttttttgttcacaggaattacaggaccagcattgtaattttcgagcgtcatgtccataaaactacggaattcatctactcttaattcatcttgattcaccaaaacgcctacgtttttcttttggtctgctaccaaagatttaatggtagaagcgaagttaaactccagattttcaatggatttggttaactgttccgctgcatctattcccatttgattggtaatgagcgaaatagaagttccgtaacctttatatttaagcgctgcgtaaggaaaaagcacgatttgagaaactttcccatctttcatatcgggcaacatagaaggttgcattcccatcgcttgaagcgtgtcttgagacattttggtcgcaataggatcgatgaatttgtaatcaatttttggattgatttttctgaattcttccaaaagaaactgcgtttcattctgcaattgcttaaaacttgcaggaaaatcaccttccagataaacttctacagtcagtggttcttttacagacttcagcgtttctaccgtagcatcagaaagggtataacgtttttctttagtcaaatcaaaacgatgagaaaataccccgaaaatccctaaaaataggatgatggctagagcaattataaaaatatttttattgttggttgatttcaaatttttatacattttattttgaaactattattttaaactttgcaatggttttataatcaaaaatgatttctatataatttaaattttcattatcagcagtgatctcaaatgaaaaagtattttgtacttgttgataatcaataaatttttgtttttctatagcttttttatccaattctctttttccttttattgttttccaaatacttggatttttataaagattggtgttaacttgaattttatctaccaattcatcatacgtaaattcaaattttattttttctcctttttttacatttacgattcccgattctggttttgtaaaccttaaattgggcatttcagatgcttcaatataaggctgatttttataatattccatagaaattccagtgtcattcatccaatttctatcttttggaaagtgatttctaaaaaaatctttattttcggtcaaccaatagtaatcattaaaatgtttaacgaaactatttagctttccttttttatttttagtgcagtaacctgaagcccaagttgcgtctacattataatatctattatcaattctaataacattccaagcgtggtctagaattcccatgtttcctatttgatacggagaatttttgatgtaaccctctacaattgaataattgagattggccatatcacacatttgcttgaataacttggaatagccatcacaaattgcaatttttttgcttaaaactctatcaataatctcattatttaatttcgccaacttcttttcacaatcttcttttcccttgcatttcatcttaactggttttcggttttggttatatgttttataatcgtaaccaatattgtgagtgatccaaatgaaaatggctctatatttttcttcttctgttttacaatttgtggttaaacgattcaccaattcaggtaaattatcttcatatttaatcatttttgctaaagaatcaaggtctttaaagttttgattttctttagtttgagagaaataagtcaaacaaacaagtgtaaaaatgaatatgaaaccccttttactcattatttcttcttctccacaaaaacttttgccaaaaacaaactcaatccaatcaccaacaagaagtaaaatacatcttgtgtatcaatcaaacctcttgtaaaagcgatgaagtgatgataaaaaccaagattttgaagcaaataatctgcgcctcccaataatttgaaattggccaattgttctattccaaagtataagatgaaattcaggaaaacgcccaataaataagccataatttgattcgtggaaagtgaacttgccaaaatcccaaccgcagaaaatgcagcaatgagaagaataatcccgaaatagcttccgaatgttgctccgaggtctaaatttcctgcgggaacacctaaaacgtaaacagagtagaggtaaaccaatgaaggaagtaaacataaaatccctaccaaaaataccgcgaaaaacttcccagaaacgatttctgaaatgcttaatggttgagaaaaaagccattgtaatgttccgttttgttgttcttcggcaaaagatttcatggctaatgctggaataatgaacaaaaacaaccacggcgaaagcgtgaaaaagctctgcaaactggcagttccgatttctagaatattgaaatcattctcgaaaaaaaataaaaataaggcagaaatcaaagaaaatgcaccgacgataatccatgcactccaattcccgaaataactccaaagttctttttttagtatagcaatcatatttctcacagataacacagataatcacagattatactgcataatttatttttaattaattcccatagatttctgtgattatctgtgaaatctgtgggatacttttttactttttcttattcaccaattttaccgtcatcataatcacaaacacaataacgataaatcctataaataattgccaccaatattgcaatgcggtagattttaaaatcgccacaaaaaccactaaaaataagatgaaagttgcgatttcgttgctttgtctcagtttaaggttggcagtagataaatcttgatgattaagatgtttgatctctaaaacttttttccagcaccaataatggtaaacgaaaagtccgattaaaaacaaaattttatagtaaaaccaagataaggaaggtttagccattaataaagggaaattaggatagtaataaaacaccatccaaacaccaaaaatggtcatcaaaacaaacgcaggaaccgtgataatgttccataatcttcttgccataaatacatattgctcacgtagaatttcctttttaggactttcaaaagcatcagtgtctttgtaatacacaaaaattcttacgagataaaaaattcccgcaaaataactcaccataaagatgatatgcagcgcttttatgattaaataagtcatggtaatttacgatttacgatttatgatttacgatttataatttttctaacatccaacatctaacatctaacatccaacatctaacatccatcattcaaactgtatatacactttatcacccacttttaaaccaaaaagtgaattggcaccattgttttttgtacctttataaatggtaatttccagcaaatcttgaccattaaaaagagcagaagctttgccatgatattcgttttctttttcccaatccgtcacgatgtctgtgtatttacgattgatgttttttagtaaaatattccgaatgttaatctcaaaattattgaaattcaccatcgttttatcaaaaattaatttgctgatattggttacgcaattcccgaaattatcaatgtacatcacctcgccaatcagcattttctcaggttcattaaaataaggttttgcaaaagtagtacacttgtaatgcttaatttttctgccgataagttctggcaaaccacctttggtcaaatgtgctgcgactggaacgaaaatgtctacactcgcaaatttcacttcgtcgtcaaaacgattattgatggtaatttcataaatggcttctggtttttggtcaaaaaaagtgagactcatcaatccattgtcagcagtaatgaaataatgcccatccatttttaccaaaagatttttgcggtctttgtgaaaaaaactgtccacggaaacaatgtgcacactctctttagggaaatgcgcgtaagcatttctaagaatataagcggtttgtattagattataagccccaatttcatgggtaatatcaataattctagcatctggattaagctggagaatgctgcctttaatggctgaaactctgtggtctagatttccataatctgatgtaagggtaattattggcatttttaatagtaaaaatttgaaaaaacaaagatattgcttatttttggtaagataaaatttttaaaaatataaacaatttgtacgaaatcacttacgaactcacaggaatagacactaaaacgttttatggtgttaacaatcaatattttaatttattgaaatcttcttttcctacgctgaaaatcactgggagagacaattttatttttgcaatgggtaatcaagaaacgctagatgtactccagcaaaaattagatgatattgtgagttatatttccaccaataattctattggacttaaagatttagaaaacattctcaaaataaaaagtgaggaggagaaacaattggtttttgaccaagatattattgtaaaaggtgtaaatggtaaagtcatcaaagcgaaaaccaccaaccttaaaaaattggtcaaagaaagtgaaaagaaagacatggttttcgccatcggtcctgcaggaacagggaaaacttataccagtgtagcattggcagtgagagcattgagagataaagaagtcaaaagaattattttaaccagacctgcagtagaagcgggagagagtttaggatttttacctggcgacttgaaagaaaaactcgatccttatttacaaccgttgtatgatgcgttgagagatatgattcctcacgaaaaattagaaggttatattgagcgcaaagtgatagaagtggctccactagcttttatgagagggagaacgttagatgaagcttttgtcattttagatgaagcgcagaataccacacattctcaaatgaaaatgtttctgacgagaatgggcatgaatgctaaattcattatcactggagacccaagtcaggtagatttgccaccaaaacaacattctgggctaaaagaagcgatgagaattctaaaaggagttcatgaaataggttttgtacatcttaccgaagaagatgtggtaagacatccagtggtgaagaaaattatcttggcttacaacgccgaagaaaaaagacaaagagaagaataacaaatatttacagaaaaaatatagatagaaaagcgaattaaaattcgctttttttttattaatttttctaaaaagtgaaaataattcataaaattcttgatggtttaggttattttttttaatttagtttctgttaattatatactaatagatcatgaaaaaattattcttagtaggtgcgttagcactttgcggagcaatgaatgctcaaacaaaagatgtattgtctaaaggacattggttagtagaaactaatactaattttggagttttaagcccatcaaatacctctattggttttatgtcttctgatggaacttcactttttaaaataggtggagaagctggttattttgttgctaataatttagctttaaaagtaggtttaggcttaacaagtatgactggtgaagacttttatggagacagcgaaactgtttctgcattcaattacaaggttggtgtaaagtattatattgcgagtcagtttcctgtacaagtagatttcagtggtatatcttctgaaggttcaagtacaagcgcgattggttttcaaggaggatatgcttggtttgttgccccgaatatttctattgaaccagggttaagatatgatgtgtctgccgatgatggtggagatggaattttctctggaaacgttggttttgcaattcatttctaataaaaaaataataaaaaatcctgagaatttctcaggatttttttattaaatatttttaaattattttccgaaaaggttgccgcccattcctggcatacttggcattcctttgctcatcatctgcatgagttgttttccttgaggaccttgcatcatcttcatcattttgcccatttgttcgaattgtttcatcagtgcatttacatcttctaattttctgcctgcacctttagcaattctttttttacggttcatatcaatcacagaaggtcttctcctttcttctggagtcatagaataaataatggcttctatgtgtttgaaagcgtcatcattaatgtctacatcttttatggcttttcctacacctggtaacattcccattaagtctttcatgttacccatttttttgatttggttaatctgcgttaagaaatcatcaaaaccaaattcatttttagcgatttttttgtgaagttttttagcttcttcttcgtcaaattgttcttgagctctttctactaaggaaactacgtcacccattcctagaattctgtctgccattctttctgggtagaacaggtctagagcttccattttttcgccagtagaaataaatttaattggcttatgaactaccgaacgaactgtaagcgcagcaccacctctggtatcgccatctaatttggttaaaactacaccgttataatccaagacatggttaaaggcaagagctgtatttacggcatcttgtcccgtcatggcatctactacgaaaagggtttctgtaggttttacggcttggtgaacgtttctgatttcgttcatcatggcttcgtctatggcaagacgacctgcggtatctataatcactacatcatgcttattgtctttagcaaactgaatagcatttttagagatttctacaggatttttattttcaatttctttgtaaatggttacgcctacttggtctgcaagaaccgttaactggtctattgcagcaggtctgtaaacatcacacgcaaccaataaagggtttttgcttcttttttgttttaaataattggcgagttttccagaaaaagtagttttaccagaaccttgtaaccctgcaattaaaataatggtaggtttgtcagaaagattaatgccttcctgagtagtacccatcaattctaccaattcatcatgtacaatcttggtcatcaattgtcctggagtaatagacgtaagcacgttttgtcccaatgctttgtcttgaactcttttggtaaggtctttggctactttgtaattaacatcggcatctactagagcacggcgaatttcttttaccgtctctgctacgttaatttctgtaatttttccgcggccttgaatgttttgtaaggctttatctagcttgtcctgaagactattaaacatagtgaatgattttttaagatgtgcaaaaataaggaattttgttgacttgtttctctaactcctaaaagatttgtaaaccaatagaataaaatttattgatttttaccttttgaaaaatctaaatcaagagaaatacgttttttaaaaagaaaatcaaaaaaaaagcgacttcctaaaaagtcgctttcgtgtatatagaataccaaaaagagattatgctaatttcacttgaatagcgtttaatcctttttgtccttgtgttacttggtacacaactttgtcattttctttaattgttctagtgcttaaaccagaagaatgtacaaaaatgtcatctcctccgttgttgggagtaataaatccgaaaccttttgtttcgttgtaaaattttacggtgccttcttgcatagtaatgggttttaaatagacattttttacaatgtcttggttaatggattaagaagcagtaaacctgagtttcttatttcttaatgggtaatagcgcttttgcgcaatgtatggagtaaagagaaatagttttgaaaatattccaaaggtgatttctcgttatttgaccaattcaatgttgattgccgaaaatcctttagcagatctttctttttcgaaagatactttatgcccttttttcaggatttctcttgcattattttggtggaaaaatacattttcttttgagcggtcttcggtgataaaaccgtaacctttttcgcttaagaaagtgatgattccagactttctagtttcttcttcaggaataggagcagctcctaattgaatatcgtctagagaaacttcttgtcttttttctggcggagtagttgtaattctaccgaactcatctacataggaaaacatatcttctagttcttttcctttgttgttgttcgctttacgctcttcacggcgctgtgctttttctttttgtttttgaatttttttcttaaagttttctttttttgagaaagaatctgccataaataatgttctgtttgttttttaatgaatgatgaaaccaatgaatcttggtgtattgcgtgctataagaaatctgctaattttataaacagagctcttatatcataagggtcaggggaatttcgtccaggttattttgccttgttttgccttgttttgctttcagggttatgtgcatctgtgaggtgttattctaaaaagggacgctgaaaaagcaaaaactgaaaaagaaataaaaaaatattctaaactgtaacagatagcaaaggcagtaacctattttataaattattctacaaaggtacactaaataaatgacgtgacctaatgatgagtttttggtagaggatttcaccgtgattagggtttgggttgaatcaagtggcagtcaaagtgcagttttgttcggaaaaagtaccgtttttccgaagctgattcgaacttgattcgaacaagactcgaaggaaagtggagaaaaggagagtaaatgagtgttttttttagagataataagagagggtgatgtctagttgaacagcaactgaggtgcaattatgctgcctttatccttcaattatctaggaggtttctagtaaggatgtgacaaataaaaaagtcccaccgaagcaggactatagattttacatctacggcatatagccttattgtgataagattaaagattagaaattttaatcatactacaaatataaataaaaatttattgtaaaagattatggttttccgtattgtgcaaaattttctttttgctaaatttataagttcataaataaaactaataattatggcaaaaattctaggattagacttgggaacgaactctattgggtgggcaattgtagaaaaaaataatagtgattttactttaatagataaaggcgttagaatattttctgaaggagtaaaaacagaaaaagggatagagagttctcgtgctgctgaacgtacaagctacagaagtgcaaggaaaataaaatatagaagaaaattaagaaagtacgaaactttaaaagttctttctaaaaatagaatgtgtcctttacaaatagaagatgtagaagcttggaaaaaatctgggtttaaagactacccattaattcctgaatttttacagtggttaagaacaaatgattatgaaaatgtaaatccttatttttttagagataaagcaagtagagcaaaagtttctttgtgggaattaggtagagctttttatcatattgcccaaagaagaggctttttaagtaatagattagaccagtcagcagaaggtattttagaagaacataatccgcagttacaaagtttaattgaagatttagaagaaacgagtactattttgaatgaaataagagactattacattaatctaggcttgttagatgaggtaaaaggggatttcaaaaaggatttagatgaaggagaaaagaaattaaaatctttatataatgctttaatcgctatcataaaaaagaatgagaatgatgttcaaaaatgtaaggatgaaatcattaaaaggctcaataaaaaagaagatttaggtaaagtaaaaggaaaaataaaagatatctctcaagcaatgcttgatggtaattttaaaacattaggacaatatttttatagcctttacaataagggaaaaataaggaatcaatatacctctagagaagagcattatttacaagagtttataactatttgtaaagttcaggggattaatgggattaatgatgaagagattctaccagaaaaaaaattcaccggcttagcaaaagatttgtacaaagcaattttcttccaaagacctcttaaatcacaaaaaggattaattggtaaatgttcttttgaaaaaaataaatcaagatgtgccatttctcatcctgattttgaagaatacagaatgtggaattatcttaatacgataaagtttggcactcagaatgataaaaagttacgatttttaacccaagaagaaaagctaaagttaatccctaaattttacagaaaaaacgattttaattttgaggttttagcaaaagaattaatagaaaaaggagcaacgtttgggttttataaatcttcaagaaagaatgaatttttgtattggtttaattatcaacctaccgatacagtttctgcttgccagttttctgcatatcttaaaaacgcaataggtgaggattggcaaactaacgtttttacttataaaacattaaattctgaaaagaaagaagtaataagaactgtagactatagagatttatggcatcttttatctgtatcaacttcggatatttatttgtatgaatatgcaaaagaaaaattgggcttagaagataaaagtgcaaagacatttagtaaaataaagttgaaaaaagattttgctagcttaagtttatccgccataaataaaattttaccatatataaaagaaggtctattatattctcacgctgtttttatggcgaatatagaaaaagtggtagatgagcatatatggaaagatgtaaaagaaagagctatcatacaaaatgaaatttctaaaataattaaaagtgatgtttttgagagagaagtactaaatatagtcaacggactaattaaaaatagtaaaacagaaggggagaattatgctgaagaatctaaaaatatttttaaaacagaatttgataaagctattgctaaaatttttgaaaagaataatgatattgagtttaatcaaacattcctagatgatacttatctaaaatatgtagaagaactgaaaaaatttgataaagcaagaagttttttacccgttccaagattagatgaaaaagtaattcaatttttattaggaaacaataaagatggtatggtttattgttcggataaaaataaaactaaaaaactatatcatccttctgacattgaaattttcaaaaagaaaatcattaaagatgagcttggaaatgagaaaatggttttaggaagtcctctcactacatcaattaaaaaccctatggttatgagagctttacatcaattgcgtaaagttcttaatacgttaattttagaagaacaaattgatgaaaatactagaattcatatagaaatggctcgtgaattaaatgatgccaataaaagaaagggaattcaggattatcaaaatgagaacaaaaaattcagagaagaagctattaaagaaataaagaaactctatttcgaagaatgtaaaaaagaggttgaacctacagaagatgatgttcttagataccaactttggatagaacaagataaaaaagaaatttatgagcaaggtaagagtattagaattagtgacattataggaagtaatcctgcatatgacatagagcatactgtaccaagaagtatttcgcaagataattcgttgatgaataaaatactttgtactccgcgttttaatagagagataaaaaaacagaaaatgccaattgaattatcaaactatgaagagatattgccacgcattgagcattggaaaaaagaagcggaagaacttacaagacaaattgaatctatttcaaaatctataaaatcagcatcaaccaaagaagcaaaagacaaaaatataagaagaagacattatcttactttaaagcgtgattatctaaaaggtaaatatgaccgttttatatgggaagaaccaaaagtcggttttaaaaacagccaaattcctgacacaggaattattaccaaatatgctcaagcgtatctaaaatcttatttcaaaagagtagaaagcgtaaaagggggtatggttgccgagttcagaaagcaatggggaatacaagaaagttacatggatgaaaatggttttaaacattataaggaaaaggacagaagtaagcacacacatcacactattgatgccattaccatagcttgtatgaccaaagataaatatgatgtattagcacaagcttggacttctgaagatgaacaagataagcaaaaagcaaaaattctaatgtcagaagccaaaccttggaaaacttttaaagaagatattgataaaatagaagaagaaattttggtttctcattttactccagataatgttaaaaaacaatctaaaaagattgtaagggttagaggtaaaaaacaatacgtagccgaaatagaaagagatgtaaatggaaaagccatgacaaaaaaagatgctaatggtaaaattatttacaaactcaatgaaaaaggagaaaaaataccaagattacaacaaggaaataccataagaggttcattacaccaagatagcatttatggagcgattaaaaatcctttaaatcaagaagaaataaaatacgtaatccgcaaagatttagaaagtttaaaagcaaatgatgtagataatattgtagatgaaacagtgaagcagaaagtaaaagaagctatagaaaataagattttactactttcttctaatgcacagcaaaaaaataaattagtagatgatgtttggctgaataaagaaaaacaagtacctataaaaaaagtaagaatttatgccaattctgtaaaaaatcctttagaaataaaagagcacagtttattgtctaaatccagaaaagagcataaacaaaaagtctatggacagaatgatgaaaattatgctatggcaatttatgaattagatggtaagagagaatttgaattaattaataattttaatttagctaaacttatcaagcaaaaagaaggtttttatcctcttaacaaagaaaaagaagtaaaaggaaaaaaagttttatatccaatagcaaaaagtaattatagagatgttgttttaaaacgaggtcaacaagttgtcttttatgacaaagaagtggaaaatccaaaagatatttcagaagttattgattttaaagggagaatctatataattgaaggtttatctattcaaagaattgtaagaccttcaggtaaaatagacgaatatggtgttataatgttaaggtatttcaaagaagcaagaaaagcagatgaaataaaaaaagataattataaacccgatggagtttttaaattaggagaaaataggccaacaagaaaaatgaatcatagccaatttacagcatttgtagaaggcattgattttaaagtattgccaactggaaagtttgataaaatttaattttctgggagttctttgacattaacggataatcataaacaaccaaaccacaacggagtttcggcgatagctcacttcgttgtggtttgattaaagattagaaaaaacgatattttttgtatgcctaaatgtatacctaagtgtgttgtggtttgattaaagattagaaaaaacgatattttgtaggaagtgcgggaaaggaacacgaagttgtggtttgattaaagattagaaaaaacgatattattcttttgacgaaacatttgagtaatgaggttgtggtttgattaaagattagaaaaaacgatatttacaagtggaaataccaattcagcctttgggttgtggtttgattaaagattagaaaaaacgatatttcctttaaggtcgtcaactgttataaacatgttgtggtttgattaaagattagaaaaaacgatatttgataattatattgaagtggaactattagagttgtggtttgattaaagattagaaaaaacgatatttaaaattagtagatgtcctttgtcaactaagttgtggtttgattaaagattagaaaaaacgatattatgttttattttataaagattactagctctgttgtggtttgattaaagattagaaaaaacgatattaaagacaaatgctttgatatcgaaaagcaggttgtggtttgattaaagattagaaaaaacgatattagttactttagtctggaatttatctaactggttgtggtttgattaaagattagaaaaaacgatattttctacgtggtacaacatgcataattgtatgttgtggtttgattaaagattagaaaaaacgatattcattactaactttaaaaaattaaaattatggttgtggtttgattaaagattagaaaaaacgatattagattactataacttattagtgtttaaagagttgtggtttgattaaagattagaaaaaacgatattgttgtgattacgttattatagagcctatcagttgtggtttgattaaagattagaaaaaacgatattacctcaaaaaattagttgcttcactttatgttgtggtttgattaaagattagaaaaaacgatattttgtgcgatttttaccgatgtgaacaaagcgttgtggtttgattaaagattagaaaaaacgatattgcatcataaaaacaaacaattggcattgtagttgtggtttgattaaagattagaaaaaacgatattaaagcactgaaatcatgcactattgaaaagttgtggtttgattaaagattagaaaaaacgatattgtattttgaagttctattgccatgataatagttgtggtttgattaaagattagaaaaaacgatatttttcaataagaaaaaaagatgggcagagtagttgtggtttgattaaagattagaaaaaacgatatttccttgtctaaattaaaaagttcttcattgttgtggtttgattaaagattagaaaaaacgatattaaatttaggatagccagagtaagttttatgttgtggtttgattaaagattagaaaaaacgatattggtcataaatatcggaacttgataccaaaggttgtggtttgattaaagattagaaaaaacgatatttagaagattgaatattaatggaataggtaggttgtggtttgattaaagattagaaaaaacgatattggaactgcaaaacaagataccaatattatagttgtggtttgattaaagattagaaaaaacgatattttcataggctgtaaaattcgctgccatgaagttgtggtttgattaaagattagaaaaaacgatattttcaatattattttgtggataaacccaattgttgtggtttgattaaagattagaaaaaacgatattagtccttccagatgggatggacagcacagtgttgtggtttgattaaagattagaaaaaacgatattttaatacgggactttcaacacttgaaacaagttgtggtttgattaaagattagaaaaaacgatatttcaagtggatagcgtgataaagttttacaagttgtggtttgattaaagattagaaaaaacgatattctttggtgctggtggttcgtgcatattctggttgtggtttgattaaagattagaaaaaacgatattaaaatgctgtaaaaaattagtatttccatgttgtggtttgattaaagattagaaaaaacgatattgacatttcttcagtaagtaaaataaagtgagttgtggtttgattaaagattagaaaaaacgatattcaaaatttagaggcaaaagagcgcaccaagttgtggtttgattaaagattagaaaaaacgatatttccgctgtctaaccattctttgacgaactcgttgtggtttgattaaagattagaaaaaacgatatttgctgacggtggcggttctactttagaggtgttgtggtttgattaaagattagaaaaaacgatattgctgatttacagataatgaaagcgaaaaaagttgtggtttgattaaagattagaaaaaacgatattactgcaattctactgacagtcagaggaaaagttgtggtttgattaaagattagaaaaaacgatatttttcttcacataaagctaaaccaagattaagttgtggtttgattaaagattagaaaaaacgatatttgttaattgtaatttttgttttattcctgtgttgtggtttgattaaagattagaaaaaacgatatttggtttaaccacatttattaaagaattaagttgtggtttgattaaagattagaaaaaacgatatttttatctggattttcttcatctgatgcatagttgtggtttgattaaagattagaaaaaacgatattatgactgtctgagtgggatttttactttaagttgtggtttgattaaagattagaaaaaacgatattcaagaccaaacccaacggaaaagcgatggcgttgtggtttgattaaagattagaaaaaacgatattaagcttttagaaatcaagaaaattctagaagttgtggtttgattaaagattagaaaaaacgatattatagaatatacaggaactactgctaatatagttgtggtttgattaaagattagaaaaaacgatatttccaaagtaatctcctatattgagtgtagagttgtggtttgattaaagattagaaaaaacgatattggtgtagcgctatctgtacagggtgtgatagttgtggtttgattaaagattagaaaaaacgatattgctccctttggagtttctcgcattaatacagttgtggtttgattaaagattagaaaaaacgatattagtaaatagaaacgatagaaacatttgtaagttgtggtttgattaaagattagaaaaaacgatattaataaaaaaatataaaatggaacgaatatagttgtggtttgattaaagattagaaaaaacgatattagttggctctctaccttctaataatcaatagattaatgatgaaatatcgtatataaaaatgcttcttttttgccttgatacagcaagattgaagcattttttggtttctaatgttgtggtttacaaacaccaagtaattaatttttataggagtgtttgtgaatctccctttggtcgatttgattaaagattagaaaccgaggaacgaggttcgacgaagtcaattaacgatattagttggctctttaccttctaataatcaatagattaatgatgagatgtcgtgtataaaaatgcttcttttttgccttgatacagcaagattgaggcattttttggtttctacgtgttgaatttttagtttttaataatcaataggaacgggctttagcccgttttgaaaattaaaagatctataggctttagccaaaagttaaaagataaatttttctctagaatagttctaattgtacaggctgaggtgactttggcacttcggattttccccagaaattaatgatatttccgtattgtttatcggtaatgcgcagaatgcttactttacctaatggtggtaagagtttattaattcttttttcgtgtacatctgcactttcgctacttgcacagtgtcttacatatacagaatattgcatcatgctatatccatcttttagcagattatttctaaatccagaagcgttttttctgtctttaggagtttcggtaggtaagtcaaagaatacaaatagccacataattcggtatccgtttagttccataatttgggatattttattttttttcgctcgccagtgaagcattgctgtagagaacttgctgttttttgtaagcctaccatcatcggacttttttcatcttcgaaatagagtgttctggttaagatttgtagaagttcagcctttagtttggtattgagctcttcctcatcatattggttaatgatttcaaaaactttttcgtctaccataggtcgaaatggttccataatgtcatctgccaaagcaaaagcattgtacttgcttttatgatgaattcctaaggtattgagtagtccgcttccagagagtgctctagctgtagcagctcttagaatagcatagccgtagtttaagaaattattaggataatctccgaaacgttctcttttaaattttttaaacgtgctgttttcaaagaagactttccagtaaatattggctgctgtagcttccatattagaagtatcaccgctcaaaactttggaggcgatgaagtcaaaagaatttttttctcctgttatcttttctaaaagaattccttggttggtaattttttctatgatggtttgttgccacagttgtttttttaatggaacactggcttcaatttggtttttgaaaatttcttgttgaatgtggtggctattcaaattgagaaacatgccattaggaagatggtttttgccacaaataataatggcggtattattttctaccaaaagattcattgctggcatactcagaaaaatctctggatggtctattaccaagaatcctatttcttctattgggatagaggtttctcgtatttcagattttataaggagttgtagatttctggtagagagtgacgctttattttctaaaaggatggtttttttaatcatggcaaatttttataataaatttactaggattagtccaattaaaattatggttttccgtaatagtacaaatcagttttcccctgccagaaaaaatcattgacaaagcttgtaaaaactacaattcccaaaataatttccccacctacttgatctgctgtatctttgtagaaaatactgaaattgaatcttagaaaattagttgataagcagaatgttttcttgttgctcttgctggtgatggttttggcgggaaaactcattccttaccaagaatcttacaatcaaatatttaacctagaacaattcatcgattggggaattgcgggaattttccttttgtacgggttaaaactcaacttgaaagaagtcctgaaagatgtttccaactggaagttgcacctattggttcaagcgggaactttcattctttttccagcattggtattggttttttatccaatttttaaagattcgccatacttccaaagttggctttccgtatattttttagcgtgtttgccttctaccgtttcttcatcggtagtgatggtttctattgccaaaggaaatgtgacttctgctatttttaatgcctctatttctggacttattggtattgtgatgacgcctttattgatggggtttttcttaaatgctcaagctgccgaaaaccatcaagcagagattatccaacaacttttactcaaagttcttttgccgattatcttgggaattctgctcaatccaatatttaaaaattgggtaatgaagtacaataaagtcattgcagaatttgaccgattgattattctattgattgtttacgaaagtttttctaaagcatttattgagaatattttttctacagttccgtcactggtttttgtagtgattgcacttgcggcagtagcgttgttttttatcgtatatgagattttaaaacgcatttcacttcgattgggtttcagcagggaagatgtgattaccaccgcattttgtggctccaaaaaatctttggttcatggcagtttatttgtgatgatactaggaattcccgaagaacaaaaagtacttttcctattgcccatcatgatttaccacagtttccaactgttctatgtaagcgctctcgccaataaaatcgcaaaaagcaaaatttaaaaccactaaataattttccaccctttagggttggggaaaagaaaattatttccaccacggtgaatgagcttgtaaaatttagggttggggaaaagaaaattatttccaccacggtgaatgagcttgtcgaattcaggattggggaaaagaaaattatttccatcgcggtgaatgagcttgtaaaatttagggttggggaaaagaaaattatttccatcgcggtgaatgagcttgtagaatttagggttggaaaagaaaattattgacttatcgtagcctaagcaaagagttgaaaattaattataatagtgaaaaacaccattaaaaaactaaaattcataaccaccataaccaccataaccaccataacctttataaccactataacttttataaccttccttaaattccctcatttcaaattttcaaattctcttattaacttttcttaaaaagcttcttttaatgttaaatcctcaatctcccaaagatgagagttttagatgttttcactcttttacttttaatgttttggcaaaatagcattcatttttgattaaaatttggttgacgaataatttaaagaatgttaaaagcttgttaaaatacttaacggtcgcattagaatacttttgagctttaaaaaaagtaaaatgcaaaaacgaacacagcagattattttattagctgctctaggtctggtaagtgtaaccaacttacaggcgcaatctaagaaagcaaaattagattccgtaagaaacatagacgaggtagtagtaactgctttgggaatcaaaagacaagacaaatccctaggctatgtagcagaaaaagtgtcttcagaagagtttgaaaaatcacaaaacaacaactgggcacaagcgttagaaggaaaagtggcagggcttaaaatccaaacagcaggtgcaggtcctctaggaagtgctaaaattaccttgagaggaagtatttccatgaatttggacaacaatgaagcgcttattgtagtagacggtgttccattgggaggaaccaatacaggtacaggtaacgcagcgtatggtgcaggttctggaggtgatttgccagtagattatgggaacaattttaacagtattaatccagatgacatcgagaatgtaacgattctaaaaggagctaccgcttctgcattatatggttctcgaggagctaatggagccatcatgattactacaaaatcagggaaaaataagaacggaaaaataagagtaacccttaattcttctacaagttttgacaccgttttgaaatggccagattggcaatatgaatacggtcaaggaacattggcaaaaaataaagacggtcagttttactattcttatggtgcttcagctgatggagtgagcacaggaggaaccagtagcgcattcgggcctaaatttaatggacaatattattttcaatatgacccaaccgtagaagggcaaagtttagaaagacaattgtggagaccttacaaagacaatgttaaagggttttggcaaatgggaactacctattctaacagcatcagtatcgaaagttctaatgataaaacttctttccgtacttcattaagtgccgttaacaatacgtggatgatgccgaatacgggttttgatagattcaattatgctttgtcttttgaccataaggttactaaaaaattgagggtggtttctaaatttgcctacaattataccaagagtgataatttaccttctacaggctataacaaccaatcgatttcttatttcatgattttccagaatccaaatgtagatttatcatggtatgaaccgatttggaaaaaagataaatatcaagtagagcagattcaccctttcagtacctttatagataacccttatcttatcgcttatgaaatgctgaatggagtagacaaaaaattaatcacaggaaatattaccgctacttataatttcaataataattttgaaatgatgctaaggtctggtattgaaattacagatgaagaaagaacaaccaagagaccttacagttctgctaattaccttcagggatactatcgcgaacaatacattaaaaattctgagtataatacagacttactttttacgtataaaaataatttcggaaaatggggcgtttctgcttcagcagggggaaacatcagagcaaatgaatatgtgctgaatgattacagagctatcggtcttagagttcccgggatttatcagttaaccaatgcgatttctctaaatacaagaattgctcaaccgaatgacaaagaaaccaatagtgtttacggtttagcgtcattcaattatgataacctttggtttgtagatttcaccgcaagaaacgactggagcagtactttaccaaaagccaatcgttcttatttctatccttcggttgctacttctttaattctttcagatgttttgaaaatgaagtcaaaaagctggaattattggaagttgagagcttcttggtctcaagtaggaaacgatacgcagccgtacaaattacaacagttctataacacgagcgattttgtaggttcggcagaaaatattgccaatttccagaatcctaatctgaaacctgaaatgaaccagaacattgaagcagggatggatttcagtttcttcaaaaatagattaacgtataacgttaccgtttatcaaaacagtaccaaagaccaaattgtaaacgtaccgtctttaattgaaacaggatattctacacgtactattaatgctggtgaagtaagaaatagagggatagaaatgactttgaatgcattcccagtgaaaaataaaaatttccaatggaatgttaccgcaaactggtctatgaataaaaacagaatcatgtctttaccggcagaatttcatggagaaccatataccatgggaagcgtaggaggagtagtattctttaatgcagtagttggaggttctctaggagatatgtacggatataaattacagtacgctccagatggacaggtgatttttggtagcgatggtcttactgccaaatctacagaaatagaatacgtaggaaatgcctatgcaaaatggagaggaggtttacaaaacgcttttaaatacaaaaacttttctttaagtttctcttttgacgggcaatacggaggtagagtttactcacagtctcaccataaaatgtctgaacagggaaaacttacccatactttagtgggaagagataatccaaacggaacgattgtaggagtaggagtggtacaaaacccagatggatctttctctcagaataccaaagcggtaacccttacttcttattatgcagattattatagaagagccaatgtggaaaccaattcatttgatgcatcttatctgaaattaagagaagccaatatcacattctatttccctaaacaaatcgtgcagtcattaaatatgtcagacttaagtttatccttatttggtagaaacttatggatgtggaccaagtttcctctctttgaccttgaagcagctacattgaacgattcatcaattactccgggagtagaaatagggcaacttcctactgcccgtactgtaggaattcaacttaatgctaaattctaattgacaactatgaaaaatatatggataaaagcagtggcgttctgcgtaatttctctagcagctact

SEQ ID NO: 3114 - DNA, 24368 bp, synthetic construct
  misc_feature 1..24368: note = Synthetic
  source 1..24368: mol_type = other DNA
atatctggtgaactcattgtagtcgcttttaattgcgattgaaaattatgtcccattactacggctctatgaggatcacatagcataattttggcacccatatcaattaatttatccacaaagaacaatcggctttcaaacatcttttgatggattaaaacatccccttctgcttgtgtggctaccaccaaaacaatactcaataaatcaggagtaaatccaggccacggtgcatcggctaccgttaaaatagaaccatcaatatcggtttttattttataaccgtctttatgagcaggaatataaatatcatctccttttctttctaaagtaattccgagtttacggaaaacgtttggaatttgtcctaaattatcccagctaacatttttaatagtaatttcacttctagtcattgcagcaagaccaatccacgaaccaatttcaatcatatcaggcaaaattctatgttcgcaaccccctaaagtttcaacaccttcaatggttaacaaattggaaccaataccttgtattttggctcccatagaattcaacattttacacaattgttgcaaataaggttcacaagctgcattataaattgtagttgttccttctgctaaaacagccgccataacaatattagctgttccagtaaccgatgcttcatcaagcaacatgtacgttccttgtaattttccatcgatttcaaccccataaaaatgatcttctctttcgtatctgaatttggctcccaaattaataaagccctcaaaatgggtatctaaacgtctacgaccaattttatcacctcctggttttggaatataaccacaaccaaaacgcgctaataaaggtccaacaatcataatagaacctcttaaacttcctccttctttcttaaaagcttctgtctttaaatagtcaacattcacttcatcggcttgaaaagtataatctcctgctccatttttttgaatcttaacacctaaattcccaagtaatgtaattaatttattaacatcaataatatctggaatattggttaccctaactttttctgaggttaacaacaccggacataaaacctgtaatgcctcattcttagctccttgtggagtaatatcaccttttagtggttttccaccttcaattttaaatgttcccatgaaaattaattccttttgtggtttttagagttattattggttttctttttgtgatttttggagtttgtattcttatttccagaattgaattgagatttattagacacttttttattcactttcattaaattatgtgaattagaaagttcttcattggttttaaacaaattgattttcccgtctgacaattctaacaagtgctgaaaaataacctcatcttcaaccgtttctttgttccaactcaaatagcattttttcatatggttggcaattacaagaattaaagcactttttaagtcgccttcttcccatttcattgctacatcaatcatataggtaatattatttccgtaaaaacgatatttaggaaaattttgcggataatttaatatctcaggcctttgatttaatacttcccttgaaggaataggataaggagaatctacatccaatttaaaatcagacataatgaacaactgatcccataatttatgttgaaaatcgggtacatctcttaaatgaggatttaaagaacccatcactgaaattacatattttgcggctttattgcgttcttctttgtctttaatttcagtaacctgatcgattaatttttgtaaatgtcttccatattcaggaataattaatggttcacgcaatgaattatattctaattgtgatactgcttccgtttttacttccataattataatgatatgattccttccacaactgataattctttatatttatcaataacactttgcggacttttcatttgaacactaattgaaacactagtatattttcctgtttttgaatgtgttgtattaataacagctcccatttcgttaaaagcattttcaacaaattctactttttcagcattgaaaggaacaataaatttaaataaatattctgttggccaaattgaagtattcgtcaattcttctttcaaacgaatgtaaaagtcttccgttttcttatccatcttcattttttttagagtagcaaatatacttttttaagttcagaataaatattttgaagaacataaatttgaaatatgaattagatttttaaaaaaaacttacttttgcgttttagtttaaagggaatggagaaagaaataatcgttttaataggtggaccaagttctggcaaaaccactttaattaatgcattaactcagaaaggatacatttgttatccagaaatatcaagagaagtaattcaaaaagcacaacaagatggaattgaacaattatttcttgaaaacccacttttatttagtgaattattgttacaaggtcgcattcatcaataccagcaagctaaaagtgaagcttctgaaattgtgtttattgaccgtggtttacctgatgtaattgcttatatgaattttattggagaccattatcctgatgcttttcaccaagcttgtttgttacacacctacactaaagtttttgtattacctccttgggaagaaatatacactagtgacaacgagcgctacgaatcttttgaagaagcggttcaaatacaattgcatttagaagaaacttacaaacaatatgggtatgaattaattcatgtaccaaaagacacggttgaaaaacgagtggcctttctaatggatttcattcagaaataattagtaaatttagcccaagtaattacccgtaaaaatgtctaagcctttacaaattcttcaaacatattggaaacacaattctttcaggcctcttcaggaagaaattattcatgctgttttagaaggtaaagatacttttgcattattaccaactagtggcggaaaatcgatttgttatcaaattccaggtatgcaactagacggaatttgtttggttatttcacctttaattgcgctcattaaagatcaagttcaaaatttacaaaacaaaggtataaaagccatttctttattaggtggcataccacaaaatgaaactattgatttattagacaattgtgaatttggcaattacaaattcttatatctgtcaccagaaagaatgcagcaagattggattgttgaaagattaaaacgtttacccatcaacttaattgctattgacgaagcgcactgtgtaagccaatggggacatgattttagaccctcctatcttaaaattaaagatttaaaaaaccactttccaaaagttccatttttggctttaacggcctctgctacccaaagagttcaagaagatattatagaacatttggcattagaaaacccagtacggtttcaaaaatcttttgaaagaagtaatttagcctatcatgtcattgaaacagaagacaaactatataaggttagacaaattttaagcaaaaatccgcaatcgagtattatttatgttcgcaatcgtaaatcttgtttagaaatagctagtcaattacagtcattaggactaaaaagcacttattttcatggtggtttacctgcaaaagaaaaagaaagcaacatgcaactttggttagaaaacaaagtacaagtcatggtggctaccaatgcctttggcatgggaattgacaaaccagatgttaaaacagtaattcacattcaacttccagagagtttagaaaattattaccaagaagcaggaagagcaggaagaaatggtgaaaaagcatttggaatactcttggttagcgtgggtgatattgaaattgccaaaaaacagtttttatcatcacttccagacaaagattttttaaaagaaatatacattaagctgaataactatttccaaattgcctatggagaaggttttaatgaagcttttaatttcaatttaaatcaattttgttcccaatacaacttccctgtgcttaaaacgtttaataccttacagtatttagaccgacaagctgtaataaccttacaaaatgaatattctgaaaaagtgagtctgcaatttacggttccaagcaaagaagtaattcgttatatgagtttacatccaaaatcggaagaaattattaccagtattttgagaacctatccaggtatttttgaaatagaaactttaatcaacataagtctggtagctaaaaaatctggtagcaacgagaaagaagttttaaaaacaataaccgatttagaaaaaagcaatacgattgtactgcatattcaaaataacgacagcaaaataacttttaatgaagtaagagaagatgcattaaccattaatcgaatctcaaaacctttagaaaaacaaaatgaaattaaggttaaccaattaaaaagtgtgattaactttatttctaaagaccaatgcaaaagtcgtattttattacagtattttgatgagaagaaaacaaaaaactgcggtatttgctcttattgtgtgacccaaaaaaacaaaatctcagaagaaagcatttcaaaaattctttccttattacaaaatgaaccactcagctctagagaaatagaaaatcgccttgataaaacaacagaagaaattatctttgccatacaaacgctacttgaaaacaataaaatagctattaatacctacaatcaatattatatattagaatggaaaaattaaaaatcgtatttatgggaacaccagactttgctgtaggtattctcgacactatatatcaaaacaattatgaaattgtaggtgttattaccgctcccgacaaacctgctggtagaggtcaaaaaataagtactagtgcagtaaaagaatatgcattagaaaaaaacttacgcttattacaacctactaatttaaaatcggaagaatttttatcggaattaaaaagcctagaagccaatttaaatgttgttgtcgcatttaggatgcttccagaagtagtttggaagatgccaaaatatggcacttttaatctacatgcttctttattaccacaatatagaggtgctgctcctattaattgggcaatcataaatggagaaaccaaaacaggtgtcactactttttttatagacgacaaaattgacacaggcgcgatgatacttcataaagaaacaattattaattcagaggaaacagttggtacacttcacgatagattaatgcatttaggtagtgaagccgttttagaaacactagaactcatttcaaaaggagaagttacaactaccctacaagaagattcttcagaaatcaaaaccgcttataaactcaataaagagaattgtaaaattgattgggataaatcgggaattcaaatttataatttaattagaggtttaaatccttatccagctgcatggaccttttttaaagatggtgcaaacgaatggaatgtaaaattgtatgatgttgtttttgaaaaagaaaatcacaatcatctttctggtcaaattttagcaaccaaaaaagaacttaaaattgcagttacggatggatatctttatataaaaagtttacaatttcctggaaaaagaaaaatggaagctagcgaactcttaaatggaattcaattttcagaaaaagcaatggctttttaagccttgtaaatgctagaaaaaaggatttgtttgtaaaaaaagtgacaggttattaacaaaaaacatgttttattaacattttaaggtaaaatcaccgtaaacacttgcacaattcagttatacgactaaatttgtgtagaaataattaagtttaaccaaattaataaacattttattatgaacaaatcagaattaatcgatgcaatggcagcttctgctggaattacaaaagcagctgctaaattagctttagaatcatttttaagcaacgtggaaggaactttgaaaaaaggtggaagagtttcattagtaggatttggttcttggtctgtatctaaaagagctgctagagatggtagaaacccacaaactggtaagacaattaaaattgctgctaaaaatgtagttaaattcaaagctggtgctgaattagacggagcagtaaacaaataatatttttttacatactacttaaaaatcccgtgaaaacgggatttttttttaaacttatgcttcaaatatttgattttgtaaagattttttgataattttaggtaaaaataatttgcttatgatatcagttttacccaaaaaaggacatttgctgatagcagaaccttccacgctaggcgatttttctttcaaccgatccgtagttttattagcggaacataataatgaaggctccgtaggttttattcttaacaaacccttaggatacaccattaatgatttggttccagaaataaatgcctcatttaaagtttacaacggtggccctgttgaacaagacaatttatatttcattcacaacattccacatattattcctggcagcattgaaattgcgaatggtatctattggggtggtgattttgaaactaccaaaacacttatcaatcaaggtgaaatttcaaaacacaacattcgcttctttttaggatacagcggttgggcagtgaatcaattagaaaatgaattgaaagagaattcttggattatcactgaaaacaatcaaaaaagcgaattgctttcaaaatcttctcaatccttttggaaagaaaaaattcaagaacaaggtggtgaatatgtattgttttctaatgctccttcagaccctattcttaattaagacgaactaaggcatttaattttagcagtatttcttcagctaaaagtatctgatattctttctttctatatttagtaataggctgtattcctacgattacatttgtaataaacaattcgtctgctttttgtaaatcaaatggagatattgatttttccacaacttcatacccttcgattcgttttgcaacagctaaaatttgtttacgcataataccatttaagcatccatctgttataggtggtgtaattaaagtagttcccatacgcataaatagattgccttgtaaagcctcaatgacatttttttcatcattgagtaataaacaattgtcatatgcattttcagaagcaaaaatacttcctgtaatttgaatcattttattattggatttcaaagaagaaaacaactgctttgtcacataggcatctttgtacaattccacttcataagccccttttttaatataatagacttcactctctaaaggcaaaatagttattacataagacacgtcattggttctaggaagataaaaaccattaccttcccgaaaaacagaaaagcgaacgcgaaaagacattgctgattgtatttgggattctaccaaaagtaaaatttgctcttccatgaattccatggtaaaagacattggaatttccattctaaaaatacgcatagtagccatcaatcgaaaataatggtcttctaaaaataagactttcttgtctaaaactttaaccgtttcaaacacactatctccaaataaaaaacctctattgttttcaatatataccttactatcttctaaaatagttccattaaaatttaccataataaaaaagtcccgattaaaatcgggacaaatatactttataaaattgagttttacacagaacctagcacatgtttcaaatctgaaacctgattttcccacagtaattttgactcttccatttcatcttcttcagagaaatctactactactaaagacacatctttggtaatttcatcttccattattttaatttcgaaaaagtaatccgtatcatcaccgtcttggtctaaccaacgaaactttacgcgttctcctgttctcttagcaattagttttgctttttcttcggaatcatcccaaataaaggtaaaaagttctcctctcgaattaacgttatctgcaaaccattcagataaaccagaaggagtggatatatattgatataataaagaaggcgaggcatgaatggggaattctagttcgtattttaatttaacttccatttttaaaaatttattttggaaatatatagagaataatctgaaaaaccaaaaagaaaaaattagatttttttttataaaattttttacaaaaaaatatttgcattaaagagaattaattatatatttgcacccgcattgagagatgcacaaccaacaataatggcgaggtagctcagttggttagagcgcaggattcataaccctgaggtcacgggttcaactcccgtcttcgctactagattttatctattgaaaataaacggtttaggtttctaaatcgttttttttatgtccaattttttaccagcattacacaaggtatacgatttagtatacggttttgacaaaaaattaaattatattgcaatgaattttagcaatagttctaaagaaaaaataatttcaaagcctaacttttctatccccaaaatttacacaggtggtgtttctattaccgattggaaactactttctaaacaagaacaacagaatgcattgaaaaaagactggtatgtatattatagctttcggtctcctgaaacagataaattagttcgacaaacacctataaaaggttacgctaactcgtataaaacaaaaagagaacgtattatgtatttaactgttatgcgagatgctttagaattattattaaaaaatggagcaaatccttataccgataatgattttacctacttatatcaaaatgataatgaaaaaccagctgaaaaagattcattaaatgttgaaaaagagataaaaccaaaaaaaatagacacaaaagagaacatcataattgattctaaagaaaaaattgtaactataaaagaagcttttgaaacggttttaaaattaaaaaagaatgtaatgaacactacttcttttaatagttatcagttacgaattcataaatttctaaatagtttaccaaatacttctgacgacatcaaaagtattacaaaaaaagatgtaatacagtttttaaataccattcttcaaaatacaagtccaagaaaccgaaacaactatagaaccgatttaaattcattttttaatgaactagaaaacaatgagtatatttctaataattttgtaacaaagattaatgttttaaaaacagtacccgaaagaaacaaaactttcagtgataaaacccaagaagatatatatacatttttagagaatacaaaccctactctactcctatttattaaatttatttcttataattttttacgtccagtagaagtttgtagattaaaagtaaaagatattgatataaacgaacgtaaaatttatgtacgagcaaaaaatcaacctgtaaaaattaaaatcattcctgacattttaataaaagatttacctgatttaaaactacttgaactagataactatttattcaccccttatggttatgggcaagaatgggaagctgaagaaaataattgaagagattattttagcaaactattcaataaagaggttaaaaaagaattcaatttaaatcaagactatggtttatatagtttcagacatactttcattacacgactttatagaaaattacgtgaaaacaatcctcaacatgttgcaaaaagtaatttaatgctaattacaggtcacagtacgatgactgcattagaaaaatatttaagagatattgatgcagaattacctactgattattctaatttgttagaataaaaaaagtcccaccgaagcaggactaaagattttcatctacggcatatagccttattgtgataagattaaagtttggaaattttaatctaaaacaaatataagtaaaacttttctagttgatttacgttttttcgtaatgttcttaattttcttttctttatttttaagaaatgatttaaaaagcgcttttcaatgacgaaaattttaggattagatttaggtacaaactcaattggttgggcaattgtaaataaagatgaaaataactttaatcttttagataaaggagttagaatattttcagaaggagtgaaaactgaaaaaggaatcgaaagttcacgtgctgctgagagaacaagttaccgaagcgcaagaaaattaaactatagaagaaaattaagaaagtatgaaacattaaaagtactctctaaaaatgagatgtgtcctttatcgattgaagaagtggaggattggaaaaaaagcggttttaaaaattatcctttaaatccagaatttttaaaatggttgagaacaaatgaagataaaaatattaatccttattttttcagagataaagcaagtaagcaaaaagttacgctttatgaattaggtagagcgttgtatcatatagctcaaagacgtggttttttaagtaataggttagatcaatccgctgaaggaattttagaagaacattgtccgaaaattgaagcaattgttgaggatttaaattcttatgatgaaattcttgaaaatttgagagaatatttttttgagactggaattcttgactctaatgagaaaagtggctttacaaaagatttagatgaaggtgataaaaagttagtttctttatataaatcaattcaagcaattataaaaaaaaatgatactgattttgaaaaaggaaaagcagaaattaccgaacgattaaataaaaaagatgttttaggaaaagtaaaagggaagataaaagatatttcccaagctatgaatgatggaggttttgaaactttggggcagtatttttttagtttatacaataaaggaaaaattagaaatcaatatacttcaagagaagaacattacctcgaagaatttattactatttgtaaagttcaaggaattaattttattaacgaaaaagaacaattacctgaaaagaaattcgatggattagccaaagatttatacaaagctattttttttcaaagacctttaaaatctcagaaaggttcaataggcaaatgctcatttgaaaccaataaatctcgctgcgctgtttcacatcccgattttgaagaatatagaatgtggacatatttgaatacaataaaaattggtactcaaagtgaaaaaactttacgctttttaactcaagaagaaaaactaaaattagttccaaaattttacagaaaaaatgattttaattttgaagttttagcaaaagaattagtcgaaaaaggagcaagtttcggtttttataaatcttctaaaaagaacgaatatttttattggtttaattacaaaccaactgattctgtttctgcttgccaagtttcttcatcattaaaaaatgtagttggagaagactggaaaataaaaatattcaattataaaactttaaatgctaaaaaagaagcggtaacaaaatcagttgattataaagatttgtggcatttgttatccgtcgcaacttctgatgtttatttatatgaatatgcaaaagaaaaactaggttttgatgataaaagtgctaaagcttttagtaaaattaaattgaaaaaagattttgcaagtttaagtttagctgcaatttcaaaaattcttccttatataaaagaaggtcttttgtattctcatgctgtttttatggcaaatattgaaaacattgtagatgaaaacatatggaatgatattgagcagagaaaatacattcaaactaaaattgcagaaattgtagacaattacacttttgaaaagaatcaattagaaataattaacgggcttataaaagaggctaagttacaaactgaatattattctacagaagcggagcagatttataaaacagatttagctaaaaaattagttttgttttataaaaaccattctattgaaaatgaaaatgatcagaaaaatatttttgataacttgtttccaatttttattgaacagttaaagaaatatgaatttataaaaataaaaaggttagatgaaaaagttttagagtttctctctggacaaaatgaagatggagaagttttttgtagcaatccaaaacaattaaaaaaactatatcatccatccgatattgatgttttcaaaaagaaaatcattaaagatgaatttggaaatgaaaaaatagttttaggaagtcctttaacgccatcaataaaaaatccgatggcaatgcgagctttacatcaattacgaaaagttttaaatacattgattttggagggacaaattgatgaaaatacaagaattcatattgaaatggcacgcgaattaaacgatgccaacaaaagaaaaggaatacaagattatcaaaacgagaacaagaagtttagagaacacgctattaaaaaaattaaaaaactctattttgaagaatgtaaaaaagaagttgagccaacagaagatgatatattaagatatcaattgtgggatgaacaaggtaaatgtgaaatttacgaacaaggtaaaaatattagtatttgtgatataataggtaataatcctgcgtatgatattgaacatacaattccaagaagtatttctcaagataattcgcaaatgaacaaaacactttgtagtcaacgttacaatagagaagttaaaagaaataaaatgcctgttgaattatctaatcattcggaaattttaccaagaattactcattggaaagaagaagcttataatttatccagagaaatcgaaatcataaatcgttcaattaaagctgctgcaaccaaagaagttaaagataaaaagataagaagaagacattacctaaccttaaaacgagattatcttcaaggaaaatacgaccgttttatttggaaagaaccaaaagtaggattcaagaatagtcaaattcctgatactggtattatcactaaatattcacaagcttatttaaagtcctattttaaaagagtagaaagtgtaaaaggcggaatggtggctgaatttagaaaacaatggggaattcaagaaagcttcattgatgaaaatggatttaaacaatataaagaaaaagatagaagcaaacatacacatcatacgattgacgcaattacgattgcttgtatgacaaaagataaatatgatattttagcaaaagcttggacgtctgaagatgaacaagataagcaaaaatcaaaaaatcttatgtcagaagctaaaccctggaagacttttaaagaagatttagaaaaaattgaaaaagaaatattagtttcacattttacgccagataatgttaagaagcaatctaaaaagattttaagagttagaggaaaaaagcaatatgtagctgaaatagaaagagatgtaaatgggaaagcaattcttaaaaaagacaataatggaaaagttatttacaaacttgacaaggaagggaaaaaacttccaagattccagcaaggtgatactgttagaggatctttgcatcaagatagtatttatggagccattaaaaacccattgaataccgaagaaattcgctatgtaattcgcaaagatttagaaagtttaaaagctaatgatattgaaaatattgtggatgaaatggtaaaaaagaaagttaaagaagctgttgtaaataaagttttattgctttcatctaacgcacaacaaaagaataaaatgaatggagttgtttggatgaatgaagaaaaacaggtaccaataaacaaagttagaatttatgctaactctgttaaaaatcctttagaaataaaagaacatagtttgctttcaaaatcaaaacacgaacacaaacaaaaagtgtacggtcaaaatgatgaaaactatgcaatggcaatttatgaattagacggtaaaagagaatttgaattaatcaataatttcaacgttgccaaacttttaaaacaaggtcaagggttttatcctttacataaagaaaaagaaataaaaggtaaaaaagttttagttccaattgaaaaaagaaataataaagatgttgttttaaaaagaggacaacaagttgttttttatgataaagatgttgaaaatcctaaagatatcaaagaaataattgattttaatggaaggatttatattatagaaggcctttcaattcaaagacaagttgtgtctgtaaaattatatgaatttggtatcataatgctaagatatttcaaagaagctagaaaagcggatgatattaagaaggataattttaaaccagatggagtttttaaacttggtgaagttaaaccaactagaaaaatgaatcacaatcaatttagcgcatttgttgagggaattgattttaaagttttaccaacgggaaaatttgagaaaatataaataatttctttttgttcattgacataatttttcaagttcataaacagctcaaacacaacgtatttttatcataatcaatttgttgtagtttacaaacaccaaatgtttatttttaaataggtgtgttttgtgaatttcatttgattaaagtttggaaaacacgatattaaatctttttttctttatcactatctaacagttgtggtttgattaaagtttggaaaacacgatattaaaaaatcaagattaattttaaaaccctcgttgtggtttgattaaagtttggaaaacacgatatttccactttcattttatcggaaccatctaaagttgtggtttgattaaagtttggaaaacacgatatttgctccgtaataagtcaacttacctgtattgttgtggtttgattaaagtttggaaaacacgatattaatcaataattttcacttatatacatagttgttgtggtttgattaaagtttggaaaacacgatattttacagtttattaagtagtcaagaaggtttgttgtggtttgattaaagtttggaaaacacgatattagttattaatttagtaaaaaagatagatgagttgtggtttgattaaagtttggaaaacacgatattaaacaaaagtaagatggaacaattagtagagttgtggtttgattaaagtttggaaaacacgatattaactcagtagcattcttaactactttattagttgtggtttgattaaagtttggaaaacacgatattgttttaatgtttagtttaaacggtatcgcagttgtggtttgattaaagtttggaaaacacgatattattttcagagcactttagattcattaataggttgtggtttgattaaagtttggaaaacacgatattaatgtgaaaaattacagattttttcttagagttgtggtttgattaaagtttggaaaacacgatatttctaatctaaagctgtgatttgccgtttctgttgtggtttgattaaagtttggaaaacacgatattttatcagttgcaagtgtacatgcatttaacgttgtggtttgattaaagtttggaaaacacgatattttttgaggagattcaataacagttaaacccgttgtggtttgattaaagtttggaaaacacgatattttttgaggagattcaataacagttaaacccgttgtggtttgattaaagtttggaaaacacgatatttgaattatataaattaggttatggatcaaggttgtggtttgattaaagtttggaaaacacgatattaatctaaatgaaagcaagcctattgattatgttgtggtttgattaaagtttggaaaacacgatattttgcctgaactaattaagtttatacccgaagttgtggtttgattaaagtttggaaaacacgatattagaaaccgcaaacaaagaacaagctatattgttgtggtttgattaaagtttggaaaacacgatatttgtaattccatactatgagccattgatacagttgtggtttgattaaagtttggaaaacacgatattacttggcaagggttaagatatacagatggtgttgtggtttgattaaagtttggaaaacacgatattaatatagtttttaatggtttagataaacatgttgtggtttgattaaagtttggaaaacacgatattaaacagaagataatagctatgctagatttgttgtggtttgattaaagtttggaaaacacgatattagttgagtctttatcttctaattatcaataaattaaactaaaatatcgaaagaaaaaatgcctcttttttaaattgataagttacaattgaggcattttttgttttctaaaattaaaacaattctaattgtgtaggttgtggtgctttaggcacttctgctttaccccaaaaatttaaaatatttccaaactgtttatctgttattcttaaaacactcactttacctaaaggtggtaataaattatggattcttttttcatgtacatctgcactttcactactagcacaatgtcttacataaacagaatattgcatcatggaaaaaccatcttttaaaagattatttctaaacccagaagcattttttctatctctttttgtttcagttggtaaatcaaaaaatacaaataaccacataattcggtaaccatttaactccataattttggatattttattttttttctctctcctgtaaaacattgttgtaaggaacttgccgttttttgtaaggcaaccattaatgggcttttttcatccttgaaatatactgttcttgttaaaagctgtagtaattccactttaatttgtgtattaagttcttgttcctcatattgttttattatttcagaaactttttcatctactaaaggtcgaaaaggttccattatatcatctgcaagagcaaaagcattatatttactcttatgatgaattcctagcgtattcagcaagccactacctgataaagctcttgctgttgctgctcttaaaatggcataaccgtaattgagaaagttatttggatattttccaaaacgctctcttttaaaatcattttctccaaccgattggtcattattaaaatcaaaaaatgttttccagtaaaaattagcggcaacaccttccatattagaagtatcgccacttaaaacttttgaagctaaaaattcaaaattattctttttaccactcaccttttctaaaagaattccttggtttattattttttcaattatcgtttgttgccatagctgtttctttaatggtacactcgcattaatttgattcttaaaaatctcttgttgaatatgatgactatttaaatttaaaagcatcccatttggcaaatgattatttgtattacaaaatattactgctgtgttgttatcaactaacaagttgattgctggtatacttataaatacttcagcgtgatcaattagtatataaccgatatcctctattggaattacactttgtctgatttcagattgtaatactagttgtaagtttttagttgtaatagatgttttattctcaattaaaatcgattttttaagcatttttattactaatatactcattttcaatataatgaatttactaaaaaccgtaaaaaggacatgattttaacatttaaacgtcaagtaatacaagaaatttaaaatcctgtaaaatgttggaaaatccttgcaaatccttgcaaatcctgacaacattattttttattgaaataactttcgaaaaaatttaaggaaataaatagttgacatccaatacagcatatgaagtttttttagctctttctaatgaagaaagagaaaaattcttaatgctgataacgaaacatcaagctagtatttctaaaaaacttagtaaaaaaagaaatactattgattttaataaagacgatgctattaaatacctaatagaaaccattttcaaaaaaaagtaaaattcaaaaacaccattcattatgaaaaatgaaaccattacccttcgactagaaaaggatcttagagaaaaactagaattaattgccttagaggaaaattgcaacttatcaaaagttataagattgcaactggtaaagaatactagagaaaaaaacaatagcgacatgaatgaagtgcatctttcttttatgtataatccacattttaaaatagccattagttgcatgtattttattgctacaaaaaatgtaactctgattaataatcagaatttaaaagtacttcaatatagtattaatgaagtattatcttttgaaaatttacctgattatttattttcagattttgaaactttaataaatctattaaattattgtcttacaaacaacattagcctagagcaagttaatttagatagttactctagtgttttttactctgttttcagatatattttaaatatttcaatgcaaaatattactgaaaccctttagtcaactaaaatgtattacaaaatagcttaaaattttaaaaatgtattacaattttgtaatacatttttttttataatagatagattaaaaaattaagagttatagaaaataactcaactccaaaaataaatgcgtaatacacattgcaactgtatgtaacttctagaaaaacaaatggttttgcgttgcaatcgttttaaatgggttcgcatagacaaattatttctttcaatttgattcgtaccaaaacgtgttactctatgtattactttatttattaaagacttataatgtactaacccatcagtgtaaatggcttttggtgttgaaagtaataatgaattagttacatattgaatggttcttttggttcttcttcctaaactaaaactcaccactcgctttgttttcctttccatagcatatactatccatatgggtttgtcttttcgttttaaatagcaacgcatttcatcaacttcataacttttatttttgaagaaaataggattctgaatctttttagcaatagcaattattctttttaaaatagtgtcgttgcaatttgcaacactcttgctatacttcttattcccaaaccttcttttataaattggataattttagcacttgtatttcttttacaagcattatagctataataatcaatacatcttttgttgcaacttttacaatagaactgttgcttcttgtttttagtaaaaccatttttaattaaatttttagtgttacaataagggcaaatacccgtatcactaattctaatacacaaggttgtcttttttaccattttttccattttaagaactttaaacataaaaaaagatgaactatatagttcatcttttttacaattattttttaattcttattgattatcaatcaattaaatactcacaaaccatccatcactaaatttgacacattaccaaatctgatacattacccacatatcactaactttgaaacattaccagagtattttttttacttcatttgaaagagattgcgaattaatgtttagctcaatatatccagaatcaaaatattcaattactatgtgattattttcataaatttcattgctcaacttggaacgtttaaaattttcttttttaggatttgcaatgattaataattcaaatatatctactatattatcaaaaaacaataaagtttcatcaaagcttaaaatcttcccacaaattgaattattaatttctttttcaacctctaaataaggaaagttttttttgctaataccatcaatatattggatagcaaaaaattgagaagcaaatgaaggataaacttctttaattttacataataaatcatttatcatgatgtattcttttatttcaattttagtcattttaatctaaaggttttgcttctttacttctttgtcgggttcctcctgtagtattttctttatactcatgctgatgtggattagggtgattttgaggtcttccatgatcagtaaaatcgatatctctaacaggttgaccattttcattaaattctctaccttgtgtatagcttccatttctaccttctttagttcccaactgcgtatgagctctccccgtagcttctgcgtcaactacaggttctccacttgaagttcttcttaaaggctcttgtggagcataagtcccctgtgatttagcagaatttatttcagcagtttctgcaacaacagtactttctgaaacagcagtagttttagaactacctttacttacttgatgaacaattactacagcagcaacattaaaaactgttgtagctactgcttttgcatcacctgttgatgcttttttaactgtttctacagcacttttaagtccactcgttgtatatacttgatttgcgtattcattagctgctgcttttgccccgccttgttgatatgcattataaacacttttagttgaacttatagcattacttacattattgtctaaattttttataactcctttggctagattaccagtagcactccatgctcccttaacataattttttaaccaagtaggatctggccacattccatcagggtcaagaaaatatacaggattattaaaacaataattatatggagaccatctacgaccgttctcagctttcgggtctatttgccaaaaccttcctacagcttgatcataaactctattgtcgtagtcgtaaacattgagattaagctcatcttgaaactccttacctccaaagcgatacttataagtagattgtacagtaggtgttcctcctttcaaaaccactccaccactagttcctttttgatacagtaattggtcactattatagttagtatgttttaatccaaatgcataataatgattttcttccattatttttaaacttgatgtttcaggatctactccataactaactcgtatatttcctagatgatccgtataattaaatacataattatagttatttactccatgattatctaccacattcacataaccttctgcatgaggaaagaaacgtaaaaaacctcccttatattgaaagccaactcctaaatattctgttttggtaattacgctattctcactcactgtttttactactttttgtcctacagcattgtaaatatattcaattttattggatcaaataacaatttctgtttgtaaattaagctatcactaattctaatatacaaggttgtcttttttaccattttttcctttttaagaactttaaacataaaaaaagatgaactatatagttcatcttttttacaataattttttaatttatattgataatcaattaattaaaaactaataaaccatccatcactaaatctgatacattaccaactttgtgggcaagttttgtaaatcaaaactaattattcttatcaatcccaagtttcagggcatttaacaaaacatttttttgcttttttagtttgtcccccagccatataatatataaaattactcaaagtctcatcatcaattttataatcccaatttgcttgaaaaagagaaccttcatattctttagcaaactgatcaatattatcaatctcaaaacctcctaaaaaataatatacttttttgtttatagaataagaaatataataatcacaatcacaccaattaacagtaaataagtcagtattttcttgacaataccttcttccacttattttaaaaaaaagaaattcattatttccaaaaattgcacaaggcattttttcaatattattaattaaaacatttttatcctctaacccatgattacttagagtaaataatttagctttaaatacaattgaaattgtatcaatctctttaatatttactttagattgcgcttttaaataaaaaggcaatattaataatagtaatatacactttttcattagtttcttttaaaattttttttaccaaaatctacagctctctttcctgaagggtcatcatttttgtgaccatcatgattattatataataatttattttcctttaaccattcataatatgattgaatatttctaattatataatcggcatgaccaatttcatgtttaataacttctaaagtagtcctaccttgtgaaacataattagcaattactatttcagttgaatttggaatatagcctaaatggttaactaataacgatgtaagcgttacattgtttggatccgtttcatcaaacattgtattgttctgtccgtcattacccggcaaataatctttagaagaaatataaatgtctatacttaaattatctatcatttcaaataaaataggtgcttcatcttttaaaatattaattttttcttctgacttttcagttgctttagttgctttatctaattcatttttagcattagagactttatttctaaagttttttgccctttcccattcatcttctccattttttgctaatgctgcttttttccattcttttcttgatgcatcagcggaaatacccaaaaattcagcataaccgtgaagactttttttccatctattataattttcctctgcatcttttcttcttacttcatcaccattttttactctcattccatcaggatcaataaaaaatatagggttatttaaagtatatacgtattgagatacaggatgatatttttcagccaaagggtcaatgttcatccatctacctagagcagggtcataattcctagcaccgtaatcgtacaagttcaatccaagctcggtttgcagttcttttccgttgtatttatacttataaggagattctactgtaggagtttctccttttaaaactactcctccgcttgttcccttttgatacaacaatttatcactattgtaattcgtatgttttaatccaaaagcataataatgattttcttctagaatttttatactttgcgtatctgggtctacaccataacttaagcgtatatttcctaaatggtcggtataattaaaaacatagttgtaactatttaccccatgattatcgactacatttacataaccttctgcgtgtgggaagaattgcagcatgcttcctttgtattgaaaaccacttaaatattctgttttggtaattacgctattctcactcactgtttttactactttttgtccaaccgcattgtaaagatattcaattttagtatttcttagaaaaaaaccactcctttatagagtggtctttttttatctactttgtgggcacggattgcaaatccgcgctatcggggtttgctagtatacgtacgtacaggtctgtaatattcatcgtataaagtatagctagtttctcctgcattaggattattcaaatccaacacttttgtacaagaacctgttagtaagccttttacattagcagccaagtcttgtccttcctcccgatagcgcggatttacttcgtcaattcggctaaagcctcgggtgcaatccatgcctaattaaaaacgtattgtaatccagaaaggaaaagagtatttttacaatgaaaaacaaccaataaaaagacaactcaaaaaacttagctcccacaccatttgctcaaacctattttcacggtacaaaagcaaatctacaactcggagaccttattgaaccaggttatcattccaactttggtcaaatgaaaaaagcaaactatatttttcttgccgcaacattagacgctgccatttggggcgctgaacttgctatggatgacggccgtgaaagaatttatttagtggaaccaaccggtgcaattgaaaatgatcctgatttgaccgacagaaaatttcctggcaacccaacaatgtcttatcgttctacagaaccgtttagagttgttggagaaataaccgtttggcaaggtcattctaaagaacaagtgcaactcatgaaagatgcattgaataaattggaagagaaaggtgtgaattcgcttaatgatgaatgaacttaaaaaaaacttacttataatcttaattaaaaaaccactctttttacaagagtggtttttatttctatctactttgtgggcttggaaaatatttccgaaataatggggggagtatcatcttatttctaatttatcatctaagtttaagtataagaaatgttttttatcaactccgtttttattaattaaatataatttttttcttttaatcagatatttatcaacattttcaaaatcggattcttttactttcggtcttaataaagtatcattttttatattgaatatgtcagatgttaaaattaaggtatcttttattcttttccaatccccttttatttcattctggttataacgaaaaaaatattgaaatgaattatcgtcatttaaattcaatattgtagagggtttaccatacaacatgtaatttgacttgtatgaattctgcagactagttttacagctgattagtaaaaaagtcattatacaaaaaacaattttactaattatttttttttc

SEQ ID NO: 3115 - DNA, 24368 bp, synthetic construct
  misc_feature 1..24368: note = Synthetic
  source 1..24368: mol_type = other DNA
gcaaagtgcaaaaccacttttacgcagagcgatattaaaaaggaactccggaaacatgatgtagcgctcattggcggcggaatagacgaagcaccaatggcttataaagacatcatgaaagtgatggacaaccagcaggaactggtaacggttttgggcacattcacgcctaaaattgttagaatggaccgataacagaactggtctgatttccgaatcagaccggttttaaaaccgaaaaacatgaaacgatttcaagacgaaaataagagaagctataatttcacagaagctatagctgttaaatgtcccaaatgccataaacaggcaagcgttacaaaaaaacctgacgggaaaaaaggttacggctacactaaaattttagcatgcaggcactgccacttttcacagcagggcggcatgattaaatataaggccgttgtggatcagtattgctgtaacaatagcgaaaaggttaactatgaatcgcagcttttaaatgaaaaaccggaaacggtacgcttaaaatgcggcagctgcaatgagataaaagcctttaaacccaaaatagtggaagtgtatatgcaatttgtgaccgatgaaaataattacagggaatgctgctttaatacggaattatggtttcagaccgctgtgaagggaaatatattctgggcgtataacgaagcgcatatcggatatatggaacgttatattgctgctgatttaagagaaagaaacagccagtataacggtggtaaaacaatggtggccagtctgccgggatttattaaagacgcaaaaaacagagagaagcttttaaaagcgatacaacaatggaaaggatcatacagataacttccggaagaggtccggaagaatgttcctgggtggccgcccaggtacttaaaaaagtactggaagaggcaaaagaaaaggggatggaagccagagtgctgcaacgggaatccggacaggaaaacgggacggtcaatacggccacagtgcttgtagaaggatccggaagtgctgaatttgcagattcatggattggaacgattcaatggatcgggcagagccagttccggaaaatgcacaaaagaaagaattggtttatcggaatttttgaagtacggcaatccgcgaaagcgcagatttcgtatacagatattaagtaccaggccatgcgaagctccggagccggagggcagcatgtgaacaaagtgagctcggccgttcgtgccgttcatgttcctacgggcattgcggcagtggcaatggaaagccgttcgcagcatcagaataaaaaaacagcgaccgaacgcttaatccaaaaactggaagcggcaactctggaacagctaaaagaagaagtgaaccaacaatgggaaaaccagctccaaattgaaagaggaaatcccaaacgggtgtttagcggaaccgattttaaaaaacaaaaaacggataaaagctataaagccacccggcaacaattaaaaaataatttgcaaaactatatcgaatgaaaacagataaattagataagtttttgtttcaggctatggatgcctatccttcttatctggaagaaacagtagaatcattaggctatgccttgtcatacgacgaaaagaatacaatggcattgtgccttttcggccgactgcatgcagagcagttatatgattatgaaagcgcaaaaatgtactttgaacaggcgctgtcagaaaatattaacgcactggaggtctatccgtattttattgatacgcttctgatcaatgaagattacgggcaggccgggaaactaattgatttcgccttaacaattaaaggctgtaataaagcggaaattctgttaaagaaagtaatgtttctggaaagaaaaagagacttcaagcaagccaaagcggttttgaaagaagtaaagctgcattcgtataattccgatttacattattttatttccgatacggaaaagcgtatcaaagagaaaatggaattaaccggtttaaaaaaggataaagagaaagccaaaggcaagaaaaaagcgaaatcgaaaaagaagaataagtaatcgttaaaaagtgaaaggcatcccataaaccgggatgccttttttattgggagctgtaacaaagcttttattttagcgtactgttgatcgtgatattcacatttttagaaacttttttactcacaatgctgggaatgtcaattccgaaatcgtctacattcacattaaatgcggcattgataacgatgtcttcaccgctcttctgtatcttggcgggtatgataacatcctttgtttttccgtgtaattccagttttcccctgatggcaaagtctttcgcagattccgatagggcgctcagcttgaaattatcgattttccctttaaaagtggctttgggataacggtcgctttcaatgtaattttcattgaaatgttcttccatcagtgcaatcttgaaacgaaagctttttaccagaataaggctggcaatttcgccggtgtccgtattcaatacaaaagtggcgttgcggctgttcgcttttacttcttcaaaggcaggaacagaggcttcaaaagttatttccccggttttggtcacttttttagattgtgcggataaagaaccaaaagagaggaatagtgcgaaaacaaatagtgctcttttcatgatttagggtgttttactgttctacaagaccggtattattccattctataattttattaatcgaagtttgcggcagccgggttccgccattcggcatcattcccggtgctccctgcgcccgtgtgatcctgtcgatcaaccctctgttcagtacggcatttttaacatcggcataggtggttaacgacattggagcgccatttgacggcacggttccatggcaggaaatacaattattgtcaataatacttttaacgctattggcgtaggttacaggaccggtattggtatcggttcccacaagattggagtcggtttcattggtacagccggctaacaatacaaatagaaatgagataaaaagtatttttgtgaatttcattgttattgcaattatttagttaaagttatgattaaaaatttaaattatagaaaataatattgttaattttgtgatattaaaataattattatgagaaaaggtaaaataataataatcctcgttattctggcacttttgggctttggtgcttattcatatttgtatcagggacatcgtgatattgcctctgaaaagcaaagctatctggttacggcaaattctatttttgaagaatttaaaaccaacgaaaccaaagccaatgaaaaatatctggacaaggctatagaagtatacgggaaagtaacgggtatggatttggaaaccaattctgttattattgatgaaaagctttttattgtttttaaggataaaattaaagaaggtgaaatgatgctgttatccaatgtaaatgtgaaagggagatttatcggctatgatgacctgctgggtgaattgaaaatggatgaaggttctgttgtaaaataaaatacagaccattgccgtccgaaacaccaaaatcatcgtatagataagtataaccattatacccaaaaaagtaattatatgaaaaaaaccttactcaccttatgcttattgcctttctgctcctttgcgcaagatgatttactttctcagattgataccgtaaaaacggataataaagtcgaagctgtttttaaatctttgaaaattgttaatctggaatctacaaaattagcctcgaaaggcgacttttattttatagtggcgcaccgtttttcgtatgttaaaaacgggttttccgacttttttggaatggacgatgcaaacacccagattaagtttgtatacggaatcaataactggctaacggcacatgtgtccagaagcggttttgaaaaaacctatgaaatggcgctgaaatacagactgatgtcgcaggaaaaaaatggcttcccggtaactctggttgggtttaacagcctggcgatcaattcggaattaaagaaagacgattttccgaatctgaaatttgagaaccgactcagttatgtgacccagttattagtgtcccgaaagtttacggaaagattatcgctggaactggcaccctcctattttcatcaaaataccctgcgggattttctggatgccgataataatgtggtattgcccaatccgcagtccaacgatcagtttgcattgggaatgggaggacgatacaagctcaccaaacgctggtccattaatatggattatgcggcacacctgaaccgtgccaaacattctatctacaccaatccgttgtcaataggggtcgatcttgaaaccggagggcatgttttccagatgcactttaccaattcgagagcgatgcatgaggcaggattcctgggagcaaccaccgggaactggtccaaaggagaaatcgcattcggctttaatttagtccgcgtgttttaataaaaaaagtcccgaatcttcgggacttttttatgattaattcttgatgaattttgttgagtatttctgaccgttggcgctttctatattcaggatataggttcctttggaaagtgtacggatgtcaatctgttccgactggatcgctgctttcagtactaaacgaccggttgtgtcatagaaaagtgcttttttcgcactgctgtcaaggttgttaaaatgtactttaacaaagtcctgtgccgggttcggataaatcataaatgtatccagggcaacttcaggattgttaagtgctgtaccttcaaccaccataaggctttgatttacggctggattgttaataacatctaccgttccggaaggccatttaacgattacctggtaaatttcggtagctgttcccagaccaaaatgaacatttaaagagctcatgtttctaaaaccatcgccacttcttacatctctgatttgtttgccccacggaccgaatatttcaattcttgccccgataccgttaatgttgctctgcacacctttcagtaatatttttagccatttgttgctgttgccgttattcatataaacgttgtcgttgttctggatatccaggaagccatcgttgtttaaatcgcctataggaccgtttgtaacaccaataggctgtggtgtaaaggtcatgttgccgttattgatcatgatgatgtttcctgctccgaatacatccacaaaaccgtcgttgttaaaatcatgggcaacattttcctgtcctaagttggtcagttgcgggtatccggaaccggctgtaacatcggtaaaagttccgtcgccgttgttgcgcattaatttgtgcattccgtttgcattcgagcttgctccgactaaaacatccatatcaccgtcattgtcaaaatcggcccatgctgacgaccaggtctggatagggtcggcaagaccggcctgaacgctcacattggtaaaaacaccattaccatcgttacggtgcagttcattgatgtttgcagtagtgttcccgcctcggcatttggctataaacaaatccggatctccgtcgttgtcataatccacccagatagagccataatttccgccttcgggatgatctcccataccgccctgatggaacgtaaagttattattaccgtcgttcaggaaataaacattaggatcgacatcatggcatacaaaggcatccaggttaccatcattattaatgtccacaaagttggttcgctggcagaagatataattaggataggaggtagcggtataagctgttccgttgctgttggctttcataaaggttgccccgctgccgcctccgtagatcaaatcgttatatccgtttttgtcgtaatctgctgcggcaatactccaggaaggtacgttgttaaccatcgttgtcggataggtgacggtggtaaacccaccggtagcattctggtataaaattttaatctgggaaccgctcacgccaacaatgtcgtccaggtagtccccattcatatccaccacacagttcttataggaagaaccggcaagcgaagcggaaaccggagagaaactaacaagcgttggcggtggaactaccggtgcctgttcggtgattttaaagtcaaatcccacaggactccagcggttatcaaaagcaatataataggtagtgcccggagtaccgttaatcgtagcgatggataaatatccggtaccgctatcgtcatcaccgcccacgcattccagggaaccgcaaagtcctttgtaaatgtgtacacgggtatctttaccggtatttacggcaagatcggtagatacggtaatgctgttgtttgtggtcgcgttgtatttgtaccatttaccggaagtagcagtattgctgtttggggggcaaataggggatggtgcttccgatccgtcaatagcattaacggtgtaggtgccgatgcttaccagttgcgccgtctgacagttgctttgggaaaaggcactgacggcacacgttaaaaatagtaaaagtgtaatttttttcatgttgttttgttttttggtaggtggttactaaatcatggacagttgggatttaaagagtttatccattgctctatcatttgtacaccttcttcgtgtacaattgttcttccgagaagcggcattctgtttgcttcgtctgtagaattcattctgaaatgtaacatggaacgttggaaacttcctctggttacaatatgggtaagcgaattgtcgatatattcctgaggggaaacacaaatacccagatttacgggattaccggtttcgctgaatgcaaagcgcatcgggcggtaatcgcaatggctgttttcggcatgacaatgcgcgcagttaatatcaatataggagcgtactctcagttccaaaggtttggaagtatcctgccagtttaccgtactggcaatattggatgggtatccggattgcagcataccgttttccatccatttggtgagctggtttttggcgccgtccgtatagttgtaggtaatattcaggttttgtggtttcggaccaatcggaattgctttttcattctttttatgacaggtcaggcattccgttgcggaaggtattctgtagttggtcgattttgttacattgttttctttccaggtgagtggtttatagctgccgttcatatccagtgttgcttccgtctggttttcattccagatataattggcaaagatccagatgtcattgccgctgccgtcaactccttttttaaccatcaaacgggtttcgataatccgggtgtcattggacggctgtacattgtcgtagtaaaaagttttaaccagtgctgttcccaccggaaatttaaggactttaccgtcgccgtcataaacggctttggtgccttcgggcatccatacaaaacgttttttatgggcataatcggtaaacagcccgctggcaatttcataaggcagcacccgggcattgggtgtgttattttttaaaataccggtaaagaaatggtagtccgataatttttgatagggaatctgattgagatccagggagaccggagtagtggttggagtgggcgtaatcgtttcatattcgtcactgtcggactgacaggagaataaggtgaaaacccccagaaatgcaataattgtaagggataagtagcttttcttcatatacttgttattcaaatgtttatgtttttgtataacaaatatatagtatttgtggatttgtttttaaattaacaattattttaaacaatattaattaatttgtttaaaaaagttatatatctaactgtactccgtaatttgataatccttccaatgcttctttagtggtatggtcaaagcggtttaaatggtcattatgttctttcctgatattgttgcggcgtatggaatcataaaaacggcgcacttcatccaggctggtcagtatcggtttcggagcggttacatttttaccggtatcatctttggcaaccatcgtaaaataagaagaattgcaatgtttgacctttccggtctgaatgttttgggaaaccacacggataccgacaaccatcgaacttctgcccacatagttcacacaggctttcagggtaaccaattccccgacttctataggattcaggaagtccaccgtatctacagacgcggttacacagtaacggccggaatatttggaagcacaggcaaaagcaatctgatccattagggaaagaatatagccaccgtgaatttttccgctgaaattggaatgggaagggagcatcaattctgagatagtgattctcgaagaatttatttttttgtagtcggtttccatagtgttattcgttttgttcgtgattagtattcgctctgttcaggatattttcgggcagcgattttttcgccttggcgcccattttctttaatttttccacactgctgatgaggttgcctttaccgtctgtaagcttattcatagcgccctgatattccgttttggcttcgtccatttttttgccgattttaaccagatcggttacaaaaccatcgaatttatcgtataaggcgccggcctgacgggcaatctcataggcgttctcctgctgtttttggtttgtccacatactgtcgatagtgcgcagggtggccagtaaagtagagggtgttacgattacaatattcttttcgaaagctttattgtaaagtgtgttgtcctcgttaagcgctattgcaaaagccggttccatcgggataaaaagcaatacgaaatccgggctttccatctggtacagatcgtggtaatttttgctgcccaattgttctacgtggcgtctgattgaatgcaggtgttctttcaggtgggctgtttttgccggttcgtcttcttcatttacaaaacgctcgtaggcggttagcgatacttttgaatccaccaccattttttttccatccggtaaattgatgactacatccggttgtacgcggctgccgtctgccgttacaaaactttgctgtacttcatattcacgtcctttttcaagacccgatttttccagtactttttccagaatcaattcgccccagttcccctgcattttgctgtcgccttttaatgcttttgtcaggttgagcgtttctttgctcatctgttcgttcatttcccgtaatcctaaaatctgctggcgtaaagctgcatggtaatcaatgctttccttatgggtgtcttctacctttttttcaaacaaatgaattttttcctgtaaaggagacagtatgtttttcaggttttctttattctgttcggtaaacttagccgatttttcttccaggattttgttggcaagattttcgaattctttcgcaaacttttcctgcagctggttaacctcttctttttgttctttattgcgttcccagagattgtcaaaatccacttcttttttagagagttgtatggctaaggcatctttttccgtacggatctgttctttctccatattcgactgggcgagctgcctgtcaaactggttgcgctcctgcaggaattgctgtttgagctgttccgcctgagccagtaagccattgatgcgttcgtcccgtccggattgctccgatttggaagcagcggcagccagtatttttcctatccatatcccgataagcagggcaatgataaatgcggcgggtagtattacgttttgtgacatcgtataattaaaatttgcgtgttatgtaaaaataggaatttgtttttattgaataataaaaaaaagaaagtcccaccgaagcaggactaaaggttttcacctacggcatatagccttattgtgataagattaaagattagaataattttttcacatttcaaatgtaataaaaaaatgcttgacttttattatggaaatccgtaaacaaacaatactaattttttagtagctttaaaattcttaaaattttagaatgtcatgacgaaaatattaggattagatttaggaacaaacagtatcggctgggcggttgtggataaggatggaaatgattttactttattggataaaggtgtcagaatattttctgaaggagtgaaatcagaaaaaggtgtagagagttcccgcgctgcagaacgcaccggttatagaagtgccagaaaaattaaataccgcaggaaattaagaaaatatgaaactcttaaagtgctttctgtaaacggaatgtgcccgttgactgttgaagaagtggatgaatggaaaaaatcagggtttaaaacatatccgcttaatccggaatttttaaaatggttgcgtaccaatgaagatgaaaatataaatccgtatgtttttagggataaggcaagtaagcaaaaagttcctttatatgaatttggaagagcgctgtatcatatagcgcaaagacgcggttttttgagtaatcgattggatcaatcggcagaagggataatggaagagcattgtccggttattcagacagcgattgaagatctgaatactatagatgaaatgaaaacggaattaaaagactatttttttaatacaggaatccttgatgaaagtataaaaggtggctttaaaaaagatttagatgaaggggaaactaaattaaaatcgctttacaatgccctaattggcattgtgaaaaagaatgaaaatgatattgctaaagcaaaagatgaagttattgcccgtttaaacaggaaagaggatttaggagctgttaagcgagtgattggggaaatctcccaagcaatgaaagatggcaactttgctactcttggacaatatttttttagtttatatagtaaagataagataagaaataaatatacggcgagagaagaacactatttaaaagaatttgaaatactgtgtaaaatacaaggaattgacgggattgatgaaaaagaacaattgccagaaaaaagatattttggattggctaaggaattatacaaagcgattttttttcaacgacctttaaaatctcaaaaaggattgattggaaaatgttcttttgaaaaaagtaagtcccgttgtgctatttctcatcctgattttgaggaatacagaatgtggacttatttgaataccattaagtacggaacacaatcagagaaaaccctgcgttttttatcacaggatgaaaaaatgagtttagtatctaaattttttagaaaaaaagacaatttcaattttgaagatttagctaaggaattaatcccgaaaggcactacattcggattttataaatcttctaataagaacgagtttcattattggttcaactacaaaccaacagatacggttacaggttgtccggtttcggcttccttgaaaaatgtaattggtgaaaactggaaaacaaagacttttacctatgaaacattaaattcaaaagccgagcgtgtgtcaaggactgtagattataaagatctatggcacttgctttcagtttcgacttctgaggtttatttgtatgaatatgccaaggacaaattaggtttagaagataaggcttctaaggcattcagcagaattcggctaaaaaaagattttgcaagtttgagtttaaatgcgattaataaaattttgccttatgtgaaagaaggtttgttatattctcatgcagtatttatggcgaatattgagaatattgtagataaggaaatctgggaggatatcactcaaagaaaatatattcaagataaaatcgctttaattattgagaatcatatctatgaaaatagcttgctcgaagtggtaaattcgttgataaaagattgtaaaacggacaattgttattattcaaaagaagcggaaacaacctataaggatgatttgaataaaaaacttataacgttctttaaatacaataaaatggaggacgccggtgaacagcaatcgcttttggataagctctttccaatctttattgaacaattgaaagcgtatgaatttataaagatcaagcgtctggatgaaaaagtttttgagtttttaaatggcgaaagcgaagatggacaagtattttgtatgaatgaaaaacgtttgaaaaaactataccatccgtctgatattgaagtttttaaaaagaaaattattaaagatgcatttggaaatgagaaaatagttctcggtagtccattaactacatccattaagaatcctatggcaatgcgcgcgctgcatcaattgcgaaaggtcttgaataccttgatttttgaggggcagattgatgaaaaaacaaaagttcatatcgaaatggcccgtgagttaaacgattcaaacaaacgaaaaggaattcaggattatcaaaacgagaataagaagaaaagggatgacgcaatcaaggacattaagaaactttattgggaagaatgtaaaaaagagattgaacccacggatgatgatttactgcgttatcagctctggctggaacaaaacaggtctgagatatatgaagaaggcaggaacatcagtatttgtgatataattggaaataatcccaaatatgatattgaacatactattccaagaagtatctcacaagataattctcagatgaataagacactttgcagtccaaaatttaacagaaatatcaaagggaataaaatgccggttgaattaagtaactatttagaaattctgcccagaatagcacattggaaaaaagaagcagaaaatttaagccgggaaattgaattaattacacgttccataaaaggagttgcaactaaagaagcaaaagataaaaaaataagaagaagacactttttaactttaaaaagagattatctgaaagggaaatacgagcgtttcatttgggaagagccgaaagtaggatttaagaacagtcaaattccggacaccggaatcatcaccaaatacgcccaggcatatttaaaatcgtatttcaaaagagtggaaagtgtaaaaggcggcatggttgctgagtttagaaaaatttggggagttcaggaaagttatcatgagaatgataaaaagtattttcttgaaaaagacaggagtaagcacacccaccacactatcgatgcgataacgatagcttgtatgactaaagaaaaatacgatgtgttggctactgcctggactttggaggataaggaacaaataaatgaagcccgaaagttattggctgattcaaaaccctggaaaacttttaaagaagatttaaaaaaactggaagaagaagttttagtgtcacatcacacaccggacaatgttaaaaaacaatctaaaaagattgttcggattagagggaaaaagcaatatgttgcagaaacagaaaaggatgctaatggtaaaacagttgtaaaaaaagatgttaaccaaaagatagtttataagttagacggaaaaggtaataaaataccaagattgcagcaaggagatactatccggggatcattacatcaggacagtatttatggtgctataagaaatccgttaaataatgaagaaatccgctatgtaattcgtaaagatttagaaagtattaaagcgactgatctggaaaatattgttgatgagacagtaaaagaaaaagtaaaaaaggctattgaaaataaggtactgttaatttcttcaaatgcacagcaaaaaaacaagcttaacggaacggtttggatgaatgaagaaaaagggattgtaataaagaaagtcagaatatatgctaattctgtaaaaaatcctttagagataaaagagcatagtccattgtcgaaatcgaaatataagcataaacaaaaagtttatggacaaaatgatgagaactattgtatggctatttatgaactggatgggaaacgagattttgaattaattaataattttaatttagcaaaattgataaaacaaggtcaaggttattatcctttatataaagaaaaagaaataaaaggaaaaaaagtacaaattccggttgctaaaagtaataacagagatgttattttgaaaaaagggcaacaagttgttttttatgacaaagaagtggaaaatcccaaagacattacagaaataattgattttaaagatagagcctatattattgaaggattgtcgattaatagagttaaatccggtaataacttttacgagtttggagttattcaactgaaatactttaaagaagcaagaaaagctgatgatataaaaaaagataattttaaaccagatggagattttaaattaacagaatataaaccaacaagaaaaatgagtccgggtcaatttacagcttttgttgaaggaattgattttaaagttttaacatctggtaagtataagaaaatatgattttttagattgtttaatataggtttttatgattttaaaatatcaaaatgataatgaaaactcatccattgattgtaagatggacaaagattagaaaacacgatatttacagcatagtacagtatgtcaaatttgttgttgtggtttgattaaagattagagaacacgatattatgctaggttaacccacaacaaaattcatgttgtggtttgattaaagattagaaagcacgatattgctttcagtaacttcattataattgatgtggttgtggtttgattaaagattagaaaacacgatattcttaaaactaaatggtgacctacagcttatgttgtggtttgattaaagattagaaaacacgatattaatcgtagagaatgggatatcaactacggcgttgtggtttgattaaagattagaaaacacgatattgccgagatttcaacacgactataatgattagttgtggtttgattaaagattagaaaacacgatattgttgaacatcttttttaacatcgactatagttgtggtttgattaaagattagaaaacacgatattcttattaaacaagtatatatggtcatacaagttgtggtttgattaaagattagaaaacacgatattgcgctaatacaactatatctaattcacatgttgtggtttgattaaagattagaaaacacgatattgtataataattaacagttcattacatcatggttgtggtttgattaaagattagaaaacacgatattaattgaaatggtaattaaagatgttttaggttgtggtttgattaaagattagaaaacacgatattaacgctgctttcattttgccaaaaatctttgttgtggtttgattaaagattagaaaacacgatattatctttattactaaagatcacggacacgggttgtggtttgattaaagattagaaaacacgatattagaagcagccagcaaagtgcaaggaattgcgttgtggtttgattaaagattagaaaacacgatattagatggttcgttaacatatatcttaaaatagttgtggtttgattaaagattagaaaacacgatattcctcgaaacacaatatgactataagataaggttgtggtttgattaaagattagaaaacacgatattagatggttcgttaacatatattctgaagtagttgtggtttgattaaagattagaaaacacgatattcaggtcagacgttaccagaccctgaattatgttgtggtttgattaaagattagaaaacacgatatttcaacctttcgtgcagaaaatgcgtgaaatgttgtggtttgattaaagattagaaaacacgatattcagtagtgttggattgtatatattcaaggggttgtggtttgattaaagattagaaaacacgatattcataggaagtaaaatactaggtaacgacatgttgtggtttgattaaagattagaaaacacgatattactagcatacttcgatgcgtataaaaactagttgtggtttgattaaagattagaaaacacgatattcaggggacggaaagataaaaacagtacgaagttgtggtttgattaaagattagaaaacacgatatttagcacaagctacagaaacaacaagtgtgagttgtggtttgattaaagattagaaaacacgatattcaccattatataatggtgtgacggttagtagttgtggtttgattaaagattagaaaacacgatattcgaacgagcaaaaaaagctaaaaaagaaggttgtggtttgattaaagattagaaaacacgatatttggtatatcaccagtagcattctcggaaggttgtggtttgattaaagattagaaaacacgatattttgccactctaaacctagacgctcgaatagttgtggtttgattaaagattagaaaacacgatattcggaatgccactgacagcaaaaatgctggagttgtggtttgattaaagattagaaaacacgatattagttgcgtttttagcttctgattattaagtgtttaaaagtaaatatcgtgataaaaaatgcttcttttttagagtgataagctaagcttgaagcatttttttatttctaaggttaaaacaattccagttgtgtgggttgcggcgctttggggacttctgctttaccccagaaattaatgatatttccaaactgtttgtcggtgatccttaaaacactcacttttcctaaaggcggcagcagcttataaatccgtttttcatgaacatcagcactttcactacttgcacaatgccgtatgtaaacagaatactgcatcatcgaaaaaccgtcctttaacaggctgtttcgaaaaccggaagcatttttccggtcttttctggtatcagttggtaaatcaaaaaatacaaacagccacattactcggtatccgttaagttccataacgaaggatatttgatctttttgcggcttcctgtaaaacattgctgcagtgaacttgccgttttttgcaaacccaccatcagcggacttttttcctctttaaaataaaccgttcgggttaacacctgcaggagttccgactttattagcgtatttaattcctcttcatcatattgctgtatgacttgataaaccagctcatctacagccgggcgaaaaggctccatgatatcatcggcaagtgcaaaagcattgtatttgcttttatgatgaatgcccaaagtgttcagcaggccgcttccggataaagccctggcagtagcggctcttaatatggcgtagccgtagttaaaaaagttattcggatattcgccaaaacgttcccttttaaaactgtgctcaaaaaaggacttccagtattgcgatgctgcgacaccttccatattgctggaatcgccgctgagtaccttaccggccaaaaacggaaacgtatttttttgcctggtgattttttccagaagtaatccctgattcttaattttctcgacaacggtttgctgccataattgcttttttagcggtaaagaagcctcaatctggtttcggaatatttcctgttggatatgatggctgttaagattcagaaacatcccgttgggcagatgacttttgccgcaaacaataatcgcagtattattttcgataagcaggttcatggcaggaatgcttaaataaacctcgggattatcaataacaagaaaaccgatatcttcaacaggaataaaactttcccggatctcggattgtaaaaccagctggagattttttgtagtaatacgggttttgttttctacaagaacggtacgtttaatcatagctttaattttttaaggtgcaataccttataaaaagagctaaaaaaaacgaaaaagcattacggaaaaccgtaccctgtttgttgggcaatgtattaaaccgattaccgttctttcttcagcaaagcaatcagttcatctttttcctgcagccgtttttcatactgctcgatcagttttttataaacgtcattcaaggctttaatactatccaggataatctccttatcttttctttttttaggatcggttccgtttttctgtttggctaaaaagcttttgggtttcacttcaaaaatcaaactcaactgttcgatatgggaagcccacgactgactttcaccattttcaatacgggcataggcagattgcgatatactgagtttttcggctacttcttcctgcgaaaagccttttaattttctcatatggcgaattttttccccgactgttctgttcatgtatactgttgttttctgcttctaaaaataaaaaaaataaaggttatcttataaaaaaagggtagaattacccttaaatcgcataagagagtgctttttaagtcgttaaatttggaattattaaggcttatttcagaaaaggaaacacaaattagaacaataataattattcaaaatgtaccattatgaagaaacttaatcttaagaaaaaaattgtttccgtattaacggataaagaaaaagcaaccatccagggtggtggaacaaacgtaacctgtgccagctttgcaacagaaataagatggaccgaagacccttgtgtagtaccgccgccgccaacaaaaagatgtccgaatgacgggatcacaccgccaaccagcgatccgatattcgtgccttaaaactaccgtaaccaatcaaactattatacaatgaaacgattaaacctaaaaaagaaagtggtttccgtattaacggataaagaaaaagcaaacattcagggtggaggaacaaacgaaacctgtgcgagctttgcaacagagataagatggacagaacagccttgtggtgtacctgttaccagattagagtgcccaagtattaaagtggcttgtgtaacacatttagtgtgccctacaactactcttgaagagatgtagtaaacagacaaaataaaatagcagtaatgtattttactataatcttttaaagatcgcagtacaggtgttgaaccaaaagagaagattgttctcttctgtccaaaccggttaaaaatacaattacttcataatgaacgctattttaaaccgttgaagagttgctgttcttcaacggttttgtatttaaataaataatctcacaacaccactatggaactggaaggctataaagaactaaaagaaattaccgactacttacaaaatccggaacaggtttttaaagaagaaaaagccgccaatattgcattgcattccggtttgtcaggtgttatcataacattggtaaacatccgtaaaaaattcccggaactggttgatccggatatcattcggcaatatatcgccaaaacctacgatatcctttccgaaagtgaagccttctatccgtcattttgcggtggtcttgccggatatgcctatctgctgcacctgctcaaagaagaacagatcctggaaggcgactacagtgaggtactcgctgaaattgatgaaatccttgacgaacattttgaaataaacctcgaagaagaagatatcgacatccttcacggtgcgatgggacttggcttgtattttatagaaacgggcaaaaaacaacaggttgaagcattgatcgacagacttgcggggatagcccaaagagaaggcgatcagtgttattggaaaacattcgatcactataaaacccggaaatacaaaattgatttcggactggcacacggcaacgccggagtacaatattttctgggaaaatgcatttaccacaacattaaagccgatgcctgtaaagagctgctcgaagccagccttaatttttacaaaaacaacatccaggaccacaatgcgatacaatcgtattttccggtacacataccggaagaaaactatctcgataaaacctacgcgcccgaaacatcccgaatggcctggtgttacggcgatttaggcatcttatatacccaattgtttgcagccgatattatggaaatgccggatttaaaattggaaataatcggacaattgaagcaaacagcccaacgaagaaccaaagaaaacacaatgcacaacgatgccggattttgccatggcaccagcggactgtccattatgtttcaaaacatataccagctgacgaaagaacctgaatttctggaaacagcccaatactggctgcaacaaacgcatgcttataaaaacagcacggcaacctatgatgtggttgcctacagactatttgaaggaagccggaaaaatgagattgatgttacactgctggaaggaatttccggtgtggcagcggcctatctggccaatcttagaaccggaggaacaaccttattggacaaaacactattcttaaggtattaagcgataacaccattatgaaaaagaagaacatacgctataacaggtttgataaatatgttttgagaacaccgttaatgccggtcaatttcctgatggaactcacccggcaggcagatactcctgacgaaacaatacagcagcagttccgggatccggtagtccgggaagccatcttcctggcatcgccggtactctataaggaaattgaaaaatggacggaaggaaaagtagaagaccctaaagaatgcaaaaaaataaagctttccttcctgaaatatttaacccggatggcattccgtccgacacctttcggactttttgccggttgtaaactgggaagtattacagaaaatacccgtattgaaaacagtgatttctctaaaaacaagcgtcatacaaggctggatatgaattttgtaggagctttaaaccaatcccttaccgcgaataagaatattcgggaacagctgcagtattatcccaattcgagcctttattttattgggaataacatccgttatgtggaatgtatctaccagaatacaaatcgttcgcatcatcttatcgaaatagaaacctccgattacctgaacgactgcctgcaactggccaaaaacggtgccgataaagcggcattggtaaagttgctggcaaaagaagacatcactgtggaggaagcagccggatttgtagatgacttaattgacaatcagatcctggttagtgaaatggaactttccgtttccggcgaagaattcatccggcagaccatcaaaacgttaaaaagactaaaggacacggaaaaccttattgccattctggaagaaacggcacaaaaaatagcggcactggatcattccattggaaatgatccgaaggaatatgaagcgctgctggcaatactgaaaaaatttgacattccgtttgatgaaaaatacatctttcaaaccgacatgattctcaataccagccataacacactgggagaagccactactgcacagcttcaaaaaggaattgcgctgttaaacagaatgacctcgcgcatgcccaatctgcagctgcaaaaatttatagacaaatttcaggaacgctatgaagaccgggaggtgccgcttgctttggcacttgataacgaactcggtatcggctatccggtaaacagctataaaggcaacctgaatccgttgttaaacaaaatatacattccttccggccagcagaccaaccggcagcgggaaatgaaatggtcggcagtagacagtattctttttggtaaaatgagaacggctcaagccaataaagaatataccattcagctacaggatgaagattttagcagctttgagccaatatgggacgatttaccggatacgatttcgtccatgacagaaattgtaaccagtggtgacgaacagaaaattgtcattaaaacggttggtggttccggtgcggccaatttgttcggcaggttctgtctgggcgatcaggagcttcatgaatatgccaaaacaatcatcgaaaaagaagaggcgctaaacagcgataaattactgcccgaaatcatacaccttccggaaaacagagtagggaatgtgctgatgcgccctgccttccggaaatttgaaataccgtatctggcttcttccggaaaaacggcagaccatcagctcccgattgaagatctggttgtttccataagggataacactgttgtactccgttcgctgaaacacaataaagaaatcattccccgtttaaccaacgcccataattactcccataacgccttgcctatttatcactttttgtgtgatttacaggcgcagggaaaaagaggcggtttgtactttacctggggaggactgcgtgatgaatatccttttctgccaagggtcgaatatgaaaacatcatcctttccagagccaaatggaaaataacccataaagaagtggaaaaactgttagccatcgatgcggtatcggagatcggtaccattaccgaatggcgcaatgaaaggaatattccgcaatatgccattttggtggaaggcgacaacaagctgctgatcaattttgaaaacctgacctcttttcagatgcttgccacggcagtagcgaaaagaaacgtttttgaaatagaagaattcctgttttttgaagatgccgtgaccagaggcagtaaagaggactattttgcaaacgaggtggtcttttcattttataaagaattaaattaaaagaagtgaatatggatacgactataaaacaatcatttcttattggtgacgaatggctgtactataaaatatataccggcttttccacgaccgacactattctgacccatcatcttcatgcggtcattaccggtttgcaggaggaaggaatactcgataaatggttttttatccgctataccgatccggaccatcacattcggctgcgggtgcatttggtcaatacggaacagctgggaaaagtaatgcttgcctttcaggaatgcctgcgcaatttatgggaacagaacagcatctggaaactgcagacggatacctacagcagggagatgaaacgttacggagctacgctgataacggaagccgaaacaattttttttcacgacagccattgtatcacggccgttttaactgttttggaagaaccggaaagtgaaaataccaggtggattttcggaatggcttccattgatacttttttagatactttcggttatccgatccatgaaaaacgggcagtaatggaaagcctgagagaaggtttttttaaagagtttaaagtggatacgcctactaaaaaaggcttgagcgccaaatacagggaacacaaaaatgagattgctgcttttatgaaaaccgaaaccggcgcactaaaacagctgttaacggaaaggaatacccgattagcagaaccggtagtagccattcgggaaaaaatacaccacagcggtaaaacgctgaatgatttgctgggcagttatatccacatgaacatgaaccgtttgttcccgtccaataaccgccaatgtgaaatgatcatctatgacctgctttgcagctactataccactgaaatggcaattgccaaaaaacagcagctccaaaaggaagcggctgcaccggtatagcattcctccggattgcagtaaccggcaccagccaaaaaagtgtatttttgccgcaaattaattgttatgcagcaccgccactttctgatccacaaaccgcatggttatttaagtcagtttatttatgaaaagaaaagacataaaaaactactgggggaactttatgattttccggaaggaaccatggctatcggaaggctggatgaagattcggaaggattgcttttgctcactaccgatggtatgatgagtgaaattgtgcgcagtaaaaccgtggaaaaagaatactacgcccaggtggacggtgtgattacggcggaagctattgcccggttgcaaaccggcgttgaaataggctttaaaggcatccgctacacgacaaaacactgtgaagccggcattctaaatgaattacccgattatataggtgaaggaagacgaatccgggatgaacgccatggccctacaagctggctatccattaccttaaccgaaggcaaattccggcaggtgcgcaaaatgacagcagctgtaggatttcccaccctgcggttggtccgcgttagggtaggaactatatctttgcaaaatcttaaagccggtgcggtgcgggaagtagaacacttttcgctacccggggcattataaaataccgttatgttaaatattgttttagtagaacctgaaatcccgaacaatacgggcaatataggtcgtttgtgtgtgggcaccggaagccggctgcatttaatccatccgttcggatttgaaattaccgataagaacctcaaacgttccggattggattactgggtacatcttgactggttcgaataccagtcggttgacgaatggaaagcggctgttcccgatttatcccgcgtttttctgtttagttcccatagcactgtttcgtatctggatgccgaatttcaggatggtgactggctggttttcggaaaagagagcgtagg

SEQ ID NO: 3116 - DNA, 24368 bp, synthetic construct
  source 1..24368: mol_type = other DNA
  misc_feature 1..24368: note = Synthetic
caatcaaaatggccatattcgctacagtagcaatattaattggtggaatcattcaaatcgttccaaccattatggtaaaatcaaatattccaacaattgcaagtgtaaaaccatattctcctttagagttagaagggcgtgatttatacattcgtgaaggttgtgttggttgtcactctcaatcggttcgtccttttagaagtgaagtagagcgttatggaccacaatctaaagcaggggagtttgtttacgaccatccatttttgtggggttctaaacgtactggtcccgatttgttgagagttggtggaaaatacaatgacaattggcattttaatcacttttggagtccacaaagtatttctgctggttctattatgccaagctataaatggttatttgacaataaagcgatggatatttcattgaccgaaaagaaaatgaaagcgatggtaactctgggggttccttattctgatgctcaggttgcaagcggattgaaagatttaagaacacaagctattgcaattgaagaaagtcttaaaaatgatcctgattttgtaaaaagttatgaggatagcaagaaaaaagctctggctaaaggtgaaaaattcgttccaatgaatgaaagagaaattgtagcaatgattgcttacatacaaagactaggtactgatattaaagttaaagaataacaaaaaagtaaacgttatgttcgaacaaataaaacacaatatggagaccattgcaggtgtagcaatttttccaatagtatcgttgctgattttctttttcttttttcttggcttaggactttgggtttattcctataaaaaagagacgatagacgaaataagtcaaatcccattagaagattaaattgtacaatttcaaaaaatataaataatgaaaaaattaattccaccttatataagagttcttttcatatttttctcagtcttaggattgatggaatattttatagactctggagatcgtcctgcttttataaagtatccaatggttgcagtctttttatttgtattgcttttccttttgattgcaatcgaaataacattgaatgctgttaacacaattacttatagattgttaacagacgaagagaaagcaaaactagctcatgaagatagtttaagtttgaaagataaaatttggtacaaaaacttaatgcaacgtttgacaagaacagtgccaattgaagacgaaaaacaattattgatggatcatgattatgatggaatcaaggaattggataacaatttgccaccatggtgggtctatttattttatgcctgtattatttttgcagtgatatatctggttcgttttgaaatcatgggtgcgccagaccaagaagctgaattgaaaagtgaaatggctcaagccaaaattgaagttgctgaatatatgaaaacagctcccgatttgatggacgaaaaaacagtaactttattgacagatcccgcagatttagatgcaggaaaagctatatttactacgaactgtgtagcttgtcatagagctgatgcaggaggacaaattgggcctaacttaaccgatgatcattggatattgggtggtggaattaaaaacttatttcatacaattactaatggtggtcgagatggtaagggaatgattgcttggaaaggaactttaaaaccgaaggaaattcaggcggttgcaagttatgttatctctttaagaggaagtaatcctaaagatccgaaagcaccagacggagaaatttgggttgatgagaatgctccagcaagtgctgctgctcctgctgcagatagtactcaagtaaaataataatttaacgatatattagaatgaagagctttgtcaaaaatcaatacttttgagaaagctcttttttagtattttaaaaatagaaaaatgtcaagtaatctagacgaatctttcagagataccattgggactattgataaggagggtcatagaaaatatatttatcccaaaaagccttccggtaagttttacgaatatagaaaatgggtcagctattttttattgattattctcgttgctaatccttttataaaaataaacggtaatcaatttatgatgttcaatgttttggaacgtcgttttaatatttttagctttcctttttggccacaggacttctatatttttgttctgtttatggttattggagttgtatttgttattttatttacggttatttttgggcgcatattttgtggctggatttgtccgcaaaccatttttatggaaatggtttttcgtcgtatagaatattggatagaaggggataggggagcacaaatccgcctagagaaacaagaatggaatggagagaaaattagaaagaaagctttaaaatggtttgcgtttctagtgatttcgtttctaattgccaatgtgtttttagcttatcttatcggtagcgatgaattatttcgtttaattgaagacggacctttagcccattcgagcagttttgtgtcactgttgatttttaccagtgttttctattttgtttttgcttggtttagagagcaagtttgtattattgcttgtccttacggaagattgcaaggagttttattggacaaaaaatcaataaatgttgcttatgattttgttcgtggtgagaaagaagttggtagagccaaattcaataaacaggaagacagggcagcttcgggaaaaggtgattgtatagattgtaaacaatgtgtacatgtttgtccaacgggtattgatattcgtaatggagttcagctcgaatgtgtaaattgtaccgcttgtattgatgaatgcgatacaataatggaaggtgttgggttgcctaaaggacttattcgatacgcttcggaagatgaaattgaaaccaaagcgaaatttaagttcaccgctagaatgaaaggttacacagcaatattggttattttagttggtgtacttacaggtttgctgtttttaagaaccgaagtcgaagccaccattttgagattaccaggtcaattgtttcaacataaaggggataatattagtaacatatatacttttaagattatcaataagacgaatcatgatattaaggatatgaattttaaattggttggaattaaaggtactttaaaagtagttggtgttcaggaattacaagttccaaaacgaggaatgaccagcggaactatgtttatcgaaatcaataggtttttgttggaaagtgatagaactaaattggaaattgatctctatgagggaaataaaaaaattgagacaacatatactaattttttaagcccccgcagttttgattagctatagtacattttaaaaaaagtaatttaattagaagaaatctttaaaaagaataaaaatgaaaattaattggggaacttatattgtgattgctttcgctttgtttataagcttcattatgtattttgtggtaaaagtgcagtcagatagtaagtatgataatgatttggtggttgaagagtattataaacatgatgttcattttcaagatgaaatggcacgcatccaaaatgctcatgatttaaagtcgaagcctgtaattactgtcggtgctaatggtattacgattgtttttccggctgattttgcaccaaaatatatcaaaggaactgttgctttatataggccttccaataagaaatttgattttcaattgccactttcgtttactgattcagcctcattatttattgcaaaggataagctaattggtggtgaatgggatatcaatatggaatggaaatataaaggaaagtcttatttgaccaaacaagagatttatattaaatagaaaagaaatagagaagaaaaattagtttcaaatcatttcactctaaaatctgcaatctaaaatcacaatgttttacaccgcttttttatttggtttaatcagtagttttcactgcataggaatgtgcggtcctattgctatgatgttgcctgtagagcgaaataatccagccaaaaaagcaattcaagtcatcacttatcatttgggacggttaacggcttatgggagtataggtttgctttttggattgttgggaagaggtttgtttttggcaggaattcaacagcaactttctatttttattggggtggctatgattttggtgatcctgattcccgaaaagatttttgcccaatataatttttcgaaaccggtttacggttggatttcaaagattaagcaaagtctaggtagtcatttcaaaaacaaaagtttcaaatcgctttttattattggtttgctcaatgggtttttgccctgtgggatggtttatgtggctctatttggtgcaattgcaatgcaaagcgccggttttggagttttatatatgttgctttttggtttaggaaccgtgcctttgatgagtttggtggtatatattaattcgtttatcactgttcccattcgaaatagaattcaaaaaataattccttatgttgggattgtaataggtgtattatttattctaagagggcttgggcttgggattccttatgtttctccctcgaatatgagtttgtttgtacaagaaaaagccaattgtcattaattggcttttttttggtatctcataatattgaatgtttaaaaagttcctgtttttgcgtgagtgatggcagtggagctctttttttgattccttttttgaggaatcaaaaaaaagcgggaacgtacagcacgacccgcagtttttacggaggggcacgcccaaaagagctttaaaaaacaggtgaattaaattaatatgatattcttttaagatatccttagttttcttttaaatggtcattgaaaataatgctgtctctggcgcttttctttttaatcttaaatcgaaggccatacaaatgttgcgaacatatggttttccttcttcggtaataatgatcttgttgtcacctataatcaataagccatcgttttccatttcttttagctgaaatacaatttctgggatttcagaaacataatttgctgaatcctcccaactggtttcaaattggcacattagatttaaaatgtgtttcctgataattagatcttcagtagataataaatgccctctataaataggtaattcgtctgattctagtactttgtaatactcttctatggttttgacattttgggcaaagctgtaccagctgtcgcttatggaggaaacacctaaaccaatcatcaattgagttttggaggaactatagcccatgaagtttctgtgtaattttttgtcttcaaacgaatgatataaactgtccgattttaaggcaaaatgatccattccgatttcatagtattcattttcaaaaagcagttcttttccaacttcgtataattttcttttggcgtcgtctttaggaatatcttcatcatgaaatccacgttgtccattgccttttatccacggcacatgggcataactataaaatgccaaacgatctggttgtaaggagtttgtcttttcgatagtatccacgatatcttcaacttcttgaaaaggcaatccaaaaataatgtcatgacctattgaagtataaccaatttcttttgcccaaaaagtaaccttagcaacattgtgaaaaggctgtattctatgaatggctttttgtactttttcagaataatcctgtaccccaaaactcactcttctaaaacccaaatcatatagctttttcaaatgggcaagagtagtattattgggatgtccctcaaaactgaattcataaccttcagctttttcggcaagcgagaatattccgtttattaatttttcaaggctttctatggagaaaaatgttggtgttcctccgcccaagtggatttctttaatttttggttttttgcccaagatatcacggtaaagtgtccattcttttagaacggcatcaatataaggattttcaacattgtggtttttggtgatgcgtttgttgcaaccgcaaaaagtgcataagctttcgcaaaaaggcagatgaatgtataaactaatgccttcttcgtcattactttcctgaaatgatttttttagggtttgtatccaagtttcattagtaaatcctgactcatcccaatatggaaccgtaggataacttgtataacgtggcccaggaacattgtatttttgaataagtgaggtcttcataaatatgcattttatatgatgtcaaaattaaggtgacttttttaggattaaaatgatatttatcatattcgtttatagtcatatacaaacaaagaggttcattcgaacctctttgtggagttttttatagactttcattaattaaaccgacccatttttttgccagtttatggtcttcaaacaaacaattgaaatctaaaaaatgattttcgatattatagattggaatcatttctttcttcatggtgttcttatgaaccagttctatttcgactttttccattgtgcctaatctgcttctggtagtttccagtagagtacacagaataatgtttgttaaatccacaaaataaactgtttctttcttataactgaaatcaataaatagaaagcctttattcttctggtctatggacagaatttttttgttctgtgtttccgttaattcaaaattataacgattgttttggctgtattgtttctttatctcttttatttttgctctattatttatattggagcggaagactaaagttaacggaatacctattaaaattgtgattataagacctattatggttactgatgtgtccattttttattttttttgtaattatatataatgatttattttcttgattcagatgaaaacaagaaggatttaaaagttgttttaacttttataatacggaatcatgatattaaatcaccaaaaataatggaaggggaaaagtaaaatcgagatttttctacatcgatcgatgtcttgatctgataaaactattttaagattactttctttaaaacttgaaaataatggaagtgtcgtattggagtcgtctatattgactggaatacggttgttgtgttttaggtcaggattgtttctttctatactgggttggacgaaatgagaaatgcttaaactttctttactgaatgaagtgttgttatcctttctaaaagaaatggtagcatcgtgatttgcactataggcaaaactaaactgaatcagtaaccctgtaaatacgataaatttccaaaactttctcatattgcaaaaatagagaataggtttttgtttaaggagtgtattatggtaaatgaaagttaaaattaacccgttgggtgaaattaaaatgaataaaaaaaatgaaccacatagagacatagatttataattagtgccaaagaatagctagaaaatagtgccattttttctcatagattgctatgtgaaaagtaaaacgtctatcaaacgctttaaattattactattttctatgtttctatgttgttaaaacaatttcacccaacgggttaaaattatatattttataaaaaaagcctcaaacttattaaggtttgaggctttgtatctatttgtgaatttaaacttattcgatgtttaaatttctcaattgttttagtttttctttccaaacatctaagctttctttatggatagcaatgttttttcgaacttccaatacgattgaattttctttttttgcgttttttgtgttagtgaaaaactgaatgttattctctagttggaaaatttcattttgtacttcttcaattttacgcatcaagaaaatcttctcattatcgagttttctagtgtcattgctttcagataaatgatccattctgttagaaaaacgcatcatttcggtatcttttttgcttaagcttaatttttcaaataaagcatcaagaattttattgaatttaccttcgatatgtcttcttgggaaaggaactttaccgaagtttttccaagtttcaatatgcaatttgatagcatctaaatctgttttgtgatctcctgttaattggaattctctcaacgtttctaagtaggctttcttcttgtcaaaagcctctacttcgtcaacgttttcaacacttttgtgttcttttaatttgtcaaaatagtgattgcaagcttctctaaattcgttccagattttatcagagtattttcttggaacgtgaccaatttttttccactcctcctgaatttgtttcatgataggagtagtgctggcaaaatcaagactttcctgtagttctttggctttctttaccaaagcaatttttttgttcaggttgtcgttttggtcttttttgatgtctttgtaaaaagaatttttaaagctattgaaatttctaacggctgttttgaaagcggcccatgtagcttcgttaacatcagctggaacttttcctgctgagaaaaactcagaacgtaaagcttctactttttcgatttgggctagccattgcgaatgtgcattcactttttcggtagctaaaacttcaattttggcaataatttcttttttcttttctaagttttcaagctcggttcctcttaagttttcaaacaatacttcacgcttatcatgcattttttttgttagttcactaaattggttccaaatttcatcgcgatgttctcttgaaacaggacctatgtcttctttccaaattctgtgtaaatcttgaagttctctaaaagctttattgatgtcagcttctttaagtaattcttgaacacgtgcaatgatttttagcttttgctctagattgtatttgaaatcaatatcccttgcttctctgtctaagtgcaaataatcataaaaattttctacgtgaaaatgataattattccaaacgtgattgtatttatcttttggaattgcacctgcatttttccatctttctcttaattcattaaaatgatttaaagtgtctttgatgtttgcttgtggattgattaattcttttagttcttctacaatagccaatctaatttctaagttagttttcaaattagattgcaaactcttaaagtgtaagtttttattgtctttgtagattgtataatattgatcgaactttaattttagtggagaatggtattggaattcttcgttaggatcttgattttcctgattgaattcttcccttttttcttctatgaggtgattgtatttggctaaaaatgcttttcgaatttcttcaacatgctctttaattgacattactttttcatttgtaaccaaatttttcaattcacttacaagtgtttccatcggtaatgcatcataatcaagcattggaatatcatgacgttcttttagcgtttcatcttcactttcttcagcatttgtttcagctatggcgtctatcacgttttgcttttcgtctgtttcgttttcattcggaattactgtttcagaaacggggtttaccgtattttcttctgctgcagcatcactgatttcactttctgttactacagacgcttctgattgaattgtttcttgcaattcattggctgtttttccatctatctcagtttcttttagagataggttatcgttcttttcttctaacattttgtaaatgtataaggtttttattttttgagtgcgaaagatagtaaaggtgtgtcaaaattcaaaataaatcatttgtttatagttttgttttagcgaaaaatctttctttattgctgtaatttgaaatgtttctagtttattgacttgttttttgatttttttgctgaagtacttaaaatgaaaagtcccaccgaagcaggactaaagattttcatctacggcatatagccttattgtgataagattaaagattagaaattttaatcagtaacaaatgtaaataaaaagtaattaggttttgatgaggaaaaccgtaaagtgattaattatttttttcatagctttaaaaaatcttacaaaatacagattgaaatggcaaaaatattaggattagatttaggtacaaactcgattggttgggcgatagtggagaaagaggggatagaattttctcttattgataaaggagttcgaatattttcggaaggggtgaagtcagaaaaaggagttgaaagttcacgtgcagcagaacgcacaggctttagaagtgcaagaaaaataaaatttcgtagaaaattaagaaagtatgaaactctaaaagtactttctaaaaataatatgtgtccaatatctattgaagaagtggaagaatggagaaattcaggatttaaaaaatatccattgaatcctgaatttttgaaatggttacgaactgatgaggaagaaaatattaatccttatgtttttagggatagagccagtaaacaaaacgtctctttatttgaattgggtagagctttttatcatattgcacaaagaagaggttttttgagtaatcgattggatcaatctgctgaaggaatattagaggaacattgtcctcaaattatctcaataattgaagattgtaattctaatactgaaattcgaattgaattaaaagattatttttatgacaagggaattcttgatgaaacgaataaagggggtttcaaaaaagagttagacgaaggggaagccaaattgaaaactttatataatgctcttttaggtatagttaaaaacaatgaaaataagtttgttactgccaaagaagaaatcattgtaagattaaacagaaaagaagatttaggaaaggtaaaaggtaaaatcaaagacattacccaagctatgcttgacggaaatttcaaaacattaggtcaatatttttttagtttatacaataatggcaaaattagaaaccaatatacttcaagggaagagcattaccttgaagagttcaatataatttgcaagacacaaggaattggagaaatcatagacaatgaattattgcctgaaaaaaaatacaatggattagctaaagatttatacaaagccatatttttccaaagaccattaaaatcacagaaaggattaataggaaaatgttcgtttgaaaaaagcaaaactcgttgtgctatttcgcatcctgattttgaagaatatagaatgtggacttatttaaatacgataaaaattagaactcaatctgataagactttacgatttttatcacaagaagagaaacaaagtttaattccgaagtttttaagaaaaaaagataattttagttttgaagatttagccaaagaacttattccaaaaggagctacattcaatttctataaatcttcaaaagcaaatgaagttaattatttgtttaattacaaaccttatgatactgtaacagcaagcccagtttcggcatcattaaaaaatgtttttggagaagtttggaaaatcaaaaccatttcatacaaaactaaaaattcaaaaggaattgaagtaaatagaactgtagattataaagatttatggcatttgctgtccgtttctacttctgatatttacttatttcaatatgcaaaagaaaaattaggattggatgataaaaatgcaaaagcatttagtaaaattcgattgaaaaaagactttgcaagtttgagtttgaatgcaattaccaagattttgccttatgtaaaagaagggttattgtattctcacgctgtttttatggcaaatattgaaaaaattgttgatgagtctatttggaacgatagtaatcaaagaaaatttattcaagataaaattgctgaaataattgaaaatcacacttttgaaaacggaaaattagaagtaattaatagtttgataaaagagtataaatcaggagataaagaagaagggaaaaaaacgttttattctaaagaagcggaatcattgttcaggcaggatttagataaaaagttgactccttttattaaatttcataaaattgaatctgatagagaatcaattgtaaatgaactattccctgttttaattgagcaattaaaacagtatgaatatattaaaatcaatcgtttagacgaaaaagttttagactttataaaaggtaaaaatgatgatggcgaaatattctgtacaaatgaaaagcgaataaataagctttatcatccatctgatatagaggtatttaaaaagaaaatcattaaagatgaattcggaaatgaaaaagtggttttaggaagtcctttaacttcttcgattaaaaacctaatggcaatgcgtgctctgcatcaattaaggaaagttttaaatacattgatttttgaaggacaggttgatgaaaaaacgataattcatattgaaatggctcgtgaattaaacgatgccaataaacgaaaaggaattcaagattatcaaaatgaaaataagaagaatcgagaggaatatgccaaagagataaggaaattgtattttgaggaatgcaaaaaagagattgaaccaacagaagacgatttgttaaggtatcaactttggttagagcaaaataaacaagaaatttatgaagagggaagaaacataagtatttgtgatataataggaagtgatccaaaatatgattttgagcacacagttccaagaagccgctcgcaagataattctcaaatgaacaagactctttgtagtcaaaagttcaatagagagataaaaggaaataaaatgcctattgagttaaataattatcttgagatattaccaagaattgcacattggaaagaagaatcagataatttgactagagaaatcgaaataatttctcgctccataaaagcagcagctaccaaagagcttaaagataaaaaaataaggagaagacattatttaactttaaaaagggactatctaaaaggaaaatatgaccgttttatttgggaagaacccaaagttggtttcaaaaatagtcaaattccagatacaggaattattacaaagtattcccaagcctatttaaaatcatatttcaaaagagtagaatctgtaaaaggaggaatggttgctgagttcagaaaaatatggggaattcaagagagttttcaagaaaacgataaaaaatattttcacgaaaaagaccgaagcaaacacacacatcacaccatcgatgcaattacaattgcttgtatgaccaaagagaaatatgatactttagccaacgcttggacacacgaagacaaagggcaacttggcgaagcacgaaaactattagcagattcaaaaccttggaaaacttttaaagaagatttaataaagattgaagaagagattttagtttcacattacactcctgataatgttaaaaagcaatctaaaaagatagttagaattagagggaagaagcaatatgttgctgaaactgtcaaggatgtaaatggaaaggcaattgttcaaaaagatgccgatgataaaataattttcaggcttaataaggaaggaaagcgaattccaagattgcaacaaggagataccattcgaggttcattacaccaagacagtatttatggagccattaaaaatccgttaaatacagaagaaatccgttatgtaatccgtaaagatttagaaagtatcaaagcatctgatgttgagaatattgttgatgaaatggtaaaagagaaagtgaaagatgcgatatcaaataaggttttattaatttcatccaatgctcaacaaaaaaataaattagaaggtatagtttggatgaatcaagaaaaaggaattccaataaacaaagttagattgtatgctaattcagtaaagaatccgttaaaaattaaaacacatagtgaattgtcaaaatctagacatgaacataagcaaaaagtttatgggcagaatgatgagaattttgcaatggctatttatgaaggaattgataaaaaaggcaatgttaaaaggagttttgaatcggttaattatatggacgcaggagcttattataagttaagtaataaaaacaacaattctaacccattagttcctatgattcatttaaaaacgcaattaccattgaagtatgaaataaaaaaaggagatttagttttgttttacaaagaaaataaagaagagttaaatgaaataggcaatcaagatttaatgaagagattgtacaaagttattggttttgaaggagatggtagaatccaattcagacatcataaaacggcaatgcagcaaagtagttcaaataaagaagaattgacaattgtaaaatttatggctgataataatttaaaaaattcgcaagttgattttgaaaatccagtgccttggttaaggttaagagtttctaattgtgattttttattaataaaaaaagaatttaaaatcacatcaacaggaaggattgatttttaaagttttaccttcggggaagtttgagaaaatataattatggacgaatcaaaattaacaaaagaacaaatagcgaaaattcaagcaaaattagatagagctgagaaaagtggtttagcaaaaaggcaaaccaaagaagaaatgctattagaatttaaaaagagattaggtctagtctgaattaaataagttctttgacatacagttttttcgtagtcataaacagccaaaccacaactgaaaggtatggcatccgcccagcagggatgcagtagctttcagttgtggtttgattaaagattagaaaacacgatattcgtgcgtattaacagtagcctgtgttattggttgtggtttgattaaagattagaaaacacgatattaattcatcctatcgtaatcctccatctctggttgtggtttgattaaagattagaaaacacgatattcgtcgcaagttgcgcctcttgttcggttaggttgtggtttgattaaagattagaaaacacgatatttagatccgttgataatgtactataaagcgagttgtggtttgattaaagattagaaaacacgatattaagtagatacttatccgtatgtgttggcgcgttgtggtttgattaaagattagaaaacacgatattagaattaattattgataacaaagttcctaggttgtggtttgattaaagattagaaaacacgatattcccgcaacgaagttcgcgcactcgaagatagttgtggtttgattaaagattagaaaacacgatattgaaggatgcaaatcctatttcttttagctagttgtggtttgattaaagattagaaaacacgatatttttcgggaacattaaaagtaaagctagatagttgtggtttgattaaagattagaaaacacgatatttcgctcagaaatatcaatgatattctttgggttgtggtttgattaaagattagaaaacacgatattaacaaacggaaggagtagaccaaggtataagttgtggtttgattaaagattagaaaacacgatattatacagtcatgacgtaattcgtcaaatggagttgtggtttgattaaagattagaaaacacgatattcaaattaccacaattaagattaacagcgtagttgtggtttgattaaagattagaaaacacgatattagttcagctagatgtattccaaataccaatgttgtggtttgattaaagattagaaaacacgatattattattttttatattactctatagtactaagttgtggtttgattaaagattagaaaacacgatattcatgttgcatacaagatggtaaaggcgtaagttgtggtttgattaaagattagaaaacacgatattattcaaacgctgggtaatgctaggattgtagttgtggtttgattaaagattagaaaacacgatattgcctctttggtaaattagcatatcgtaatggttgtggtttgattaaagattagaaaacacgatatttaaatttatcttagtagtattctgaatatagttgtggtttgattaaagattagaaaacacgatattagcttacaaataggataatagcagaaaatagttgtggtttgattaaagattagaaaacacgatattgaggtgcgcaattttagccttaaaatctaggttgtggtttgattaaagattagaaaacacgatattaagggttaaattagtaagctactacgtagagttgtggtttgattaaagattagaaaacacgatatttactggaatgggtgacttacaaggcgattagttgtggtttgattaaagattagaaaacacgatattctttctttgtaaaacacattcgaatcattagttgtggtttgattaaagattagaaaacacgatattaaacggatatccatccttcacttcaaaccagttgtggtttgattaaagattagaaaacacgatatttaaatttatcttagtagtattctgaatatagttgtggtttgattaaagattagaaaacacgatattatgtttacgataattcaggagatgaaacaggttgtggtttgattaaagattagaaaacacgatatttgaaatttatttttatttgcgtttgtatcagttgtggtttgattaaagattagaaaacacgatatttttttcagatgaggaacaaagagtaatatagttgtggtttgattaaagattagaaaacacgatattgaagtagaattcattgcatcggcatcataagttgtggtttgattaaagattagaaaacacgatattatatgtaatttgattacactcatcaataaagttgtggtttgattaaagattagaaaacacgatattcaactttggcaattcctgtgtttgcggtatgttgtggtttgattaaagattagaaaacacgatattatgatgttgtaatcgttcattacgtagtcggttgtggtttgattaaagattagaaaacacgatattagcaccatccaaatcaacaactgaataattgttgtggtttgattaaagattagaaaacacgatatttacatcggctgcgtttttaagctcattatcgttgtggtttgattaaagattagaaaacacgatattaattgtggagcgtgtatttctaaatcaatagttgtggtttgattaaagattagaaaacacgatatttttccactctattggtgattggactccagtgttgtggtttgattaaagattagaaaacacgatattagaacgtttacttttttacaaacattattagttgtggtttgattaaagattagaaaacacgatattatcgggattcgagggttgtcttatgatacggttgtggtttgattaaagattagaaaacacgatattagttggcttgttatcttctaattatcaataaaataaagagaaatatcgtaaaataaaatgctcctttttggcacgtgataggctagattggagcatttttttatttctagaataattccaactgcgtgggcgcatctaccgcatcttgtttggctttgcccaaataattgataatcattccaaattgtttgtcagtaattcttaaaacactgactttgcctaaaggaggaacgagtttgtgaatccgtttttcatgcacatcggcgctttcgccactggcgcaatgacgaatgtaaactgaaaactgcatcatgctaaacccatctttgagtagatttcctcgaaattgggaagcattcctgcggtcttttttggtttccgtaggcaaatcaaaaaacacaaacagccacattattcggtacccattgagttccataattttggatatttaattttctttctttgtccggtgaagcattgctgcagagagctcgctgttttttgcaatccaaccataagggggcttttctcgtctttgaaataaacagtttgcgtaagaatttgcaataattctgattttagcactgtgttcaattcttgctcatcgtagcgttgcataatttgatatactttttcgtccacgattggcctaaagggttccataatatcgtctgcaagagcaaaagcattgtatttgctcttgtggtgaatacctaatgtgttcaataatccgcttccggataaagctcttgccgttgcagctcgaagaatggcatagccgtaattgagaaaattattgggataatcaccaaatcgttcccttttgaaatcatgttcaaaaaatgatttccaatattgttgggcagctactccttccatattggaagtgtcgccactcaacactttgcttgccaagaattcgaaagtgtttttgttttgggtaattttctgtaaaagaataccttggtttgtgattttctccattatggtttgttgccacaattgtttttttagcggtatggaagcctcaatctgatttttgaatatctcctgttgaatgtgatggctgttgaggtttagaagcatgccgtttggcagatggttattggaacaaataatcacggctgtattattttctaccatcaaattcatggctgggatacttaagtaaatttcagcatggtcaagaactagaaaacctatatcttctattgggatggagctctcccttatttcagatttaatcacaagctgcagatttttggtactaatagaagatttgttttcgataagtatggttctttttagcataattcgtatgattaattaaaaacaagagcctgatagtcatataaatgtacgaattatatcattgtcgctattgtggaaaaccataaaaagaatagaaattaaataattatgagagagtttttagataatctacatgcaaagaatatttcgttcggtaatgtatttatgtactcaatgattcaaattgttggaaatctgaattcgattactattttttttttggatgttggcaaaaaagaaaggatgctaactcttagccccggttgaagtgaaaatcattataagtcagggtttggcttataagattgcaacgaaaaacgggatggtgctaacaaaaaggggaaaatggttctgctccaaaattgatgctttgaactcggattaaaagtgtgctaaaaaacattcatgggaatctctaaagtcttggttttctataaaaaaagccctcaaaaggatagttccatttgagggcttttgagttatctaaaaagggagggttttatttattccaaatcttccaggctttctctgcttgaaaaataagcatgtccaagccatttttaatttgagcgccatgtgctttggctttactaagaaattgggtttctgcgggattgtaaatcaaatcgtaagcaatgtgtttctctgtaaagaattcataaggaatcagtgggaataaatcaacattcgggcttgttccaaccggagtacaattgattataatttggtagttgtcaaatgttgtggcattgataagactgtaatcaatacaattttgtttggcttcgcgagacacaaaagtgtaagtgatatccaattgatccaatgcaaaagctactccttttgaagcccctccggttccaagaataagtgcttttttgtgatgtggttgcaataacggttcaagagatttcttgaaaccgtaataatcggtattgtaaccttttagttttccttttttggtgaattttatggtgtttacggctccaatttgttcagcgtttttagatagtttatccaaaaaaggaatcacagactccttataagggatagttacgtttagtccattaaggtctgtattgttttttattaactcggtaaaatcattaattttgggaatatcgaaattttcataactgcatccttcaaaatgttctttgctgaatttttctgtaaaatatccttttgaaaaggaataactgatattgcggcctaataaaccaaaacgttttcttaaaacttcaatcattattgttttttatgtttgtcaatataatttcgcaccatttttttctcccagactacagggaataaatcttccaagaggatgtaattgttataattcaaacgcaaagcattactcaaatggaattttgctttgatattgtctgaaatcataaaatacaatcctgccaaacgatattctacttcgttttcttctgggaagtactcggatgcttgtaataatgtttgaattgcgctttcgaattcgcctaaaaattgtaaaatgtcaacccagaataaccaggtgtcgagttggtaatccccaaattctactgcttttctatatccaaattcggcttcttcaaacaagttcatttgtttgttgatggctgcaaatcgtttccaatacaatttattttggttgtcaatggctaaagctttattgacaaaaaacaatgctttttggaagtttttttgacgtacataaaaatcggtaatcgcaatccatcctttgtccaaaagtggatcttcatgtactgttttgttgaaatatttaagggctaaaactttgttgcctaatttttcataacatttccctattcgaagcaaggcataggatgttgcatcgtccaattcaatggttcgattgtaactttcaatggcaaggtcgtacttttttagacgttccaatgcttttgctttttccataaaagcaccaagaaattcctcgtctataagagttgcataatcaaaagcacgtatggcgctttcgtattcttttacgccatagtacaagcgtcccaattgatgccaagcaatctcactatatgggtttttgtcaatgtatttgtttatatatgctattgcttcttggttttgatccaaaaattcaaagcaatataccacattgtataaagccgattggtcttcgaaatcttcttccagacatttaatgaaactttctttggctaattctagattgtccataaaaagatattccataccgattaagttgtaaacatctgcatagtcatcggtgtattctagagcaatcttaagcatttctactgctttttcatgctgatcccttttggagcaaatattggctttctggatgtaaatttcttcgtttgtgggttcaatggcatacagctcattcaataacttttcggctatttcgagtttgtcgtcataaatgagcatttctacttgaactaatttaagcccactggatcttgggtgttgttccagagctaattttaaagcttttttggccaatgctgacttgcccatgtcgaggtaatgaagaatgatttcttcaaattcttcggagtcaaaaaagagtactttgttggttttcaacatggactcaaatttggatagggataagttatactcttcttcttcgttgcttaattgcatactgtgtgtttttaaattatcctaaaataaaattaggaaaacgtattgttgaaatgaggaagaattttatttgttgtgaacaatttaattaacaggtttcaatggcaatttcaatgtcaatatcaaatttttaaacctattcaaaaatctaaaatctgcattctgaaatctgcaatcttaaatcttaatttcattcattacttcaagaattatcgcgcagccttctctgatttcttcttcggaaattgtaagaggtggtgttattctaatcgcgcatccttcaaaaagcaaccaaaatagaattaaacctctgtcttgacattttagaatgacttcattcgtaatgtctgcactcgctgtcatagcagcaagcatcaatccttttcctcttatttcttgtatcaaaggatgtaccaaaagggatctaaagagtttttctttctttaaagcttctgtcatgatgttggtttcagttaattctttcaaagtggccaaacaagctgacgcaatgacagggtgacctccaaatgtggtgatatgacctaattttggattttcggttagtaaatccatcattgcagttgaagctgtgaatgcacctacaggcataccaccgcccattccttttcccataacaacgatatccggtacaacatcatagttttggaatccgaaaagttttcccgttcttccaaatcccggttgtatttcgtcgagtatcatcattgcacctacttcggtacatcgtgctcttacttttttcagaaaatcattatgaggctcaataaaaccagctcctccctgaattgtttccagtatgattccggcagttctggtagttattttttgtaaatcggcttcgttgttgaatgttataaaatcgacatctggaagcaatggacgaaaagcttgtttgcgttcttcaaatcccataacgctcatcgatcccattgtgttgccatgataggcgttgaggcacgaaatcaattgacttctccctgtagctcttttggctagttttaaggcgccttctataccctcggttcccgaattaactaaataggttttgtctagaggagaaggcaggagtgaggccatcaatttacaatattccaccgctgggctttgggagtattcaccataaaccataacatgcgaatatttgtctaactgatcctttatggcgtcattcactctcttgttttgatgtcctagtgtgcaagccgaaacacctgcaacaaaatctagatattttttgttatttgtatcaaaaatataagaaccaatggcatgcgaaacttccatgcccaatggatagggtgaagtttgtgcttggtatttaaggaaatcaggattcacggtgctttttttattaatgttttgattgctgatttaagattaacgatttttgactcgagcgatagcgaactggcgaagcattttagatgtttaaatctgcactcaaaaatcgttattcctcaatcttaaatctttttcttcttatcgtaattcaacgtttcttttcgaattttcattgggacagcttttttagctttgtcttttgttgtggcttcaatgactttgagttcttcggcattttcttcttcactaaaaacgtcgtcttttgattttattctttcatctccgcgccattttagtcctttgagtgttctcgcgttttcgggcaattcggattcgggataaatatcgccatccacttgtttgaaaaaagtgatggtttctattgtgtttttatcaaaaagaatattgattttactgctcacatttttgttgataccaattagttccttggcatcattccgcatataataaatcacttctgcattttttatgatatccacatcatggagtttcccttcttgaaattttccaaataagttttgcccttttgtctgattaaatccggtaccaagagtgtccttcgagaccagaaaagtgttgttgagcactttgagcgaatcaagtttttgggtctttttatctccaatgaggtgcatcacatcacctgtaatttggctttcaccattccatagtattgggtttccaatcaattttgttagacctaattttgagctggaatggatagaatcacattttccgctcatatctgttttgtaaaaacgaacattattgaaggcgcgaatgattcggtttccttcttttccggtaaccatgagttttttgccatgaatataaaccgagtcgttatctacaaaattaacagccaaggctctttttgtcacaaacatggagtctttctttttgtataattcggcataatgtcctcgaattactcctcgattaatagaatcggttatttttacatttcgtgttgcagaagcaaattctttgtttcggtcataatacaaactatctccttttatcactcgatcatcatacctaatgtaagatttgtccagaaaatgggctagatttttcttggtatcgtagaagcctttttcggtgtaaatataattggctttacttgttattgttgatggaccaaaaaggtacgaatgacctgaattactgtaataatccaaatgattggatttgatttcgtatgttttgttggtaagtgttacagcagttaggaactggaattttttctgggtaacataatatcttccggacttactttttaaggtattgtctttgttaacgatagttccgtttgtattgtaatatacttcttgtatgtttctgtcaaaatagattgtgtccgtagccaaagttgcatctggtgaactcattactgcatttccagttgcaaatgctttttttaattcaccactgtattctgcataattactgttcaaatacaaagtgtcgccttgtaccaattgtacatttccaaaagctttcaaataattttctttctgaaaaaaataagctttattacaggttaaaatgactccgtcgtgactaactcttacatttccagtaagcaaaagcgcatctggaatcttaagttgatcgacatcagcaaagtcagactgttcaatatgtatttttttgggagcttgtgccaaaacaagatttgcactaagaaatactaggctatagataatgaaatttaaagatttcttcaatggtcttaatttttttgtaaatttatgaaaaatggggcaaac

SEQ ID NO: 3117 - DNA, 24365 bp, synthetic construct
  misc_feature 1..24365: note = Synthetic
  source 1..24365: mol_type = other DNA
aaagaccgaattaatgcgttaagagaatatgttcccaaggcacgatccaaagactggaaaattgaacgtgccggacaacgggtacaagtgataaaaaaagacgaaaaagaaggaggcatactggagtttggtaccgaagtaattaccactgcagatggatctttatccgttttgctgggggcttctccaggtgcttcaacagcagtttctattatgatagatttgataggaagatgtttcaaagaggaaattaaaacggcggagtggcaggagaaattaaaaatcatgattccttcttatggtcaaaatctcaatgaagatccaattttattagagaaaatcagaaaagaaacggctgccgtcctaaaactgaataattagaaagtcagcacaaaaataaaaagagtttgaattagataggaatctggttcaagcgcttttcttgttaagattcctttaatgctgttgtggtttttaaaatagtttcggataaactggtcagccagattaattgttcgattaccaattgtgcttcttgcattttcaattgaaaagccttttcatcaataggaattcctgctttcaattctcgggcacgtatatttttcaattcggtaaaacgtagcgctaaatcctctttgggaaggttttcttttagcttgaaatcattttccttcaaaagtgcaatagcctcatccagatttctaatcacagtatccaccaccacattgaatgcttcagatgcggaggttgttttatgggattgaatgtaagttcctaaagacgctaatgaggagagaagagagtgatttaataccgttagtttatagactttaggcagctgtttttgttttgatttaggctcttgtgccattctctgaaaagaagccattaaattcccaatctcgatgaaagcatttttacgagccaagcggtacgatgtagaaacggttccttttttattataaaaaattgaaatttccttcaggtaattttgattggcattgatggatttttctaaatgcatgggcatgtttaaaaattcccaagaaggccataaaaaatgattggccaaaaaagcaagaccggcacctacaatggtgtccagtattctaaattgaacaagatcccctatgttaggagtcacaattccataaataaaaacaacatacatggttacaaatgtggcactgactttgtaatttgtttgggtaaaagagaatcctaaaagcaagcaaagaatagaaagaatactgattataatgttgtctttgacaaagaaaagaattccaaaggcaattaatccacctaaaacagtacctagaattctatgaaaagaacgttgtttagtcaagccgtaaccgggtcgcatgataacgataatagtcaataaaatccagtatacattatgaaaaggcagtatttttccaataataaaaccaactaatagcgctattgttaatcgtaaggaatgcctgaaaatagtggaggaaaaactcagattctctgtcaaagtacgccacggataatactgcggcgttaagaatttttctaaatcggtatcgattcctgtaaaatcctgtaaattaacaattgaggtaaaagcacgttctacaatttttattttctcgacttgcttttccgcatattccagcatagtggtaagcataaaaacgccttctgaggcagaatttttccctaaatctttttcataatcagtgattgccagctgtaaggcgttcaaatcgtttagcaatgtgtgttttggaatataattcgttcgtttttttacactttcagataattgttttaaacttgcggccagattgtaggctaagttttgatacgtcagcaagacccttggatgattgtcgaattttcggtgcaatttatcatggtcaaatgacgtagacaatgccacttcaaggatttctaccattgctataaaaacaagcaacatttttcgattttgattagaagaacctgcgctgatatggctgttaatcaatacttctcttatgttttgatgaattgtgttcaactcgacctgaaggtttaactgcttttcaataattgcttttttatctgcatctatggtccataaatctcctcttagcttcaaatatttagccgtaagtttgatgcattcagcaatttgtaattcgatgtagcgatgtggtctgatgtagtgaaaagtaagtgaaacaacgagatagaataatcctcctgctagaatcaaaccggaatgttgtaccatagcccaaccggtatttatatcagaaaatgtcaaggagagtgaaatcagggcggagaaagaaaccattgtagctcgttgtccgtaaacggataacatggatgtcaggaaaactaataaggctaaaaaaggataaaaaatccaagaatacggataaattatatttactagcaaattcacactagcaacaagaatggtggcaacaagaatcccgttgactttatgtttcagactacttggaatgtcactgggataagtaaaaaaggctccaagagctattgtaaagcctacttcgaatttgccaaaaaaagaaaacagcatcaccggaatcacagtggcgatagttacttttagggcattagtgaaatacgtcgtatcggtaaatttttggattttatgaatcatacaattgtattgcttgcaaaggtaaggattgtaggaatttttcaaaggaatactatcggtcttttaacctaaattttaaatagtgatgaattatcattagagcattattcattggctatttttttactatttttgcagaccgaattaaaagagaacttatttcgattttaatagctaatatttaatacaacacgaatgattttaccaattataggatatggtgatccagttttaagaaaaataggggaagttctctcaccagaacatccaaacttgaaagaaacgattgccaatatgtatgaaacaatgtataatgcctatggtgtgggtcttgctgcaccacaagtaggattagcgcttcgtttatttgtaatcgacacgactccttttagcgacgatgaggaattagaagatgcagaacaaaaagaattaaaaggattcaaaaaaacctttatcaatgcaaaaatgatacaagaagaaggtgaagaatggagtttcaatgaaggctgtctgagtattccggatgtcagagaggatgtttatagaaatccaaccataacaattgagtattgcgaagaggattttgtaatgaaaaccgaagtttttgacggattaatcgccagagtaatccaacatgaatacgatcatattgaaggaattttattcaccgataaaatttcatcattaaaaaaacgattgattcaaaagaaactgaaaaacattttagagggaaaaacattccaagactaccgaatgaaattctttgccaaaaaaggaagataaaacagctttttaacttcgcttggtatgatttttggtttcaaataaaaataaataagtcaaattcttaataataattccacaataacatgaatttagaaaaaatattagccatttctgggaaaccaggtttatatgtattgaaagtgcaaacaagaaccggatttgtagcagaatcattagcggatggaaaaaaaatcaccgtaaacttgaaaagcaatgtaagcttactatcggaaatttcaatttatacctatgaaggcgaaaaacctttagccgaaatcatgcaaaaaattgctgataaagaaagcaaaggtgcggcaatatcccataaagaagacaacactacattgatggcttatttcaaagaagttttacctgattatgatgaagaaagagtatatccttctgatatcaaaaaagtgctgaactggtataatatgcttcaagcaaaaggacttgttactgatgaagctcctgctgctgcagtgacagaagaggttgcagccgaagaaactccagtagcggaagttaacgctcctgctaaaaaagcaaaagctaaaaaagaataatcagattttaaaatactatttaatcctgttcagttgtttttctgaacaggatttttttatttttaccaaaaactatccctaatgaattcaagacaaaaccaactgcaagctttcgaacgagtattagatattatggatgatttgcgtgaaaaatgtccttgggacaaaaagcaaactatgcaaaccttgcgccatcttaccattgaagaaacctatgaattaggcgatgctattttagacaatgatttgaacgaagtcaaaaaagaattgggtgatttgttgttgcatattgttttttatgccaaaataggaagcgagacgaacgattttgacattgctgatgtgtgtaatgaaatttgtgaaaagctaattcaccgtcatccccatatttacagtgatgtggtggtaaaagacgaggaagaagtgaaacaaaactgggaaaaactaaaactcaaagaaggcagaaagtccgttctggaaggtgttccaagaagtttacccgcattagtaaaagcaagccgaatccaggagaaagtaaaaggagtgggttttgattgggaagaatcgcatcaggtttgggataaggttcaagaagaattagacgaattacacgttgaggttgaagcaggagatcaggataaaattgaagccgaatttggggatgttttattttcaatgatcaattatgcccgatttttaaatgtaaatccagaagatgctttggaacgaaccaataaaaaatttatcaagcgctttcaatatttggaaagtaaagcaggagaattgggaaaacctttaatggatatgacacttgctgaaatggatgttttttgggaagaagcgaagaaactatagtgtttattattaaataattaaattaggatcacttataaaattatccaatgccagaaaataaaaccgagttaaaacgttctttaggattaatcgatgccacgagtttagttgccggttctatgataggatccggaattttcattgtaacatcagccatggcaagagatattggttctgctgcctggttattagttatttggttggtaacgggattaatcacggttgccgcggcattgagttatggagaattggcaggaatgatgcctaatgcgggcggacaatttgtgtatattcaacgcgcttatgggcgattggtttctttcctgtatggttggactgtttttacagtaattcaaacgggagttattgcggctatagcggttacttttgcgaattatgccgctatattctttcctgttttagatcaaactctttttagggttggtactggttttattttttcgtatcaaaaagtattggctatttttagtataatcctgttaacctacatcaataccaaaggagtagaaagcggaaaaacagttcagttgctctttacttcggcaaaattaatagcgctttttgccttgataattttaggattatacgtgggtctgcaaacggatgttttgtccaataatttcgcaactatgtgggaagccagcaaaacggtagtcaatcctgacggaacaattacagtaacaaaattagcaggaatggctattttgggagcagcaggagctaccattattaattccttgttttctagtgatgcatggaataatgtcactttcattgcaggggaaattaaagaacctaaaaagaatatcccccgtagtttgtttcttggaactttaattgttactgttatttatgttttagcaaatctggcgtacttggctttattgccaatgcagggaactccaaacgctgctgatattgccagtaacggaatcatgtttgccagcaatgatcgagtaggagcggccgcagcaagtataattatgggtaatataggtgtatttgtgatggctgggttgatcatggtttctacttttggatgcaacagcggattgattctttcgggaggacgattattttttgctatggcaaaggatggacttttttttaaacaggctacagaactgaataaaaatcaggttccggcccaagcattgtgggtgcagtgcatttgggcttgtatgctttgtgtttcaggaaaattcggggacttattaacctatgctacttttgcgtcattgttgttttatatcctgactattctgggagttttcattcttagaaaaaaagaacccaatgccgataggccttataaagcgtttggatatccggttgtacccgcactttatattgtggtgacatcagccatttgtctgactttactgatttatgataccttcaatacgggattgggattgtgcattgtggcgttaggaattccggtgtattattttgtaatgaacaagaaagagtaaagcaaatggaattaattagctaattttttgagtgaattgatgtctttttaaaacgatttttttaccggttaattcaatcaatcctagtttttttaaatccgaaagtaaacggatacagctttcaatggctgttccaatcatgctggctagttcatttctctaaagttgtacttttaaggagttatcttcgtttttcccaaaggtgtcatgcaaatagagaagcgtcccggctaatcttctcttgactgtttttttggctaaatgcaccatgtgatcgtcggcttcttttagatcaccgcaaatgcttttcatcacattcatcgaaaactgattgttcttgccaaagcatcccatcacttctgattttggaatacaaataccatcttttagatagtaaataccatttacattatctccctcttcaaatgtaaccgcttcttttttaatactatgggaggttttacaataagaaagttttagtaattcgtcttttgttaaggtttttaaagagctaaattctctgacgatacattgttcgcatttgctcatattctttggtgttaaaaggcaaatggatatacaaactgataccttcagaacgattgctctctgtgaaagatttcttcaaaatttcttctgaaaaatccatttcatcctaattaggataactggtgtattttggttccgaaacattgtatttttgtattaaggaatttttcatggcaaaatcatttatagttagtcaaaagtaaagcgactgctcacatattaaaatgacaattatcatattgaaaaaaaacttttacaaaaaaaagaggcttcaaaagcctcttcacaaagaaatttgttctttaaatagtaatagaacgatcatgtaaagcaaatacaggatgtacctgtggttgaataaaagctgaagaatgaatgctgtcagcagaaaagaatgaatgtgacttttctgtttgaattgaatccaatgaaatagcatttgcattaaaagcaaataacagagctattgaaaagccaataaaaacaacagttttctgaatccatttcattttgtaaacataaaaaaggagactgactttatgaaattttttttaataaatgatcgttaaatgttaaaatcagctaagtcgtgtctccccataaaaaaacctcgagcagtttattctcgaggttttgatcaccagtatgtgctgaaatttattcggtttttaagtttcgtaattgtttgagtttttctttccaaacatcaagactctctttatgaatagcaatgtttttacgaacttctaatacgatggaattttctttttttgcatttctggtattggcaaaaaactgaatgttattttccaattgaaaaatttcattttgaacttcatcaattttacgcattacaaaaatcttttcattatctaatttgcgcgtatcatggctttctgacaaatgatccattctgtttgagaaacgcaacatatcagtatcttttttactcaaacttaatttttcaaaaagggcatccagtattttgttgaattttccctcaatatgtcttcttgtgaacggtactttaccaaagtttttccaggtttcaatatgcaattttatggagtctaaatctgttttatggtctccgatcaattggaactctcttaaggtttccaggtaggtttttttagcatcaaaagcggctacttcttccccattttcctcatttttttgctcttttaatttgtcaaaataatgattgcaggcatccttaaactctttccatattttatccgaatattttcttggtacatgccctatttgtttccattcatcctgaatttgtttcatgataggagttgtagcatcaaaatcagtgctttcctgcaattctttggctttagctacaagagctgttttcttgcttaaattgtcgttttggtctttcttaatgtctttataaaatgaatttttgaaagaattgaaatttcttacagcagttttaaaactggcccaagtatcctcatttacctccgatggcacttttccggcagagaagaaagcagttctcaaggcttctaccttttctatttgagccagccattgagaatgtgcattcactttctcggtcgccaaaacttcaatttgagcaataatttcttttttcttttctaaattctcttgttcagttcctctttgattttcgaataaaacttcccgtttatcatgcatttgcttggtcaaatcactgaatttattccaaatatcatctcgatgttctctagataccggtccaatatcctccttccagattcgatgtaaatcctgtagttctctgaaggctttgttaatatcagcttcagtaaccaattcttcaacacgcgctacaattttttgtttttgttctaagttgtgtttgaaatccaaatctctcgcttcccggtctaaatgcagataatcatagaaattttccacatgaaaatggaagttattccacacgtggttgtatttgtccttaggaattggcccggcagttttccatcgttctcttaaatcattaaaatgttttaaggtgtctttgatgttttcctgagggttaatcaactcttttaattcctcaacaattgccaaacgattttctaaatttgtttttagattcgtttgcaagctcttgaaatgggtatttttagtatctctaaaaagagagtaataagtatcaaattgagatttcaacgaagaatgatattgaaattcttcgttagggtcttgattttctgttagaaattcttcttttttctcttcgaggaggtggttgtatttagctaaaaatgcttttttaatttcttcaatatgctgcttaaaagtcaaaattttgtcgctggaaactaaatttttcagttcgttgaccaatacttcaagtgataaggtatcataatcctgcatcggaatatcgtaactttctttgagtgtttcgtcttcactttcagctgcatttgtttgtgtaatggcatgaagcgcagttgtatttgctgtttctggcgctattacattctcttcggcgggaacagcagcttcgggttcatttgttggatcagtggcgtgagttgctaaaacgtttgattctaatgaattagattcaatagtatttttgtctaattttccgtctgcttcaggcaggttatcattcttttcttctaacattttttcaatgtgtaaggtttctaaatagattcaactcgaaagatactaaagcagtatgaaaatacaaaacaaaaacttaatttatagtcattttaggttaaatggctttttttttggagctatttcctgctgtccgctgtattcccaattaataaaaactacggctgaaaagccttgtttttctaaatcgggagatgccgcttccatcagggctagggatttgggttaaaattatgaattgttttcaaaaaaaaagtcccaccgaagcaggactaaagattttcatctacggcatatagccttattgtgataagattaaagattagaaattttaatcagttgtaaatatacatataaaataattaggttgcaatgagggaaaccgtaaagcggttaattattttctccgtagctttaaaaattcttacaaaatacagattgttatggcaaaaatattaggattggatttagggacaaatagcattgggtgggcaattgtggataaagatggaacagatttttcacttgtagataagggagtcaggatattttccgaaggggttaaatctgaaaaaggaattgaaagttctcgtgcggcagaacgtacaggttttagaagtgctagaaaaataaagtttcgcagaaaattgagaaagtatgaaactctaaaagttctatctgaaaataatatgtgtccattatctgtagaagaagttatagaatggagaaaatctggttttaaaaaatatccacttaatccggaattcattgcttggttgcgtaccgatgatgacaaaaacttaaatccttattattttagagataaatcaagtaaacaaaagacttcattgttatcgttaggaagggctttctatcatattgcacaacgaagaggttttttgagcaatagattagatccttctgcggagggtgttatcgagcaacataaacccgatctagaagatattcttgaaaacgtagcaactattacggaacttcaaatggaattaacggactattttcaaaatcgtgatttaattgaacgcaaagcaacggatttagacgatggagaaaagaaactgaaaaccttatataattcattctttaaaacgattaaagataatccaaaagactttgagagaactaaaaccatacttcttgaacggttgaataaaaaagaagacttaggcgctgtcaaacaaaagattggagagatttctcaagcaatgaaattaggcaattatgcaactttaggacaatattttttcagtttatacaatataggtaaaattagaaatcaatatacggcacgggaagaacactatctttctgaatttgaagtcatttgtttggttcaaggaatagacggaataatagcaactgaaaaattgcctgaaaaaagatattttggactagctaaagaattgtataaagctatcttttttcaaagacctttaaaatctcaaaaaggcttaataggcaaatgtacttttgaaaaaagtaagtcaagatgtgccatttcacatcccaattttgaggaatacagaatgttgtgttttattaataccataaagataaaaactcccgatgatgaaactctaagatttcttactaacgaagaaagattgaaaatcactcccaagtttttgcgaaaaaaggacaattttaattttgaggatttagccaaagaattggttccaagtggcggtaaatatgctttttataaatcatctgctgctccaaatgttaattacctgtttaattataatatgaattcttctgtgagtggatgtgtagtatctacttcattaaaaaatgctttgggtgaagattggaagactaaaatctatagctatgaaactcttaataaaagcggtgaaatagtaacacgaaatgtagattataatgatttatggcatttgatttccgtatctacttctgatttgtacttacaggaatttgcaaaatataaattgaaattggatgataaaaaagctattttattcagtaaaataaagctaaagaaagactttgccagtttgagtgtaacagcaattaataaaataaatctttttttgagagaaggattgttgtattcgcacgctgtttttatggccaatattaaaaatattgtagatgtcgacatttggaaaaatcttgaggatagaaaacacatccaaactaaaattgccgaattaatagctacaaacacttttgataataatttattggaaattgtaaacgggctcattaaagaatgtaaagttggaggtttttattattcaaaagaagccgaaggaacctataaatcagatttagaaaaaaaggtaagttattttgtgaaatcaaataaaattgatgaccagaatgaggttattgtaaaaaagttatttcctatttacattgagcaattaaaaaaatacgaatttttaacaataaaacgattagacgaaaaagtatttgattttttagatggtcaaaatgatgacggacaggttttttgtaacgccaagaataaacttaataaactatatcatccatcggatattgatgtttttagaaagcaaattttaaaagatggaaatggaaacgaaaaattagttttaggaagtccgttaatttcttcaataaaaaatccgatggcgatgcgagccttgcaccaattacggaaagtgttgaatgctttaattattgaaggtctaattgatgaaaaaactagaattcatattgaaatggccagagaattaaacgatgccaataaacgaaaaggaattcaggattatcaaagagatatagaaaacagcagaaaagcatacattgaggagattaaaaaagactataaagcggaaactggaatagacattgaaccaacagaagacgatattttacgctatcagttatggattgagcaagacagaaaaacaatttatgaagaacaatatactaatattagtatatgccaaattataggtagtgaccctgattatgatatagaacatactattccaagaagcaggtcacaggacaattcacaaatgaataaaacgctgtgcagcaagcgatataatcgggagattaaaaaaaataaaatgcctattgagttgagtaatcatagcgatattttagatcgagttgcgccttggcaaaaaaaatatttggcattggaatatgatataattgggatttcaagagcaattaaagcggcaaccacaaaggaacaaaaagaccgaaaaatcagattgcgccataaattgaatttacagaaggaatatttcaaaggaaaatacgaacggtttacttataaagaaccgaaagtaggtttcaaaaacagccaaattccagatacgggaattataaccaaatatgccagtgcgtatttaaaatcatattttggtagagtagaagccgtaaaaggcggaatggttgctgaatttagaaaagcctggggaattcaggaaagttatattaaagacggcaagaaatattataaaattaaagaccgcagcaagcacacacaccattgtattgatgcgattacaattgcctgtatgaccaaagacaaatatgatgtaatggcgcatgcttgggatttagaagatgacttggaaaaaaatcaatacaaattgatgaaatccgttttagaacaatcaaaaccttggaaaacctttacagaagatttaaaaaagattgaggacgaaattttggtttcccatcatacaccagataatgtaaagaaacaatctaaaaaaattatcagaatacgagggaaaaaacaatttgttgccgaaatggaaattgatacaaacggaaaaaatgttccgagaacggacatcaataacaaaataatttttaagaaagatagcaacggagagaaaatggcgaggtttcaccaaggtgacactattcgaggttctttgcatcaagacagtatttatggggcaattaaaaacccattgcatcaagaagaaatacgctatgtaatccggaaagatttagaaagtattaaagcttctgatgtggaaaatattgtggatgaggttgtaaaagaaaaggtaaaacaagcaattgccgctaaggttttactgctatcttcaaatccacaacaaaaaaacaaacttgctgaaaatcaaaaggtttggatgaacgaggaaaaaggagtagccattaataaagttcgtttgtatgccaactctgtcaaaaatcctttggaaataaaagatcatgccgtgctgtcgcaatcacgccataagcacaaacaaaaggtttatgctcaaaatgacgagaatttttgcatggcaatttatgaaatagatggaaagagagattttgaattaattaataattttaatttagccaagttacaaaaacaaggagaaggatattatcctttgtttaaagaaaaaaatgttaatggtaaaacagtacaaatacctatcgccaaaagaaacaaacgtgatttggttttaaagagagggcaacaggtgattttttatgataaagaagttgaaaatcctaatgatgtatatgacttagttgatttaaaaggaagaatttatatcatagaaggattgtctattcaaaggattaattcatcaggtaagcagtacgattttggggtaattatgtttcgatattttaaagaggcaagaaaattagaggatttaaagaatgataaatacaaaccagatggtgtttttaaattggaagaaacaaagccaaccagaaaaatgaatcacaatcagtttaatgcttttgttgaaggaattgattttaaagtaatgtcatctggtaaaattgaaaagatatagttttatttaaaagttcggtgtgaatttataccactaaatgtttttattatgtcaagacaaagtatcacattagccaatcaaaacgatgaatggttaaaacaacaagttgccaacgaagaatttaccagcaaaagtgaagcggtaaattatttaatcaagcaagctcgtgatcgagatgagtatgttgaatttgttcgaatgaagttagatagagctgaaaaaagcggatttagcaccaaaacaaaagaggaattattagcagaaattaagaaaaaactaaatgtttagttataaacttaatatacaagcagggaagatttgactcgaatttttgaatatggaattggtcgtttcggatttcttcaagttaataaatattatgaaatgttttttgattgcttttcaaaaatcggatcaaatccatatctatttcctgaagctattcgttttcgtcaaggttatagatattgtatttgtggagtggatactatttttataaaattaatgccaatgaaatagaaataatggcaattataggaagacaagatttttaaaggttctttgacatacagtttttcattgtcttaaacagccaaaccacaactgaaaggtatggcatccgcccagcagggatgcagtagctttcagttgtggtttgattaaagattagaaaacacgatattatcgaaaacaatcttaaatacaatagggttgttgtggtttgattaaagattagaaaacacgatattttgctctgtaattataaacagagaaaccatgttgtggtttgattaaagattagaaaacacgatattattcatcgatttattgattgttgacaaagagttgtggtttgattaaagattagaaaacacgatattaaaaccatttgcaggaattatggtaagagggttgtggtttgattaaagattagaaaacacgatattcaaggatatgttatgcgctaatgatctcacgttgtggtttgattaaagattagaaaacacgatatttatattatcaccaattgtgttgttgctgatgttgtggtttgattaaagattagaaaacacgatatttggaaggaaacgtaaattttgacccacccagttgtggtttgattaaagattagaaaacacgatattggagattattcaattgaaaaggaatacagtgttgtggtttgattaaagattagaaaacacgatattaaagcccaattcacaatcgaacgtttcaatgttgtggtttgattaaagattagaaaacacgatattgaacaatttgtaacgtatgatgaaactgcagttgtggtttgattaaagattagaaaacacgatattttcaaagaggtaaacaatgataataggtatgttgtggtttgattaaagattagaaaacacgatattattgatactatttttgaaaagacaaactatgttgtggtttgattaaagattagaaaacacgatatttagaaaagtggaaaaataaaactatctatgttgtggtttgattaaagattagaaaacacgatatttggcataactttagttgcaggagatcgtagttgtggtttgattaaagattagaaaacacgatattactagttggaggaacaggaacaagtggaaagttgtggtttgattaaagattagaaaacacgatatttgatagcttagaggtaattacaagtgaaaagttgtggtttgattaaagattagaaaacacgatattctttcttaatttgcctttatcgttacagggttgtggtttgattaaagattagaaaacacgatattatagtttttaaaggaactcttattgtactggttgtggtttgattaaagattagaaaacacgatattcaaacggctttagatttaaaagaaaatgtagttgtggtttgattaaagattagaaaacacgatatttaaccttgatattttaatagacaaggagtggttgtggtttgattaaagattagaaaacacgatattcatctaaattaggggaattaggagttagtgttgtggtttgattaaagattagaaaacacgatattagtagaaaaagcaattcaatcagatgctaagttgtggtttgattaaagattagaaaacacgatatttctcttggttgtttcttattgtaatcatagttgtggtttgattaaagattagaaaacacgatattttgcttattgaaatagagcttaatgtgtctgttgtggtttgattaaagattagaaaacacgatattcacgaaactggaagataactaatggctacggttgtggtttgattaaagattagaaaacacgatatttgtgattatgctttctttaacgaagtgatggttgtggtttgattaaagattagaaaacacgatattgagacaaagacaataacattccaaataagagttgtggtttgattaaagattagaaaacacgatattgaaaatttttgctattgttgttgcgttcagttgtggtttgattaaagattagaaaacacgatattttgattaaaattcaaaaacagaatagaagagttgtggtttgattaaagattagaaaacacgatattctaggatcaggggtaagttgagatagaaagttgtggtttgattaaagattagaaaacacgatattgaattggtgcaaaacgcatatattattgaagttgtggtttgattaaagattagaaaacacgatatttccatctgtatatcttacgattgtctataggttgtggtttgattaaagattagaaaacacgatattacatcattttcctgatacaatacaagttgggttgtggtttgattaaagattagaaaacacgatattggcaacatccttttaccaatcatcagataggttgtggtttgattaaagattagaaaacacgatattaagtccgcaggcgttcccttcggataagttgttgtggtttgattaaagattagaaaacacgatatttaatctttttctactcaccaattgaccgtgttgtggtttgattaaagattagaaaacacgatattcaataatattacaatactctttcataatggttgtggtttgattaaagattagaaaacacgatatttaaatcttcacctgaaaaatcaacttctaagttgtggtttgattaaagattagaaaacacgatattgaaataattatattctgttgacggttgaacgttgtggtttgattaaagattagaaaacacgatattccggcaataacaatcgattttccagatcctgttgtggtttgattaaagattagaaaacacgatattattaccagcctctatggttttagatgcaatgttgtggtttgattaaagattagaaaacacgatattagtgtaaaaatccttatatacgaagtataagttgtggtttgattaaagattagaaaacacgatattgctttgcctttacttcgagccaaacggatggttgtggtttgattaaagattagaaaacacgatattatttaaaagaattagcttcatgtaatgtaagttgtggtttgattaaagattagaaaacacgatattagttggcttgttaccttctaattatcaaaggaatatgggtgaatgtcgtataaaaaaatgcctcttttttggattgatatcccaatattgaggcatttttttatttctatcaataaaaattcgataaatggtagtagaatcatagtaagaggcaagattcaatgattaatttttagtgcaatctgcagggacaggtcgcgacctgtccgtacgttagagattagtcgcaaaataatttatattttttacgatttgtgcgcaagataggaaatgttgtttagggaatgtgaatagggcaggaatagggcaggaatagggcagggacaggtcgcgacctgtccgtacgttagtaattagtcgcaaaataatttatatttttttacgatttgtgtgtaggataggaaatgttgtttagggaatgtgaatagggcaggaatagggcagggacaggtcgcgacctgtccgtacgttagagattagtcgcgaaataatttatatttttttacgatttgtgtgtaggataggaaatgttgtttagggcaggaatagggcagggacaggtcgcgacctgtccgtacgttagagattattcgcaaaataatttatatttcgttacgatttgtgtgcaagatagaaaatgttgttttgggaatgttaatacggcaggaacaggtcgcgacctgtccgtacgttagagattatccgcaaaataatttatatttttttacgatttgtgtgtaggataggaaatgttgttttgggaatgtgaatagggcaggaatagggcagggacaggtcgcgacctgtccgtacgttagagattagtcacaaaataatttatatttttttacgatttgtgtgtaggataggaaatgttgtttagggaatgtgaatagggcagggataggtcgggacctgtccgtactaattatgaaaaagaaaaaataatgaaaaatagaaagcgaaatagaatgctgggatatgattattcgcaaaataatttatatttcgttacgatttgtgtgcaagatagaaaatgttgttttgggaatgttaatacggcaggaacaggtcgcgacctgtccgtacacgagccaatgaatccgtatatggaatggaatgaatatggttctattgcacaaaaacaatggaattggttggataatcagtatgcgtatgttattttacattcttttatagtaatgccgaatcatgtccacgcaattttggaaattgatagtaatttgatatctgattgtgaaataaaaataaaatcagtatcggaactaattggtgcttataaaacgacctcatcaaaacaaattcatttagccggtttgtctgattttgcctggcagcgttcttttcatgatcatataattagaaacgatgggtcttatgaaagaatttataattatatcgaaacaaatcctgagaggtggaatacagatgcgctttttgaaaaataaaattattgtttaaaacaattccaactgtgttggggcattactattttcctgtttggcttttcctaaatagttgataatcattccaaattgtttgtcggtaatacgtaaaacactaacttttcctaacgaaggaacgagtcggttaatgcgtttttcatgaacatcagcactttctccactcgcacaatgcctaatataaactgaaaattgcatcatgctaaagccatcttttaagagatttcctcgaaactgagaggcattccttttgtcttttttagtttctgtaggcaaatcgaaaaacacgaacagccacattattcggtatccgttaagttccataatttaggatatttaattttttttcggtgacctgtaaaacagtgctggagcgaactagccgttttttgcaatcctaccattaaagggcttttttcttctttgaaataaacagtttgtgtcagcatttgtaatagttccgcttttattgcggtgtttagttcttgttcttgataccggttcataatatcaaaaactttttcgtcaacaatgggacgaaaaggttccataatatcatcagcaagtgcaaaagcattgtatttacttttatgatgaataccaagtgtattcaataatccgcttccggaaagtgctctagctgtagcggctcttaaaatagcatacccgtagtttaaaaaattgttgggataatcaccataacgttctctttttatgccattttttgcatgattaggtaacggaaaatttttccaatattgttgtgcagcaacgccttccatatttgtggtgtcaccgcttaatactttgctagccagaaactcaaacgtatttttattttcagttatttttgctaacaattccccttgatttttaattttttcaataatagtttgttgccatagttgttttttcagaggaattgaagcttcgatttgatttttgaatatttcctgctgaatgtgatggctgttgaggttgagtaacattccattgggtaagtggttgctaccacaaataataatagcagtattattttctacaattaagttcatagcaggaatactcagataaatttcagcatgatcgagtaccagaaaaccaatgtcttctattggaatggtactttctcttatttctgattttagtattagctgttggttttttgtcgtgattgaggatttattttcgataagaattgttcttttgatcataatttaagtcgttaaattaattgcaaatatttgattatcaatcaaattaacatatttaataatcagttattttacgggaaacctcaatctgccttttaaattgcttgtataaaaaaatcgtctcgttttaaaacagtaaaatggctgttttaaaacgagacgaccgatagaaattttaattaattaattaattaatttaagcgagagctaatacaataatcttgattacgctcgatttgacaagaaataaacttcttagttatttattccagattttccacgctttctctgcttgaaaaataagcatatccaaaccatttttgatttgtgctccttgctgtttggctttttttaggaattgtgtttctgcaggattgtaaatcaagtcaaatgcaatgtgcttttctgtgaaaaactcatacgggatcaatggaaacgcatccacatttggacttgttcctactggagtcgagttgatgatgatttggtaattgtcgaatgttgttgcgttgattcggttatactcaatcgcattttctttagcttctctcgacacaaaagtataaggaatgtccagttcatccaaagcaaaagcaactcctttagaagctcctcctgtgcctaaaatcaaggcttttttgtggtgcggttgcaacaggggttctaatgattttttgaaaccataataatcggtattataccctttcaacgttccttttttggtgattttgatggtatttacagcgccaattaattccgcttttttagataatttatccagaaacggaatgacggtctccttgtatggaatagttatacttaacccttttaaatttaaagtgttttttagtatctctggaagtgctgttatttctggaatatcaaaattttcataggtgcaaccagtaaaattttcattgttaaatttatcggtaaaatatcctttagaaaaagaataactaatattgcgacccagtaacccaaaacgttttctaactgtttctgtcattatttttttttatgttttgcaatgtagttttgcaccatttttttggcccaaactactggaaataaatcttctaaaaggatgtaattatcaaaatttaatcgtagggcattgcttaaatggaattttgcttttgtattatctgttagcataaaatacaatcctgctaagcggtattcaacttcattttcttccggaaaatattctgaagcttgtaataaggtttgaatggcactttcgaattctcctaaaaattgtagaatatccacccagaataaccaggtgtcaagttcagtatcgccaaattcaactgctttcctgtatccaaattcagcttcttcaaagaagttcatttgcttattgatagtcgcaaagcgtttccaatacaagcgattttggttgtcaatcgctaatgctttattgacataaaataatgctttttggtaatttttttgacgtacataaaaatccgtgatggcaatccaacctttatctaagagtggatcttcatgcactgtttgattgaaatattttaaggctaaagctttgtttcctaatctttcataacattttcccattcgaagtaacgcatacgaagttgcatcatctaattcaatggttctgctataactttctatggctttctcgtatttttttaatcgttcaaacgcttttgctttttccatgaaagcaccaaggaattcatcatcaattaaagtagcgtaatcaaaggcacgaatcgcattttcatattcttttacaccataatgcaaacggcccagttggtgccaggcaatttcgctgtatggatttttgtcaatgtatttatttaaataagtaatcgcttcttggttttgatctaaaaattcaaaacaatacactacgttatacaaagcggattggtcttccagatcttcttctaaacacttgatgaagctttcttttgccagttcaagattgtccataaaaagatattccatgcctattaaattatagacatcagcataatcatctgtgtattttaacgcggtttgtaataattcaaccgccttttcgtgttggtctcttttggagcagatattggctttttgaatgtaaatttcttcattggttggttcaatggcatacaactcgttcaatagcttttcggctagttcgagtttgtcgtcataaactagcatttccacctgaactaattttagtccggtagattttgggtgctgttctaatgccagtttgagtgctttttttgctaaagcggccttacccatatcgaggtaatgaagaataatttcttcaaattcttcggagtcaaaaaagagtactttgttggttttcaacatggactcaaatttagacaatgataagttatagtcttcttcttcgttgcttaattgcatactgtgtgtttttaatttggcctaaataaatttagggaatcgtgcgtgtactgcgagggaaagttggaattgttgtgaacaatttaattaacaaaaaaagaggtagtttaaacgtatgccctagccctgataagagtggaaatccttttgctttttgctgacaaaaagtaaaagattaaaacggatagcaggaatagctcccaatttttttaattgttttgaataggtatttcaatatgtatccaatagtacaacttctgctatcaaaaatcgttaatcatttttcttcaatcattattccatccattacttctaatatgatgctgcaaccttctcgtatctcttgttcagaaatggtaagcggtggcgtaattcttacggcgcaatcttcaaataataaccagaataaaatgagtcctttgtcttgacatttaagaatcacttcgtttgttatatcggcactttgggtcattgcagccagcatcaatccttttcctcttatatcctgtatcaaaggatgtaccaaaagtgatctgaatagcttttctttctccatcgcctcatccatgagattggtctcggtaatttcctgcaaagtagccaagcaggctgacgcaatgacagggtggcctccaaaagtcgtgatatgacccagttttggattatcgctcaacaaatccatcattgctgatgaagccgtaaaagcacctacaggcatgccacctcccattccttttcccataactacgatatcaggaacaacatcataattttggaatccaaagagttttccggttctcccaaagcctggttggatttcatcgagaatcatcattgcacccacttctgtgcagcgctcgcgtacttttttgagataatcatcgtttggctgaataaatccagcaccaccttgaatggtttccagaataattccagccgttttagtggttattttttgtaaatcggcttcgttgttgaaggtaataaaatcaacatcaggtatcaatggacgaaaaatttgtttgcgttcttcaaatcccatgacgctcatagcacccattgtattgccatggtatgcgttatgacacgaaatcaattggcttcttccggtagttcttctagctagttttaaagcaccttcaatggcttcggttcctgaattgaccaaataagttttatctaaaggtgcgggcaggagcgaggctaacaatttgcaatactgaaccgccggactttgtgaatattcgccatagaccataacatgagaatatttgtctaactgatcctttatggcttgattgactctaggatgttggtg

SEQ ID NO: 3118 - DNA, 24341 bp, synthetic construct
  misc_feature 1..24341: note = Synthetic
  source 1..24341: mol_type = other DNA
tcctgatagaccataataccataggtttctcccaactcctgggcaaagacaggatgtaaatattcgaacttctcaggatggttatggcgatagatgtattctttcatcatccccgactgtgcgactcctgggcgtataatggaggaagcagcaacgagagttttataattgtcacacttcaggcggcgcaagagcccgcgcatggctgggctttcaatataaaaacagccaattgtctttcctatggccagggcctcattacatctgatctcattcttagaaagggaagtgtcacgtatattgatccggatgccctggtttttctcgatgagtttcacgctctcatcaatatgcccgataccgcgctggcttaggatgtcaaatttttcaaaaccgatgtcctcagcagtgtgcatatcaaaaagcactattggaaatcctttgggaggcatctccaggggagtatagttggtaatgggctcttcagcgatcagaatgccacaggagtgcatactgcgctgattgggatatttctccagtagcataccatattcctgtaccagttttacgatggaatttccctggtgcagtgccatgggatttttggccagcatgtcgagttcttctttgggaaggccaaataccttacccacttccctaaagatggagcggtatttgaattcgacattggtaccgcaaaaagccacgtggtcacggccatagcgattgaagatgtattccaggatgacatcacgttctttccagctccagtcgatatcaaaatcaggtgggcttttacggttcagattcaaaaaacgctcaaaatacaaatcgagttccagcgggcagatatcggttatgcccaggcaataggcaatgatgctgttggcgccgcttccacggccaatgtgcatgaatccgcgcgagttgctgtagcgtatgatatcccaggtaatcaaaaaataaccactgaaatgcagctggtcaattacccgaagttctttctggacacgcgctttggcctcggtattgtttttgccatatcgccaaagcaacccttcatgggccaaattggtcaataaggcgatgtctcccttggcattctgggtgtagaattttttattttttggtgttgtgaaatcgtacttaaagtcacaggagtcaattatgagctgtgtattggcaataatttggggataatcgctgtaggcagacaatagggattccagtggctgcatcctatctgtggttttgcaaaaatcagccggtgtcaattttgacaacaacatattggtgtcgatggcacgcagaatcttatgcaggttaaattcccttttagacctaaaggtcacaggctgcaaaaccaccattttagagatcctgtttttgagttccaaagaaaaaagccccaatacttcttccggaccgataccgataaattcgttctcacgcagcgattcgggcgcattttccaaaggatatataataaaaacagactcaaattcaggcgccagcaaaggcaggggttcaccgctgaaattatgcgctgttaaaaagcggttcatctctgcaaggccttgcgcatttttcgccagagaaatatagcgtaactgctgttctgagcgcagttccatacccactagaggtttaatgcccacctgttgacagccttttataaagtcatagatccctgttacggtattgatatcggtcagtgccattgcttttacgccaaatgatacggcctgcccgatgaggtcctcaaggggaatggtgccataacgcagtgaatgaaaagaatgacaattaaggtacatgggttataggttgcgttttaaaatttcatttttattaaaaggtttaagggatgctccggcgcagcgcatgacggcatcaaagccataacggcttttcattttatccatagcggcatagagggacagcatttcctgagtatcttcaaaaagatcaatttgataggttccacgcaccagcccactaaagcgtatgccgatcaggcgcaagcgcatacggcgctggtagagtttatcgaagagttcggtgacattctttgtcaggatgtgatcggctgaggtataggcgattttgcattgtttggtctcggtgtcaaagttggcgtatcgtatcttaaccactacagtggaggtcagccactgctgcgagcgaagctgaaaagccagtttttctaccatccccatcagtatggattttaatttgatgatatcgatggtgtcctgggaaaaagtatgctcggtagaaatggatttacgctcggtgtaaggttctaccggagtgtggtcaatcccattggcttttttccagatctcaagaccgtttttgccaatcatctgtccgagcacctcagggggcatctccgataaggtctcgatggtacgaattcctattctcgataaaagctggaaggttacacttcccaccattggtattttctgaatcgataatggatttaaaaaagcgcgtacattctgctcaccaatttccagattccccttgggtttaccttccccggtggctattttagaaacggttttattgatagagagcgcaaaactaataggcaggccggtttgtttgatgacatcctgagccagttcattggtccatttataacttccgtgaaaacggtccattccggttatgtcaaggtaaaactcatcgatactggctttttccattataggggccttttgctgaattacctgggttacctcatgggataattgggaatatagttccatgtcccctttaaggattttggcctgcggacaaagttttatggccatatgaataggcatggcggagcggactccaaatcgtcgggcctcataggaacaagaggcaactactccgcgatcaccgccaccgatgataagtggaattccctctaattcagagttggtgcgtctttcgcaggatacaaaaaaagtatccaaatccatatgtacaattgcccttgccatgatcttgtttttgtaaagaacaaaattagcacaggttgtaacaaaaaagactatatttgctgttataaattgtaacaaaaatgttatgtctttattttcagacaatataagagccttacgggtcaaacagaaaatatcacaggaaaagttggcggagaatctgcaaattacaagaggcaggtacgtcaaatacgaggacggcacctcggaggcgccgtatgatattttaaaaaaaattgcacattattaccatatcagcatcgacttgctcttatcggttgatgtgcgtaaaataaacatgcaggatttgcttgaactagagaataaccgcctgatacttcctatacaggtagatgctgcaggtgaaaatttcattgaggtggtcacgcaaaaagtcaaggcgggttatctcaatggttacgcagatccggagtatatagaaagcctgcagcaaatctcgcttccttttttggggcctggtaaacacaggggatttcccgtagaaggggattctatgcctcctcatgaaagcggcagtatcattatcggcagatatgtagaacggttaggggaggtgcaggacggaaagacctatatcctgattaccaaaaatgagggtatggtgtacaaacgcctgaacaaaaacaagcaaaattcacttgttctggcctctgataactccttttaccccaactatgaagtcaaactatcggacatcattgagatatgggaatataaatgcaatatcggcagaagtgataaaaagcaggaactctccgaaactgagagtctcagggaattgattctggaagtcaagagggaagttctggagcttaaggagaattctatcataagttccaagtaaaacatcagggaaagattttttaaggagcttttcccgctatacgctgcacccgagcgccagtgaactggcgaagcaatcttttgcaccgaaccccggcacaaaaggatttccatttctatcggggctcatttcaaacattcggcttcttatgaagattttttaaccttttctaaaatagaaagattcccaatttcctagtcctgaaactaagattgtagagaatctttttctacttcaaaaaaaaaaaacgtcaataaaagggagttgaaattagtttataaaaccaaattgattttcaaacatttttccaattatgggaattggtttcttctgttggttaacggcatttatgatgccaaaaatccataagataaaaatggcgtaaccaatgtaattcaggaaataaagtgaagtcactgtcattactataatagacagaatgatatttactgcaaaagaaactaaaaagattcccaggccttgtttcaaatggtaggttaccaaatcgctttttgggtttaaatctttgctttttacgaaggctacaatccaaccaataatagtgatgtagcttaagatagataggttttttttgttcatcgttaattatatttattggtcaaaactagacattacgtttataagacgaaacccatactttgtcagctgtcatttctggttggtattttgttactttaagccgataatgcgtatcagaactacatttcgtatttcatgagcttaaaaaaagattctttttttcctcttgaaataggtacaaacgatttatcagtcatctgtaccataccttcgcgggaataactcacaacacaattcacgtttatcaaatgagactgatggattctgaaaaatgccggcggttcgagcaaatcttcataattttttaacggttttgaaaccatgatttttctgccatcaataagaaagaaagtcgtgtacgaaccggaagtttcacatctgatgatttgatccagcctcacaacatacattgcttcctgtgtgggtaaaataatccggtcaggtgttttgttaaggttggtctggagttcattaagctgttttttttctaaaaccctttgctgtaaaacagcaatacgttcgatagccgttttaagttcttccgtatctatgggttttaaaagataatcaatagcactgtatttaaaagcattaatggcatgctgttcataagctgttgtaaaaatgaggtgaaacgaattaaaagtaatttgctgcaggacatcgaaaccggttccgtctttgagcatgatgtccataaaaaccaaatcaggtttcaggcggtcgattagttttacggcttcttcgacactttgggcataagctacaatctgtatcgtatcgggagcagtcatttcaagcatgatagacaacgcctctcttatgcgctgttcatcttcaataataatagttttatacatctttataatattggaatatttaaaatcaccaaacagcccgattcgtctgttgcgatatcacgttcgagaacctgaaaaccggcatacggattttctttctgcattttgcttaatctttcatctgtaattttagtagataaggattcgtgattgtcttttagctttaattttcgggaagcagccagaccaattccattgtctttaatggtgcagaccaggtttttttcatcagtgtgctgtgtaaaatgaattgttagtaaacccttaacttcttttacctgaggttttaagccatgttcaacagcattttctataaaaggctgaatgagtagtggcggaatcaacgtatccctttcaacgctatcatcgcattgaattcgatattcaaaaccattattaagacgcagctgctgtagttcgatataattttttaaagtgttgatctcttcttgcagcgaaatggtttctttacgggactgctccaaaacctgacgggtgagtttggcaaatttattcagataagaaacggccggaagggtatctttctgaagaatcatgctttgaatatttccaagggcattaaaaataaaatgtggatccatctgagaacgaagcagtcttctttccagggaaagtgtcgctgccagattctctatggtttccttttccatcagctgtaccttaagttcgctgttggcttgctcctgtttgaggaaatcttcacggttttggtaataacgctgacgataataatacgatcgaaacataaataccagtccaatcagtaacacacctgcaattccgtagcccaaaagtttgttcttttgtaccagttcattttcgagttccaattgttttatgcgttctatctttttggaagattcatatctaacatcggcattttgcaatattttttgagtcgattcatcatattttaactcattgtatttggcgtattctgcatcataactgtaataggcttcaaagtcttttcgttttgcagcaacatctttcaggcaatggtaaaaagtcgctaaaaggtaattgtctgtgtatggaaggctttgctggtattttattccttctctaaaaagaagttctgccttggtataatcccctttttgtgtataatgaaatccctgaagcccaatggcacttctgtagataatcctgatgttgtattgtttggcaatcacggttgctttttcaagattttttaaaaacgatttctcgtcaataggttttggtcctttcgaataaaggtctgccagattgatataagcaattccaatattgcttttactgataatagtactggcatttttttcggctaaaataaccgttgtgttaaaaaaaactaatgcctgttgccactttgctgtgttttccttttcaagattatccgttaaataacttccaaaagcaagtctggcatgcaaaatactttcattatcaccagctttggaagcgtggttcagggcttcccgtgcatatttttcgacttttattggtgaagcaggggaaaaaagatacgatatatccgaagcgatttttgcgcactgatcgtgtgcagctgctttttcaaaaagtttgtaagaagccagaagatattctatggcctgctgtttttggtcaatatacgattttaatgttcccatggccaggaatgcataagcctttggtcgtattttattggtctttcctgataaataataggcactgtcagcatagtgtgaaaactcttttaagtgaagtaatcgcctctgggttaaagctaaataagaatagcaaataatcttgtcttcgatattatttttcttttttgccagatctaatgcaagctgctgcatttttttggatgaagaggtatcagtgaaacgtttggaatatccataagccgccattttttcaatcgaagatgctttttgggcatgggctgtaaaagccaaaaaaagaaaaggtaatagtgaaataacaaatcttaaagggttggttttaaatggcaaaatgatagaagtggagcgcataaatagtaatattaccggggaaaagtacaaatagtatgattactgaccaaacatttttaggctgaaatatttattttaaatggtatctaagcatggttttaaaacattctaaaaccaacattttacgaatatcatttcttgctgaccaaataaaaatctaaacacaccatttgccaattcccgattgtagtaatttgatgtatagagtaatcttgctgtaaatatttttttttaaaaatcctaaattatgaatacgaaaaagtttacattagtgataatcgccttttgttttttgactggactgacttacggacagcagctggaagacaaacgtgtcaagatagaaattaccgtaaaagacggcaataaaactattattgccccggtgcggactgcaacattctcctttactacttctaccaacaatggtactgcaactgatggtacggaaaagaaggcgcagacaaaaaattattatttatctatagattttgaaaagccgaatattgccttgttaaaagcctttctggcaaataaaaacggactcgacggccaaatcactatggtagattcttatgggaaaatgccttcgagaaaattagaatttacaaaagcaaacatagattctttaagcgatcagattaccgcagattacaccagtgcctacatgtcaattatgtgtacgacattaattattgatggagtaaatattgaataatttatggaagctttgcaaaaattcacaaaaaaaggaaatcagtatgttatgaaaaggcaatatggttttggtctgattgtagttttcggaatggcagcttttacttttgccggcatatggatgaaaaattcagcgatgatctggatttttggaattctgacagttttatgcctgatttcactctttataaaccacgttataatagatatgaaccaaagagttatcctaatcaaaaatgctttgattattgctccggttcaaattccattgagtgattttgtcaattttgaagtggttagaatcaaacagtatttcgttaccataaatgtctcactgaatctttattatttaaaaaaagggaaagaacagtgtaccggaattgctcagggattcactaccagagccatacaaaatttacttaatgaaattcaggaaatcataaaagaagatgaaaattcaggaaaaatataacattcaggaaacagccaataccttttctttttgtcccaaaaagccaacacttgctatgtcatggtggtttttggcgggtatccttgccggtattttgctattattgttttttggtaattgtcttgatcaagcgatgcgatgggcaatttatattttaatgggatattttgtgctgcatagttggtatgatatacaaataggaagcaaaatccgttacacttttgatgccaatgaaaatgcggtttacaaaagcagtccattgagagcaaaaacaaaaatcatgaaactggaagaaatcgttattttcattcattcagaaatgggaagttcgtattatgccttgggtgctaaaaaaaggcaatttataaaaagttatattataagtgaaggttttagtgcgggtaaaaaatgcgaaataaagcaacaggcttatgaagattttatcttgatgaaaattgaaaaattacaagattcagttttaaaaaatactcaaatcaaaaacacttaataatatgaaagttaaagcttctgtcgcatctgagaataacttttatcttaggaatttaatccagtcaaaaatgaatacgaaaggacattcctatccgaggtctattatgttgcaggcactaagcagtagcatacttgccgatgaaaggattaagctataaagaagtactgatctattatttttttaagagatactagatcattttatctttatgataacgcagcagccactgttccattttttgaagcagtttgacttctgtatggtttcccagcggatcatccagccccattagcgtcctacttaaattaaattttccattctcaaattcacaggtaaatttaggaaactcatggtgtgataaaatccagctgttaggtaactttttttttatttcaaatttcttcatagtaaagcatggcagcagttattgtttcaatccctgtataaactgcaaaaataaagaattatttttgggcgtgttaaaagaaacttttcgaaactcattcaagagttgttcaatttcaaaagttgctttaagggttcagccttgttccgcttttaatcctttttcttttgcgattatttttgaaaactgatgcttaaaaattgtattttgtcttagggttattgaataaatgaaaatgatgatgaaagatttgacgttttgttttactatctaatttttacttgctatttttattataccgcttttggattccaaagggtttggaaaatagtggtataatgctttcaagatttgaatcattacaaaaaaaataaaaaagtcccaccgaagcaggactaaagattttcatctacggcatatagccttattgtgataagattaaaagattagaaaatttaatctattgtaaagatatagaaaaaaaataaacccaaaagaagtcatttgtctttttgaagtttttctaaaaatgtagtcactatggaaaaaatattaggattagatttagaaacaaaccgcattggatgggctattgtgaagcagggcagcagtgagtttactcttgtggataagggggtaagagtatttactgcgggagtgaagtctgaaaaaggaattgagagttcacgagctagtgagcgcactgcatacagaagtgccagaaaaataaaatacagaagaaaactcagaaagtattacaccttaaaagtactttctataaataaaatgtgtcccttaactgttgatgaagtcgaaggatggaaaaagtcaggatttaaaaaatacccgcttaatccagcttttttgaaatggcttcgaactgatgagcagaaaaaccttaatccttattatttcagggacatggccagtagggagaaagtaaccttattggaactcggaagagcgttttatcatattacgcaaagacgcggatttttaagtaataaaacggatcagtctgggcagggaatattagaagaacacagtccgattattgagtctatagttgaagaagtaaattcaacagcggagcttctttgtgaactaaaagactatttttttaatcttggaatcattgcagagaataacaaagatggtttaaaaaaaaatctggaccagggagacaccaaactaaaaatcttatataattcgcttagaactattctagtagaaaatcaagataatcttagtaaagcaaagcaagaagtgattctccgactttacaggcaagaagatttaggattaataaaaaaggaaataggaaaaatttcgcaagcaatgagtgatggcaatttttccactttgggacaatatctctttagcttatacagcaaagagagaataagaaagaaatatacagccagagaggagcattatttgaaagagtttgagatactttgtagggttcagggaattcaaaatattgaccagagtgagcagttgccagaaaaaagatatgctggactagccagagatttatataaagccattttttttcagcgtcctttaaaatttgaaaagggtactgcaggaaaatgcccattggaaaaaaataaatcgcgttgtgctgcttcccatcctgattttgaagagtaccggatgtggaactttttgaataccattaagtatggaaggtcatcagaaaagacattgcgatatctcactctagatgaaaaactgcgtctgatacctaaatttttgcgaaagaaaaatactttcgtctttgaagatttagcaaaagagctaatacccaaagaggcaacttcagaattttataaatcatcctcaagagaggaatttgattacttgttcaattataatccaaggcataccgttatgggctgtcctgtttcggcttccctgaaaaaagcaataggagagaattggaaaataaaaacattcacctatacggctctaaactcaaatggtttggaagtttgcagatcggtcaattatggtgatttatggcacatgctcagtgttgctacttctaatgtttatttgtttgaatatgcaaaaaataaactaggcctggatttgcctagtgcaaaagcattcagcagtattaaatttagaagagagtacggaaacttaagccttaatgctattgataaaatacttccttatttaaagcaaggtctgcagcattcccatgccgtactgatgggcaatgtttcgaatattgtcgatgggacgatatgggacgatccggttaaaaggaaattcattcaggataaaataggttttgttattgaaaaccataccagtgaaaatggtttggtagaggctatgaattctttgataaaagaatataaagcaaacggtattgagtattcgcaagtcgctgagacggggtataaaagcgctttaaatgctaaattggtttcatttttcagatataatgcccgtgaagataaaaatactattttaaataaactgcttcccattttcattgatcagttaaaagggaatgatttgatcaaaaccaagagcttaatggagaaagtgatggcattcttagctggagataatgaagaacagttaaaattgtgttcaagtgaaagacggttaaacttgctttataatccatcaaatgtgaagactttcaaaaacaaaataataaaagatgagtttggaaataaaatagcgctattggggagtcctgtgatagactcagtaaaaaatcctatggcaatgcgaaccctgcatcaattgcgagcgttgctcaatactttaattcgtgaagggcaaattgatccaacgactaaaattcacatcaatatggctcctgaactcagtgatgccaacaaaagaaaggcaatcctggattatcaaaatgaattaaaaaagaaaagacaagaagcgcgggagcaaatcggcaaactttatgcaacacagggtaaagagggtttaagtcctactgatagtgacgtgctgcgttatcaattgtgggtagaacaaaataaggctgaaatatatgagggtaacaaagagatcagtatctgcgatatagtgggagagcatccacgatataatattttttatacgataccaaggagtatttcaagggataactcccaaaggaatatgactctttgcagtaaagaattcaaaagggatactaaaagaagtgaaatctttacacagttgagtagtaagcccgaaataggctcaaggatagttcattggaaagaagaagctgataagctgagcaaagatattgaagcactcaactgttctgtaaaagcagcggcaagcagggaagcaagggactcaaaaattagaagaaggcactatttatctttaaaaagagattacttacaagcaaaattcgagcggtttttttggactgaaaataaatcagcatttaaaaacggcaagagccttgagacaggaaatataagtaaacatattcaatcttatttaaaatcttattttgagagagttgaggttgtccaagttgcactggttgatgaattccgaaaaatttggaaaatggaggaaaattatcaaaaaaatgatttaaggaagcattctcattgtgctattgatgccattatagttgcttgtatgacaagagataagtataaaatgttattctcggcctgggatttagaggagaaggagtatattgaagaagcaaaaacactattagcacagtgcagaccgtggaagaattttactgaggacctgaagaaaattgagcatgagattcagatttcacatcatagaccagataatgtaaaaaagcaatcaaaaaaaattatcagaatcaggggaaaaaagcaatttgttgcagaaatggaaattgacccacagggcaggcgtgctgttaaaaaggacagcaatcaaaagatagtttataaattagataagagtcaagagaaagttcccagatttcagcaaggggataccattcgtgggagtctgcaccaggaacatttttacggagctatcaaaaacccgttgaatcatgatcaaatatactatgttatccggaaagatttgctaagcattaaagcagcggatgtggagtctattgttgaccatgttgtaaaagaaaaggtaaagcaggccattgagaataaagtactgctcttatcttcaaatcagcaacaaaaaaacaagttagctccaaatagtaaagtatggatgaataaggaaaagggaattgcaatcaataaagtaaggctttatgctaatgcggtaaaaaatcctttagagataagagaacatagtgttttgtcaaaatcaccacacgagcataagcaaaaagtgtacgggcaaaataatagaaattatgctatggttctatatgaaacagacgacataaaagaatttgagctgattaataattttagtctggcaaagttcaaaaaacaaggattgggcgattacccacttagaaaggaaaagcaggtcaaaggtggtaaaagactaattcctgttgccagacgtaataatagggatgtggttttaaaaaggggacttcaggttgttttttatgatgatgaaagggaaaaccccaagaatgtattagaaattactgattttgcaggaagaatttatactatcgaaggactgaccattcaacgcaggaaatataaaaataaagagtttgtgtatggtaaaattatactaagatgttttaatgaagctagaggtttcgatgagatcataaaagaaaattttaaaccagctggcggttttagattgggggaatataaaccgataagaaatatgaatcatatccagttttctgcatttgttgaaggaatagattttaaagtcttagcttcagggaaaattgtaaaaatttaaattatattgaataactttgtaatcacgcaattataaataaaacaggcttatatttgatttttagtgatttacatttagggttgattaaaatagaattagcacttttgtgctatgaaatgttgagctagtaaatattgtggtttgattaatgattagaaattaaggtatcgaggcgcttttttcatcagaaagaagaattactttggattactttaaaaaatgccgctttcatggttttataatccataattgcggcattttttgttggaaagtaaggttaacttaagatctggagcggcttagattgtcggaaatttgctgtatgattggctgctcttatacgattctttttcctgaagaaaaacagcattattgccagaatccttatagactgactggcatagaggctggcaaaaaagtaaaaaaagctacaatggataaaacaagagcagtttaatataaatatattaaattttaaaggaggtcttggcaagtactattttaaagctatcagctgcacattcgaacctaaacttcttaagcattcattttgctggttttatttttcgaaataacactgtgccacgattcggccacaagaattagaatgatgattattaacaatacaggaaataacattttcattcttttatagatttatataattgaaattaaatcggttccaaattaaaatttgcaacaaagttctgaaattattgacaatagttaatcgtaatttcgattgctttttaagtaagaataaagagcaaatgatataaaaaaacatctataaaagctgaaattatgagaacaatcctccaagaaccattcaataaatttgccaaaattactatgctattgattataatagttacgacagcatttgtccctttttcagaatgccaaagcacaagcaactaaaaaaaaaacaaatattttgatgatttttggtgaccatatcggtcagtcaaacattagcgaatacacacatcgtttagtaggatacgaaattcctactatcgaaagtctgcgaaagaaggtataatgtttaacaactattatgcagaaaatagttgtactgccggacgttcaatacttattataggacaaagctgttatcgtaaaggcaaaaactcatatagtcaaatactgcgtatgataatttggaacgcagcttataaattaatttttatttcttgattttttttgtaattttagttaaaactgctgcatgccggatatatcattaaaattaaataataagatattgtgcacccttacccaaaattatgacaagagcttcactttggaagaattgactaaaaccgtactccctcattttgaaaggatgaatattaataatgagaatttatccttggaaagagaaaagcaagctaacgttttggacgctttaatatttttggcagataatggcctgatatttttaaacccgcttactgatgaaagttccattaagattagttaaaaagagcttatttaactttgttttgatatctttaattttctttgtttgcattattaaaaaagaatatcatttagtaatgtttcgaacttaaacttcttgggtgttgattttaatgagttttattttttataaaacatcatgtgccacgattttgccacaaaacttaaagtaataatactatgagctttttatgctaataaagtttcgaatcgatgtgctctataattactataattgagattttaaatattaaaatcgattgctacaaaacctaaattggttatatatcttcttatttcgtttaaaaaatttccgtacagttacatctgccattttagctagaaattttaaaatttcggtagcttcttccaaagtaacattcattccttcatcattaggcattttttgagcttcaagaggcgtaattcttcctgtatattcatattctccaaattccatgaccaaaatgtttttaagataaagataataaattttggtcaattgtttgttttacagctttttgtgttctggttgtatttacttagttaaagtaataaattgaattgagcgattataatttttctttgattatttcggaatggtaagcttattttatttaaaaaacaacggtttttttgtcctgtagagtgaccccaaaaggacaaatcacgcaccattttatggaggatttgaagagattggcttactggaagtagaggctgtctttcattggctttatgaatttggtttggatgtcccgttggggattgatggaattcgtatctaatctttaataggagagctgcgaattctaaccttaagatttagtaattgatttagaaggaatattatttttcagaatagtatgtgcaacgattgtgtgataaaactaataatttaaagaactttatctaagctttttcaagtgctacggattttggaaataaaatattattctcaagatgaatatgcttgtgcaggtcacgttcaaattctttaagcattgcaaaagttactttataagtattgcaggtatctgctggagcggtataatttttggttaatgcagcaatttttttaaagcgttgtcctactgtatcatgttcttctttaattaaaagtatttgattttcaagagttccaaagtgtgctatctctaaaaataatcctttcgcatgcgcctcatttattttttttataaaaggaaaaaggatctgttctttttttctcatattagcagagagatctaaggcagattcagtaaataaagtattaatttcaaagaggtcaggatatgtttcaccatgaagagtacataattcatttaataatttaagcaacacgggtgttttttcagccacatatcgatgatgtgttttttctatatagtctgccaacagatccgatgaccatgatttataattaaaagattggttggccgaattatttgttgcacgatcaagctcctcaattaaaagagactcctcaatgcctcgttttttgcaggcttcttttaaggtacgatgacctttataacaaaaatcaatgctatattttgaaaaaattgctgccgtcctaaaatcatcagctgcgatttcgccaattgtggttttgtttgttgttttcataggaagttataaagacttaaggttattaattagtatgaatgttctttttcaggttggcattgtttgataataattaaggccgtcgttagcatatttgagaaatcaataaatggaattgtaatttcatttttatctataagattttctgcttcattttttagcatttttatttttagcattgctaaatgcgtgtcgtgttcatcgctggcataaaatgaagttataagtttctgtagttctttttttaaaatttggtacggttcgtagttatttttaatatttacggttgaaaatttgggaagaaggattttggaagaaaaaataaatgcggcaatagttttatcaatgttgttggatgcctgatgagcaaaaaccaaagcttcaagaagtgaattagatgccaatctatttttcccatgtaatcctgtccgggcacattcaccaatggcatataaatttttgattgtcgtaacaccgttgcggtctactttaataccaccacattggtaatgagccgcaggaacaattggaaccagatctttttccggatataaacctattgcattgcaatgggcggaaatagaaggaaaatgtttaaaaaaatcatcttgatctaaatgtctacaatccagatatacatgttttttttgagtttcgagcatttcgatactaatagcacgggaaacaatatctcgggtagctagttcacctcttaaatcgtatttaaaaagaaatcttttgtgttcgtcgtttataatataggctccaaaacctcttacagcttctgaaattaagaatagcggatttttattcccggaagctaatgctgtagggtgaaattgcatgtattgcatatctttgatttcgactcctgcacgagccgccattgcaattccgtcaccagtagcaattgcaggattggttgtgttttcaaagagttgtccgcagccacctgtgctaagcacaatagctctggtacgtatatattttattgcgttattgttcttatcataaaaaaaagcaccggtgcaattcacttcattgcgctttgtttcagtatttaattctatgacctgatgattttctaaaagttcaatatttgctgtttgagtgataattgaaaggagctttttttcaatttctaatcctgaactgtctttatgatgtagaattcgatgttgtgaatggccaccttctagtcctaaatcccattggccttccttatttttatcaaatatggcaccaagttctattagttcttctaatctttcgggagcttgttgaataaccattttaacaatttcttcatcacaaagtccagcgccagatttcagcgtatcttttatatgctgttcaaaactatctttcaattgattggtgactacagctattcctccttgcgcaagttgcgtattggtgttgttagccttttcttttgtcatgatacaaatagataaatcggggcgttttcttgccgttttaatggcaaaaaatagtcctgaaataccagaacctactattagaatgtcagtcttaggcatatttttaggtttaagaaagtttaagatttttatgggtttgtgcgtttcacgcttctcttattacatttattttaatccgcaacatttgttttgtgatgtagataagctgttttaggtgtatttatcttaataaagatttgtttaccaattagtcttgtgtggaaggagtcggaatcagctttttataaaatactgcttttaaagactcgcacacgattccgacttctgtagccacaatgaaaacggtagtaggggcccgttttaataaattaaataatgacttatgtcaaccaatatcaagctacctttaaaatatgaattcatattcttgatgtgcaacatttttagaggttcggtattttttgaattttcaaacatctaaagcactaataataccgagttttttttgaacatcactccttaaatgttcgccaaagatcattttttattttaagtacaaaacaagttgctcaaggctttgattgaaagaacatctgggagtatattctcccagatgtttctattttagtttactaacttttttttctaagggtaaggtcaaagacaaaccagcacaatgccaatactccaaatccgaaaatagtatcgccgatagccctaagccatttcaaggttaccatcgctggctgctgcattagttcggccgaacgtgcataccacattccgtgctcgatactttctatagcttgccaaattccaacaggaagaagactcaataaagccatagccagcaatccaatattggtagaccagaatatgaatttcattgctttttcattccatatctcatgtctgtacaaactgcggagcacaaatagcatcaaaccaattccgagcattccatagactccaaataaggcagtatgtccatgcaaaggcgttgtgtttaagccctgaacgtaatataaagcaataggcggattaatgataaaaccaaatactccggctcctaagaaattccagaaagcaacagcaatcataaaatagataggccatttataatccttgatccattgtgttgattttgaaagtttgtagttatggtaggcttcatacccaattaaaaccagaggcacaatctccaaagcgctaaaggttgccccaagagccatcacagcagttggcgttcctgagaaataaagatgatgaaatgttcctaaaattcctccagacataaaaatgatagtagagaaaataacattcagcgttgctgtttttgtttttaacagacctaaacgaacaaataagaaagcaattactacagtagcaaacacttcaaaaaagccttctacccatagatgcacaacccaccatctccaatattcagcaattgccagattggtctgtcttccccacattaggccagctgcatagaaagtagcaatagcggtacatgagattaggaacattatgataagatttctttcgcctgtttttttcttcagtaccggaagtaaaggacgaaccattaatgccagccaaagaaacaatcctacaagaaggaatatttgccagaatcgacctaaatctacatattcgtaaccttgatgaccaaaccagaagttttctaccaaattaagtttctgcattaccccaaaccattgtccggccattgagcctaatacaattagaattaaagcatagaataaaaaatcaacaccaaatgtttgaaattttgggtctttccctgcaacagccggtgcaatgtataatccagttgcaagccaagcggttgctatccagaatatagccagttgagtatgccaggttcttgttactgcgtaaggcagaatctgatccagaggaataccaaagaatccgtttccttctacgccgtagtgtgcagtaatgacccccattacaacttgcaatacaattaaaagacttacgacccaaagatatttttttattcgaaacatcgaaggtgtcattccttgttttaatagtggatcctgaactggtattttgaaatgctcatcttcgcctgatcgcacatgataaaaaattagaacaccgatgcaaaataacagcagtatgatactaactcctgaccatacaagaagatctttggtagccacatttccaactaattcatcagatggccagttgtgtgtgtatgaaattttctgatttggtctttctgttacagttgcccaggttgcccaaaagaaaaaagcgttcattttatgcattctttccggatcttttatagacatttttggaatcgcataattatggcgtagtgtctcaaatttgggatcatccataaacaacccttcataatacttactcaaataggctatggcttcaatcctgttttgagaaatggttatgatgccagtactactgtcgtaggtgtttttgcgaacatcattttgtagcctgattttcattgtggcctgctgctcttctgtcagttctgcaaaagtttttgcatattccttttcggataatttatccaaaataaacatggcttctctatgcagccagtctgcagtccagtctggcgctacataggcaccatgtccccaaatagtaccaacttcctgtccacccatactttgccatacattctgcccatccttaatttcctcagaggtaaagattacggtgttgtttggcccaactatttcggttggaataggaggtgcttcctgatagatctcatatccgtaatatcctaagacagaaaaagagatactcatcacaagtgcaaaacctatccacagttttttttccttgttcattataataattttagctttttatattaaaaaaaatgctttattctacaattaattttcctttcatcatcgatacatgtccagggaatgagcagataaaatcgtaagttcctggttcgtctattgtaaactcgataacatcgctttcgccgccgccaattatttttgtatgggcaattacttttgctttttcagatgcaggtatgtaatctgtatcttttgcatctacagctttaagtgtaaaatcagaaatatcagttccaggttttaaaataactaaattatgtcccattgcgattttttccatcttgccgacatgttttagtgtaagagtaatttttcctgcgggagctcttaattcagttacagaatattgcatttgatcattgctctcaatctgaagatcatttgtagcgactggggtttcgatcggactttcttcgtaaggttcctcagttgtgggtgttgcaactggttctatgtcttttgaatctttttttccgcatgagaataaactgaaaattgcaaaggctgctacgagggtaatcttgaaagactttttcattgtttttggtatttaaatgttattaaattttattactgtaaaagtatggctatcgttttttttggtttatgattctaatcataaaggcgatttatttttgtttcaaatcttagtgaaaactataagtaaaatttataaaaccattgcgtcccattcgtggtattttgttccagtctgaaaaagtagcgtaatatttatcaaaaatattttcaatacctgcctgcgcttttattttgttttgattacaatcaaagctataacctgcattgatattaaatatcaggtaatcgggtgttttggtttgtccgtatacttttgcgaagttattttgtgctagatttccagaggcaaatattcccgcagtgattttttcttttttaaactctattccggcattatatcggagcggacttataaaaggaaggttattttcctgatcatctttgcccagactgtaggcgatctgtgtctttaaattccagttttgcaaaaaggagtattcaagattaaaatcagtattaaaaattatagcataattaatatcgtcgtagatttttatacccgatgctccaatcgtcataggcagcgtgcctgggtcaatttttccgatgatataatctgagatatagaaatacgaagccgtaattttagacgttagcctgccatttttataaccaaaaaaaaagtttccttctactgctttttcattttttaaatttggatttcctatataatcgtaaaaatcattgctgttatacagataaaagccatagccttcagaaacagaaggtgctctttcggcataagccaaaccaaatccaaattcaaacttaccagtatttttggtataatttccggagaggctttttaaggatcggttttttgtggcatccatttcaggataaaaaatacgaaggctttgtagtccaaaatcattggctactgtattagaatgaaaacctagattaatgctgattctaagaatggtttcgggtgagattgtaataatatcttctaatgataatccgttatatagcgttcgaacatcaggccaggtgtacataaacatcagattttcagttggatcaacaggatacattgtcatctcggctacagccttattataaaaagaattcaaatcggctagaaattcatgattttcgtgttttccttttattttagaataaaaaccataggtgtcagaccagcccggcatatccatatgaataggaattgctggtcttttagtatcatccattttatgggtaatggtattaaaatatccttttgtttcccaaccagaaataacagcagaatctggaatgtacttgtaactcaatgaaatgattttagcttctgccaataaaacatccattggaagcgccggatagccaacattcacagctttatcataaataatcgaagtttcgagtacattcttcttatcgataaaatagccagcatttgccgaaatattgtacttggtaaattgagaaaaattaatttctttttcgtttcccgctttgtagttttcggcatcacgatgcataaaatcaacatgcgcaaaaaaggtactgtcagtataacctaaagcggcaccaataatcttttgctggttattgctttcataaccagaagataaactgccattccagccgttttttctgtgtttatattgatttcgttttagatctatcgaacctccaatcgtagcgccatgacagctggcctgctgacctgaggcaactgttgcctcagataaatttgaaatctcgacataagaagtcacaggatccattttatcggtacaggcaccaaaaatccgcataccatcaatggtaattacagtacgctcggtcgacatattgttaatcgtaggttcccatgcatatgcacctcttttaatcatattcatttttgaagaacccattagataatcttctacagaggttaacgatttgggctgtttaagattcaaaggtgttttttttcctataactataatttcattgaga

SEQ ID NO: 3119 - DNA, 24329 bp, synthetic construct
  source 1..24329: mol_type = other DNA
  misc_feature 1..24329: note = Synthetic
tttatggcttttggtatgatttattggttggttccaagaatgacaaaagggcctttgttctcaactaaattagctaatttccatttctggattggaacacttggaattatcttatatactttaccaatgtatgttgctggttttttacaagcctcaatgtggaaacaattcaatcctgatggaacgttaacttatggtaactttctagaaacagttacgcaaatcatgccaatgtattggatgcgtgcaattggaggtactttataccttacaggaatgcttgttttagtttataatatcgccaaaacattaatggctaacgaaactattgaagatgaattagcagaagcaccagaattacaaaaaatcagtagtagtagaataaaaggtgaaaaattccacccttggttggaaagaaaaccaattcaattaacaattcttgctacaatagcaatcttgatcggaggagttattcaaattgtgcctactatcatggtgaaatctaatatacctacgatagcaagtgttaagccttatacaccactagaattagaaggacgtgatttatacatacgtgaaggttgtgtaggttgtcactctcaaatggtacgtcctttccgttcagaagtagagcgttatggaccacaatctaaagcgggagagtttgtttacgatcatccatttttatggggttctaaacgtacaggtccagatttattaagagtaggtggtaagtacaatgacaattggcatttcaatcacatgtggagtcctcaaagtacatcggcaggttcaattatgccaggttacaaatggttgtttgacaataaagcgttggatatttcagatatcgaaggaaaaatgaaagtgatgcaaacacttggagttccttatactgatgccgaagtagcaaatgctaaaaatgcaatcaaagaacaatcacaaaaaattgaaaataacctaaaagccgaccctgactttgtgaaaagttatgaggacagtaagaagaaagctgctgctaaaggagaagaatttgtccctatgcatcaaagagaaattgtagcattgatctcgtacattcagcgattaggaactgatattaaagtgaaagataaaaagtaatttactaaggggcctaagattctaagcttgtgaggaacgctgtatctacaaaagcttaggagcttagagtctaaggacctaagtaatttaaaactaaaaaatatgttcgaacaaataaaacacaatatggagaccatcgcgggagttgcgatctatccgatactatcactattaattttctttatattctttgtaggacttggtatctgggttctatcttataaaaaagagaaactaaatgaattaagccaaatccctttacaggataattaaatattcataaaataaaattggtctggatgcgcttttgtttaatcaaaagtaaaaccataacctaacctaaataattaatcaattccagctgtactatacattttttgagaacgtataataaagcggatatcaaaactgataaaatgaaaaaattaatcccagcatacgtaagagtacccgtaattttctttttcgtgtttggcgctatggaatactttatagattctggcgatcgcgcggcatttataaaatacccaatggtatctttatttctatttgttttcttatttctattaattgctatagaaattactgttaaagctattgataacattacgtatcaaatgctaacggaggagcaaaaagaaaaattagcagttgcaagcactgtgagctataaagaaagtgcatggttcaagaacttaatgcaaaagttgacaaaaacggagcctattgaaaatgaagcaaatttgttattagatcatgattatgacggtatcaaggaattagataataatttaccgccatggtgggtgtatttgttttacggttgtatcgcgtttgcactaatctattttgttagatttgaaatgatgggtggtgacaaccaagaaatggaattgaaaaaagaattggctcaagccaaaattgatgtggccgaatatatgaaaacggcacccgatttaatggatgagaaaacagtaaccttattgaccgatcctgctgatttagctattggaaaaacaattttcacaacaaattgtgctgcttgtcatagagcagatgctggtggacaaattggaccaaacttaacagatgatcattggattctaggtggtggtataaaaaatatatttcacacccttgttaatggtggtcgtgatggaaaaggaatgatttcttggaaagggactttaaaacctaaagaaatgcaaaaggtagcaagttatgttatctctcttaagggaagcaaccctgttgatccaaaagcaccagatggtgaaatttgggtagacgaggccgcagctctggaagcaaaataacaacactgattcactaccttttgatgttaaataaatggtgtcaaaaggtagaattaaaataccaattaaaatgtcaaaattaccaaacgaagcttttagagataccattggaaccattgatgaccaagggaaaagaaaatttattttccccaagaagccatcagggaaattctatgattatcgcaagtgggtgagttattttttattgatcattttagtagcaaatccgtttataaagataaatggaaaccagtttatgatgttcaacgttttagaacgtcgctttaatatttttggctttcctttttggccacaagatttttacattttcgtattgtttatgattgtgggagtggtctttgtaattttatttacggtcatttttggtcgaatattttgtgggtggatttgcccgcaaactattttcttagaaatggtttttagaagaattgaatactggattgaaggtgatcgtggtgctcaaatcagactgaataagcaagaatggaatgctgaaaaaattaaaaagaaatccataaaatggacactttttttaatcatttctttcgctattgcaaatgtttttctggcatatatcattggtagtgacgaactaattcaaatgattgaagacggccccgcaacgcatctaagcacgctgattgctttgtctatttttacggcagtgttctactttatttttgtttggtttagagagcaagtatgtattatagcctgtccgtatggtagattacaaggtgttttattggataacaaatccatcaatgttgcctatgactttgttcgaggtgagaaagaagtaggaagagccaagttcaataaacaagaggatcgcgcaacaactggaaaaggagattgtatagactgtaagcaatgtgttaatgtgtgccctacaggaattgatatccgtaacggaacgcaattagaatgtgtcaattgtactgcttgtattgatgaatgcgatgttataatggaaagtgtaggcttgcccaaaggattgattcgctacgcctctgaagatgaaattgagaaaaaagaacctttcaaattcactgcaagaatgaaaggttataccgctatcctggccatattagtggggattttaacaggattgttgtttttaagaaccgaagttgaaacggttattttaagattacctggtcagttgtttgagcacaaaggggataacatcagtaatgtgtttacgtataagattatcaataaaaccaacgacgactttaatgatattcactttaaattagtgggtattaagggaacgttgaaacttgtgggtaaccaacatttaaaagttggtaagcaagaaatggtcgcaggaactatgtttgttgagatcaatcagtttatattagaaagtgataagaccaaattaaaaatcgaagtctttgacggcgataaaaaaatagaaacgagcacgactagttttttaagtccgcgtagtttcgattaaatacaaatcccgaaagaaatttaaagtagggaaattataaatagattacatactatcgaaattatggaaaatactaatccaaaagacctgaataatactgcatctatcactccctcaagtggtaccggtattagaattaattgggggacaggaatcgtaattgcaattgcattgtttatgagcttcattttgtattttgtaatcaaagtgcaatcgaattcaaagtacgataatgaattggtcgttgaggaatattacaaacacgatgctcgctttagcgaagaaatgacccgaattcaaaacgcacatgatttggctcaaaagcctgttattagtaaagcagctgaagggtttactgttgtgtttccagccacttttacaccagaaaaaatcaaaggaaaagtatccctatatagaccgtctatgaaaaacttagattttgaaattcctatttcgctatctaatccaactttgctcatacctaaatcaagattggtaggcggtcgatgggatattaatatggaatggcagtacgatggaaaatcgtaccttaccaaagaagtaatttatgtagattaagttttattagctgcaaaaattcaaagtctaaaagatctaaagtttctcagttaagtagtttacttatcaagcaattcaccattaatacaatgttatatactgccttcatatttggtttaattagtagtttgcactgtattggtatgtgtggacctattgctatgatgttgccggtagacagaaacaatcctgctaaaaaaacaacgcaaattttaacctatcacataggtagattaacagcttacggaacaattggatttgtttttggattgctaggtaaaggattttttatggcaggtctacaacaaaacttatccattatcataggggttgctatgatcttaattgttattataccggagaaaaaatttgctaagtataacttctccaagccagtttttaaaataatttcgagagtcaaacaacaattaggaagtcagtttaaaaataaaagttataaatcattgtttacaataggtttgttaaatggctttttaccctgcggaatggtctacgtggctctttttggcgcaatagccatgcaatcggctagtttgggagtgttgtatatggttttgtttggtttaggaacagtgcctatgatgagcgcagtggtttatgtaaattcatttctaacactgcctattcgcaacaagattcaaaaagcaattccctatgtggctgttttgataggtgtactttttattcttagaggattaggattagggattccatacgtttcgccttctaatatgagtttatttgttcaagcgaatcccaactgtcattaaaaactattttaatttaatataaaattattcaacatggaaagacacgatctagtacacgaattcccagaatacgcagagaaaattcacgaaatgaaacaaagtgatgctcatttcagaaagttatttgatgaatataatgaaatggaacatgaagtacaccgcgtaaatacagatacagaagtggttactgatgggcatgcacatgaattgaaagccaaattattgtttctgaaagatgagttatacgctatgttaactaaggaatagaacagtaactgactatttattgaaaactaaaattcgcaaattgagattgtattaaaatcttaatttgcgaatttttattttgctggaaaaggttacttttttacattcgattttatagaggatcccaattgtcagttcgagcggattccaatgttagatcaagtgggtatgaatttgacagttcgagctcactctaattgttagatcaagtgggtaggaattgttagttcgagcgcactctaattgttagttcgagtggggaggaatttgtcagttcgagcgcactctaattgttagatcgagtgggtaggaatttgttagttcgagcgcactctaattgttagctcgagtgggtaggaattgttagttcgagcgtactctaattgttagttcgagtggggaggaatttgtcagttcgagcggactgcagttgtcagttcgagcggagtcgagaaccatcatcatgtttttactgcgttcgaaacaataaaaaaaagtactaatcagtcattatatcgtcatcgaaaacaatttagtgtcaggagcttttcgttttaataataagtcaaacgccatacaaatattacgaacgtagggttttccagcctcagtgacttgtatgctgtttttattaagaatcacaagcccatccgtttccatctctttaagttggattagtatttcgggaatttcgtcaaagtaatcgcttttgttctcccatgaagtttcaaactgacacattagatttaggatatgtttgcgtataattaagtcttctgctgtaagtaaatggcctctgtaaataggaagtttgtcccattctaggatttgataatagtcttctaggtttttttcgttttgagcaaagctataccagctatcactgatagacgaaacacctagcccaatcatcaactttgtttttgatgagctgtaacccataaaatttcgatgtagtttacctgtttcaaaagcatcgtaaagactgtctgtttttaaagcaaaatgatccattcctacttcatggtagccattttcaagaagtaattctttacccacttggtacaacatccttttttcttgatcttttgggatatcttcatctttaaagccacgttgaccatttccttttatccatggcacatgggcgtagctgtaaaacgccaaacgatctggttgcaatgatttggttttttcgatagtatcaattacatcggctatttcttgaaatggtaaaccaaaaataatatcgtgtcctatagaagtgtatccaatttctctggcccaaaaggtaaccttggctacattatgaaacggttgttctctgtgaatggctttttgtacttttggagaataatcttgcaccccaaaactaactcttctaaaacctaaatcatacagtttttgcaaatgggcgtgtgtagtgttattaggatgaccttcaaaactaaactcgtaatcaaccgctttttttgcatgacaaaagataccgttgattaagtcttcaagatttttgggcgaaaaaaaggtaggtgttcctccacctaaatgaatttcctttacaataggttgctcgcctagtataccgcaatataatttccattcttttaaaacagcttgtatatagggattctcaacctcgtgattttttgtaatgcgtttgttgcaaccacaaaaagtacacatgctttcgcaaaagggtaggtgtatgtataaactaattccttctctggtattactttctataaatgattgttttaaagtagcaatccagttctcgtacataaagtcagtttcattccagtacggaacagtaggataactggtatatctaggtccaggaacattgtatttttgaatcagtgtatttttcattgctagcatttttatcttgtattcaaaagtacaaggaagcctcaatatttaaaatgataaatgtcatgctatagttttaaccataaaaaaaaacctcaaactgttactagtttgaggcttcttatagtgttgttgtacactttattcttgattcaaatttcttaattgtgctagcttttctttccacacatctaagctttctttatgaatagcaatatttttgcggacttctaaaacaattgaattttcttttttagcatttttggtattcgtaaaaaactggatgttattttcaagttgaaaaatttcgttttgtacttcgtcaatttttctaatcaagaaaatcttttcgttttccagcttgcgagtgtcattgtcttcagataattgatcaatacgattagcaaatcgcatcatatcggtttcttttttactcaaacttaatttgtcaaacaacgcatcaaggattttattgaatttcccttcaatatgtcttcttgcgtgcggtactctgcctaggcttttccaagcttcaatatgtgctttgatcgcatcaagatcaattttatgatcacctgttaattgaaactctcttaaagtttctagatatgtttttttgttttcaaacgaagtgatttcttcagcgttttcttcgtttttttgctctttcaacttgtcaaagtagtggttacaagcttctttgaactctttccaaaccttatcagaatatttgcggggtacatgtcctatttgtttccactcatcttgaatgcgtttcatgataggagttgtcacggcaaagtcagtactgtcttgcagttcttttgcttttgcaacaagcgcattctttttatttaagttttcagtttgatcccttttgatgtctttgtaaaaagaatttttaaaagagttgaagtttcgaacggctgttttaaaagccgaccaagtttcttcattcacatcagaaggtacttttccagcattaaagaacgcagttctcaaagcttctactttttcaatttgacccagccattgcgagtgcgcatttacttttacagttgccaattcttcaattgcggctataatctcttttttcttttctaaattttcaacttcagctcctcttagtttttcgaataaaagttcgcgtttgtcatgcatttttttagtcaaatcactaaaaagattccaaatctcatcacgattttctttagaaacaggacctatgtcttctttccacattctatgtaaatcctgcaattctcggaaggctttattaatgtcctcttcgtgcaataattcttcaacgcgcaaaataattttttgtttttgctctagattatgcttaaagtccaagtcgcgggcttctctgtcaagatgtaaataatcataaaaattctccacatgaaagtggtaattattccaaacgtgattgtatttatccttaggtattgatcctgcatttttccatcggtctcttaattcattaaaatgttttaaggtgtctttgatgttttcctgcggattaattagctcttttaattcttcaacaatggctaatctattttctaaattcgttttcaagttggtttgtaaactcttgaaatgaacatttttattggttttatattggttgtaaacttggtcaaattttattttcaaaggagaatgatagtgaaaatcttcggttgtatctggattttcagcgtggaattcctcttttttttcttcgataaaatgattgaatttagccaagaaagctttcttgatttcatcaacatgttctttgatagacatgactttatcagtagctacaaggcttgaaagttcttcaacaagcgcttccattgataaggtgtcgtaatcctgcatcggtatttcgtgacgatccttcaaggtttcatcttcactttcttctgcattcgagtcgtcaattgaattgagtgctttttgattggcattttcagcaacggcttcgttatccaaaacaggttcagttaccgattccttttctagcgttgcattttctagatttgattcattcgaatcagtgcttaactttccatctgcatcttgcaggttatcattcttttcttctaacattggttcaatgtgtaaggttcctaataaattgaagtcgaaagatagtgaagcggcaccgaataacaaagcaaatccttaatttagagtcgttttatcctcaattcctgttttatttgaagcactttcacgctctcgaaagcttatggacactatattcccgataaacaaaacggtgcttaaaaaaccttgttttgtatttctggagataccgcttttgttggggctttgcttttgtaattgaatcaaggctcaattatcataaattaaaaagtcccaccgaagcaggactaaagattttcatctacggcatatagccttattgtgataagattaaagattagaaattttaatcagttacaaatgtaaataaaaaataagtaggttgcaatgtggaaaaacgtaaagctgtttattatttttgatgtagctttaaaaattcttacaaaacaaagattagtatggcaaaaatattaggtttagacttagggacaaactcgattggatgggcggttgtagacaaagaggggaatgattttactcttgtagataaaggagtgcggatattttctgagggagtgaagtctgaaaaaggtattgaaagttcacgtgcagcagaacgaactggttacagaagtgcacgaaaaattaaatatcgcagaaagttaagaaaatacgaaactttaaaagttctatctataaatggaatgtgtccgttgtcaattgaggaagttgaagagtggaaaaaatctggatttaaagaatacccacttaatcctgaatttttgaaatggttacgcactgatgacaacgaaaatgtaaacccttactcttgtagggatagagcaagtaaacaaaaagttactttgttcgaattaggtcgtgctctttatcatattacgcaaagaagaggttttttgagcaatcgtttagatcaatcagctgaaggagtttttgaagaacattgtccacaaattcaatctgccattgaagatgtaaatacttctgatgaaatattaattgaattgaaagactatttccttaatagaggaatacttgatgaatctataacaggaggttttaaaaaagatttggatgaaggagagaaaaagttaaagacactttataactctttggtggctataactaagaaaaatgaaaatgatattgtaaaatgtaaagacgaactatttactcgattaaataaaaaagaagatttaggtaaagttaaaggcaaaatcagtgagatttcgcaagcaatgaaagacggaggttttgtaaccttaggacaatatttcaatagtttgtataataaaggaaaaattagaaaccaatatacagctagagaagaacattatttagcagaatttgagattatttgcaaaacacaagctattgaaggtattactgatagtgagcagttaccagaaaaaagatatagaggtttaacaaaggaattatatagagcgatcttttttcaacgtccgctaaaatctcaaaaaggattaataggtaagtgttctttcgaaaaaagtaaatcgcgatccgctatttctcatcctgattttgaagagtacagaatgtggacttatttgaatactataaaaatcggaacacaatctgagaaaatattacgttttttatcacaagaagaaaagcttagtttaattcctaagtttttaagaaaaaaggataattttaattttgaagatttggccaaagaattaattgaaaaaggggcaagttttggattttataaatcttcaaaaagagatagttttcattattggtttaattacaaacctacagatactgtggcaggctctccagtttgtgcttctttgaaaaatgtaattggagaagattggagaataaaaacatttacttatccaactttaaattcaaaaggtattgaagttaatagaacagtagattataaagatttgtggcatttactatccgtttctacttctgatatttacttatatgaatttgcaaaagataaattaaaattagaagaaaaaaacgctaagacttttagtaagattagattgaaaaaggattttgcaagtttgagtgtgaacgcaatcaacaaaattttaccgtacgtaaaggaaggattactgtattcgcacgccgtttttatggcaaatattggaggtatagttgatgaggctatttggaacgacttggcgcaaagaaaatatatacaagataagattgcggaaataatagccaataatacatttgacaatggacttttagaagttgtaaacggattaataaaggaatgtaaggttgacggtgcttactattctaaggaagcagaagctacttatagaaatgatttaagtaaaagactagtttcgttttttaagtatcataatattactgatggcttgaagcaagaagtaatcttaaaggaattgtttcctgtttttatagagcaattagaagcttatgagttcataaaagtaaaacgtttggacgaaaaagttttagaattcctaaagggagaaaatgaagatggagaagttttttgtaataatccgaagcagttaaataaattgtaccatccttcagatattgatgttttcaaaaagcaaaaagcgagagataaagacggaaaggaaactggtcagttaatattaggaagtccattaacttcttcgattaaaaatccaatggcaatgcgcgctttacatcaactccgaaaagtattaaatgccttaatagtagaaggacaagttgatgaacgaacaagtgttcatatcgaaatggctcgggaattaaatgatgctaataaacgaaaaggaattcaggattaccaaaatgaaaataaaaaagaacgtgaaaaatataaagaagaaattaagaagctctatttagctgaatgtggtaaagaaattgagccaacggttgatgatttattacgttatcaattgtggattgagcaagatagaaaagagatttatgagaacggtaatagtattagtatttgcgatattataggagaaaatccaaaatatgatatagaacatactattccgagaagtatttcgcaggataactctcaaatgaataaaacgctttgtagtcaaaagtttaatagagatattaaaaagcaaaaaatgcctattgaattagttaatcatttggaaattttgccaagaattgcgcattggaaaaaggaagcagaaaattatacgagagaaattgaaatgattattcgttccacaaaaacagcagcaaccaaagaagctaaagacaaaaaaattagaagaagacattatttgactttaaaaagagattatttacaaggtaaatatgaccgttttatttggacagagcctaaagtaggatttaaaaacagccaaattccagatacaggaattataaccagatatgcgcaagcctatttgaagtcctatttcaaaagggtagaaagtgtaaaaggaggaatggttgccgagtttagaaagatttggggaattcaagaaagttatcaaaaagatggcaaaaagtactttgtagaaaaagatagaagtaaacatacacatcataccattgacgccattacaattgcttgcatgaccaaagataaatatgatgttttggctcatgcctggactttggaagataaagaacaattatccgatgctagaaaattattagcagattcaaaaccatggaaaacattcaaagaggatttgataaagattgaagaagaaatcttggtatcgcattacacaccagataatctaaagaaacaatccaaaaagatagtgagaattagaggtaagaagcaatacgtagcagaaatagaaagagttgcaaatggcaaagctgttcctaaaatagattcaagccgtaaaattatttacaaatttggtaaagacggtaaaaaactaccaaggttacaacaaggtgatactgtgagaggatcattacatcaagatagtatttatggtgcaattaaaaacccattaaatatagaagaaattaaatatgtaattcgtaaagatttagaaagtttaaaagcctcagatattgaaaatattgttgatgaaatagtaaaagagaaagttaaagaagcggtaactaatgggattttaatactatcttcaaatgcacaacaaaaaaataaaattactgaaggtaaaaaagtgtggatgaatgaagaaaaaggaattgcaattaataaagttcgattgtatgctaattcagttaaaaatcctttagaaataaaagaacatagtttattgtcaaaatctcgtcacgaacataagcaaaatgtatacgcacagaatgatgagaattttgcaatggctatttatgaagattttgataaaaaaggaaaaataaaaaggtcgttcgaaatgattaataatattgatgcagggtcatattacagattaggtaatgaagaaaataaactgaaatatgatatagtaaccaatcctcacgataaaactggattaccattgaagtatattttaaaaaaaggattgatggttttgtttttcaaagaaaattttcaagaaatattagaattacccactagtgatttgcataatagattatataaattagctaagtttgacgcccaaggaagattaacttttaggactcattttgaagcccgacaagctagtgaattgaaagaaatttataatgtagattttgagtccccatttgaacaaattagattgcaagtaagtaaactaaatatgttagttgaaggatatgagtttgtattgacagcttctggcaagattactttcatttaaacaagctaatagttctttgacattttgttcaacatcttaaacatctcaaaccacaactgaaagggatagcatccgcccagcagggatgcagtcgctttcagttgtggtttgattaaagattagaaaacacgatatttatatcggcacctgcaagtgttcaatcattgttgtggtttgattaaagattagaaaacacgatattaacgtatgatagcaaaggacttgtaacagcgttgtggtttgattaaagattagaaaacacgatattaaaagcccgagaaatatgcaaggatagagggttgtggtttgattaaagattagaaaacacgatatttaggagaatggaggacaggagcaattcaagttgtggtttgattaaagattagaaaacacgatattatacgctttaataggttgcgtgtcttgttggttgtggtttgattaaagattagaaaacacgatattaggtacacgttttgagaaatcaatgcaatcgttgtggtttgattaaagattagaaaacacgatattcacttgccacattgcacgtaatgaatacccgttgtggtttgattaaagattagaaaacacgatatttcacgctcgagctagtcgaagcacattaccgttgtggtttgattaaagattagaaaacacgatattcaaatccattaagtaaaaaataagctgttagttgtggtttgattaaagattagaaaacacgatattttacttttatgtcatacaaaccagccaaacgttgtggtttgattaaagattagaaaacacgatattatattttattatttcaaccggaatacaaccgttgtggtttgattaaagattagaaaacacgatattagttggcttgttaccttctgataatcatgggattaaagtaggtatcgtataaaaaaaatgcctctttattggtttgataacccaatattgaggcatttttttatttgtaaagtgttgtcttctaaattattggtacatttgtataaatatttattctatgagagttgtaattgaagctagcgagcaatataaatcctttttaatagaggtggcagaggcaattaaagcaaaaatttcatttgatgataaagatgcttatgaggatattcctgaacatgttaaattagccgtagaagaaagtcaagtacaatatgaagacgggaagtacactgatttttcagttgtaaaagcttctcttttgagtaggctacacaaaatgtaaggatgcgaattgtattaactgataatgcaaagtttactttgcaaactatttttgatagtatcgaaagtaggtttagtcccaaaagagcagacacgtttttacttgaagtagaaaagacattacttaaggtttctaaaaatcctgaaatatttaaagcaactccattgtctaaaaatgttagaattggaaaaataagcaaacaaacttcattttattatcagataaattataatactgtagtagttttatatttttgggataacaggcaagatcctatttctttctaaaacaattctaactgtgtgggttgtggtgctttggggacttcggctttgccccaaaaattaagaatatttccaaattgtttatcggttattcgtagtacactgactttgccaaaaggaggcaataaattgtgtattcgtttttcgtgtacatcggcgctttcgctactggcgcaatggcgtacatatacagaatattgcatcatagaaaacccatccttcaaaagattgtttcgaaattgggaggcgtttcgtcgatcttttttagtttctgtgggcaaatcgaaaaatacaaacaaccacattattcggtatccattgagttccatagcttcggatatttaatttttttcctatttcctgtatagcattgttgaagcgaactagctgttttttgtaacgcgaccatcaatgggcttttttcatctttaaaaaatacagtttgagttagtacttgaagtagttctgctttaatattagtattgagttcttgttcattatgatttttcataatagtgtaaactttttcatctacgatgggtctaaacggttccattatgtcatcagctaatgcaaaagcgttgtacttgtttttatggtgtataccaagggtgttcaataaaccgcttcctgataatgctctcgcagttgcagctcttaatatagcataaccatagtttaaaaaattattagggtaatctccataacgttctcgttttaatccatcgtattgtaaatttggttgagggaaatgtttccaatattgctgtgcagctacaccttccatgtttgttgaatcgccgcttaaaactttacttgcaagaaaattaaatgtatttttttcgctcgtgattttttctagtaatattccttgattttgtattttttcaacaattgtttgttgccacagttgtttttttaatgggacagttgcttctatttgatttctaaatatttcttgttgtatatgatgactatttagattgagaaacattccatttggtaagtgatttttggaacaaataataattgccgtgttattttcgataagaaaattcattgcaggaagactcaaatatatttcgggattgtctagtactacaaaaccaatatcttcaataggtatgctactttctcttgtttcagttttaataaccagctgcaagtttttaattgtaattgatgatttgttttctagtaaaagtgttttttttatcataattaatcttttaacttatttacagtattaagttttaagttaaattaattaattgttgccttttatttttacgtaaaaccgtaattggttgatttgcaaataaaaaagcttccaatcctgagactgaaagcttattttataattggattttttttatctattccagatttcccaagatttttcggcttggtagactagcatttctaggccatttttaatttgggctccttggttttttgcttttctaagaaaagtagtttcgtcaggattgtaaattaaatcaaaggcaatatgttgtgggctaaagtagttataaggcaatggcggtgaagcctcgatatcaggacttgttcctacaggtgtgcaattaataaaaatttgatactcattaaaggtttcagcatttatttgatcatatcctatagcatgatctgtagttgttctcgatacaaaacgataggtgatacctagctcatcaagtgcaaaagcaaccccttttgatgcccctccagttcctagaatcattgcttttttatggtgggcttgcaataaaggttttaaagcctttttaaacccataataatcggtgttgtatccttttaactgtccctttcttgtgaattttatcgtgtttacagctcctattaatgttgcttttttagataatttatctaaatatggcatcacggcttctttgtacggaatcgtaacattgatcccatttagctcgtgatggttttcctttataatagtaacaaacccttcaattgcagggatgtcaaagttttcataagtacatccttcaaactcatctgatttgaatttatctgtaaaataacctttcgaaaaagaataactaatatttttacctagtaagccaaaacgttttttaacggaattagtcattgttgtttttatatttgtcaatgtaattacgaactgtttttttagtccaaactacggggaataagtcttcaattatagtgtaattctcaaattttaagcgcaagccattactcaaatggaatttagctttggtagtttcttgtgtcatataatacagtccagctaatcgatattctacttcgttttcttctggataatattctgttgcttgcaataaggtttgaatagcgctatcaaattcacctaaaaattgtaaaatgtcaacccaaaacaaccaagtatctagctcagtatctccaaattcaactgcttttctaaaaccaaattcggcctcttcaaagaaattcatttgtttgttgatggtagcgtatcgtttccagtacaagcggttgtgattgtcaatggctaatgctttattgacaaaaaacagtgctttttgaaagtttttttgacgcacatagaaatcagttatggcaatccatcctttgtccaaaagtggatcttcatgtacggtttcattgtaaaattttaaagctagaacggtgttgcctagtttttcatgacattttccgatgcgcaataaagcatacgaggtcgcgtcatcgagttctatagttctactataactttcaattgcttcttcgtacttcttcaatcgttcaaaagctttggctctttccataaaagcgccaagaaattcatcgtcgatcagggtcgcataatcaaatgcgcgtatggcattttcatagtcttttactccatagtacaagcggcctacttgatgccaagcaatttcgctgtacggatttttgtctatgtaattgttcaaataagtaattgcttctagattttgatccaaaaactcaaagcaataaactacgttgtacaaagctgattgatcttcaagatcttcctctaagcatttgatgaaactttgttttgcttcttcaagtttatccataaataggtattccatccctattaaattatgaacatcggcataatcatcagtgaattgtaacgcgatctttagcaactcaactgctttttcatgttgatctcttttcgaacagatgttagctttttgaatgtaaatttcttcgttgtttggctcaatagcatagagctcgttgagcagtttttcggctatttctagcttgtcatcatagaccagcatctctacttgaaccaacttcaatcctgtcgatctaggatgttgatccaatgcaagtttgagcgcttttttggccaaagctgtcttacccatatccaagtaatgaaggatgatttcttcaaactcttcggagtcaaaaaagagcactttgttggttttcaacatcgactcaaatttggataatgataagttatagtcttcttcttcgttgcttaattgcatactgttttttttgaatttgccctaaattaaaattaggcatcaatattgttattatgaagaaaaaattgaattgttgtgaacaatttaattaacaatatgaaattgttaagtttaggtagtgttttttatacttgaacttcgttcaaagcagctattatcatcgcacaaccttcgcgtatttcttcttcagaaatggttaatggcggtgtaattctgatagcacattcttcgaataataaccaaaacaagatgagtcctttgtcttggcattttaagatcacttcattcgttattgctgcgctgtttgtcattgcggctagcattaacccttttcctcgaatctcttgtatcaaaggatgtaccaaaagtgatctgaataatttttctttttctaatgtactaggcattaggtttgtttcggtaatttctttcaaagtggccaagcatgctgccgctatgacaggatgtccgccaaatgttgtgatgtgtcctagttttggatttgtacttaataaatccatgcgttctgcagatgccgtaaatgcacccacgggcataccgccgcccattccttttcccataaccagaatatccggcaccacattgtagttttgaaatccaaataaggttcctgttctaccaaatccgggctgtatttcatctagaattagtaatgcgcccacttcttcgcatcgtgtttttaccttttttaagaaatcattttcgggctgaataaacccagcgcctccttgtatggtttctaataagattccagcagttttagtagttattttttgtaaatcggcttcgttattgaacgtgatgaaatcaacgtccggtatcaacggacgaaaaacttgtttgcgttcttcaaatcccatcacactcatcgatcccattgtgtttccgtgataagcattatggcacgagatcaattgacttcttcctgttgtacggcgcgctagttttaaagcgccttcaatggcttcagtacctgagttaactaggtatgttttatttaaagtttcgggtaggagcgaggctaatagtttgcaatattccactgcgggactttgcgagtattcaccgtataccatcacatgtgaatacttgtcgagttggtctttgattgcttgattgactctaggaggttgatgccccaaagtgcaggcagatacccctgctacaaagtctaaatattttttattgttggtgtcgtatatataagaacctactgcatgcgaaacttccattcctagtggatatggtgatgtttgtgcttggtattttatgaaatcgttattcacttttggttgtatttaactgctaatttttttgttttcgaaactaataggaaatttagaatcacaagctcaagaatttaaatggtcagatttgtataatctttcactactttttctttgttttctttttgtcgtagttcaatgtttcttttcgaattttcattggtatgtttttcttagcttcgtctacttttgttgccttcgcaattttttcattgtcttcgttctcttctggcggaaaaatatcatccttagactttatgcgctcatcacctcgccaaactaggcctcgcaactttctggcattttcgggcaagtctttgtcgggatagatatcaccgtctacttgttggaaaaatgttattgtttcaatgtcgtttttatcaaaaataatattgattttactacttacatttttattgatcccgataaggtctttgtcatcattacgcatgtaataaactacctctgtgtttttaattacgtctacatcatgcaattttccttcgataaattttccaaaaaggttttgccctttaacctgattaaagccggtgcctatggtatcttttgagacgagaaaggtattgttgagtaccttgagggaatctaattctttagattggttgttgcctatcaggtgcatgagatctcctgtgatttggttttctccattccataaaatagggtttcctattagtttagtcaaggcttctttggaactagagtgaatagagtcgcatttaccgctcatgtctgttttataaaaacgaacattgttaaaagctcttatgatgcggtttccttctttaccagtgaccattaatttttttccatgaatgtaaaccgagtcattttcgacaaaattcactgccaaggctcttttagtaacaaacatcgaatccttttttttgtaaatttcggcataatgaccttttacaattccgcgatttatagagtctgtgattttaacattgcgggatgctgatgcaaattctttatttcgatcatagtacaaactatctcctttcatcaccctatcatcgtacttgatataggatttattgagaaaatgtgccagattctttttcgtgtcatagaagcctttctcggtataaatatagttggctttacttgtaattgttgaaggacctaataaataggaatgacccgaattagtgtagtaatccaaatggtttgttttaatcacataagttggattagtgatggttactgcagttaagaattgaaactttttttcggctaggtaatatttaccggatttactttttagtgtattgtctctatttacaattgttccctgtgtgttataaaaagcttgctgggtattgcgatcaaaattaatagtatctgttgctagtgtagcatctggagaactcattacggcttcgcctgtagcaaaagcttttttaaaatttccgttatactcggcatatttactattgagaaataaggtgtctccttgaattaattgtacgtttccaaaagcttttaaatagttttccttttgaaaaaaatacgctttattgcaagttaaaacggctccgtcatggtttacttttacatttccggttagtaaaacagcatcgggaatttcaacttgattcacatcaaaataatcagaatgttctacgacaattttttttggggcttgcgccaaaaggaaattgctacaaagtagaacgaataggtaacaaaggaaaaattttgatttcttcaatggattttaatttttgtcaaatttatgaaaaaccagacaatcctaatccatattaggatatatttataatacaacaaaagggttttttgaattttgggcaaaagttgttaacgaacggcttgactctctcgttgtagtgccgttttcttgctcttttttgttttaattttagattctgactgtttcagtaatagaaaatagtttaaatttatgaaattgataaaaatcgggcaaatcagcataaataattttgtatgatgaaaaaaataactattgttgcaagcatgagcatcgttttactgacaactgcttgtaaaacaaaagatttaaaaatgaaagaagatagaaaagaatttatttcgaataaaaaagaagttgtttatcaggtttttacacgtttgtttgggaataccaatactactaataagccttggggaaccattgaggagaacggtgtagggaagtttaatgactttacagatctggctttaaaagaaattaaggacttgggggtaacttatatttggtacactggagtaccgcaccacgctttaattcgggattattcggcaataggaatttctaatgatgatccagaagtggtcaaggggagagcaggttccccttatgccgtaaaggattattataatgttaatccagatttggctgttgaccccgctaatcgcttggccgaatttgaagctttgatcgcaagaacacaccaagcaggtttaaaattgattattgatattgttcccaatcatattgcacgcaaatacgaagggatgaataatccgaatggtgtacgtgattttggtgctgatgatgatgttactgtcgaatccaaaagagataacaatttctactatatccccaatacccaatttgaaattcctgatacagatgcgccgttaaatggagaaaagaatccgttggttgatggtagtttcaaggagtttccagcaaagtggacaggtaatggttctcgaagagctaaaccagatcgcaatgattggtacgaaacggttaaggttaattatggtattcgtccagatggttcaaaggattttcctgaattaccggctcattttgataaaaaatcggctcaagaacattttgatttttggaaagataaagacgtaccagattcttggaaaaagttcagagatatcgctttgtattggacagataaaggtgtagatggttttcgatatgatatggccgaaatggtgccctacgagttttggagttatatgaacgctgctattaaagtcaaaaatccatccgcttttttgttggccgaagtttataatccagacgagtatagaaattacatccgtttagggaaaatggattatttgtatgacaaagtagaaacgtatgataagttaaaggacgtgattcgcggtcattccttgccggatggattgtcagatattcagcatcgaatggtagatattgagcatcatatgttgcattttctagacaatcatgatgagcaacgcttagcaagtccggagtttgcaggtactcctgagaaaggaaaaccattgatggtggtctctacaacgatcagtacttcgccgactatgatttattttggtcaagaagtaggagagtccgctgctgaaaacgcgggttttgggacgcattctagaacttcaatttttgattatgtaggcgttccagcacaccaacgatggatgaacaacgggaaatttgacggcggtcagctgagtgaaagtgaaaaatcgcttcgagaattttacaaacgattgcttaatttttctttgaatagtactgctctaatgggagcatttcaggaattgcaatcggttaatcgtgattctagctgggggtatgatccgggtatttatgctttttgtcgttggtctacaacggagaaa

SEQ ID NO: 3120 - DNA, 24317 bp, synthetic construct
  source 1..24317: mol_type = other DNA
  misc_feature 1..24317: note = Synthetic
aacaccacctactaaatgatttttaagtaaagcacctttataagataaaatagctttagctgtatctgttggctgcgcaccattttgtaaccaagttacggcaccatcaacatttaaatcgatactagctggatttgtgtttgggttgtaagttcctaatttttctaggtatttaccatctctttttgaacgtgcatcggctgctacgatccagtaaaaaggtttcccttttttaccatgtctttgtaatctaatttttacaggcataataattaattatttgaggttctcgacctcggttattaataagggcgcaaagataattaataattaataattaacaattaataattggacttttcttaaaacaataaacaaacaggactgggcacttttacctcgtttaaaaaagagagttttcctgttggggcgtcaatcctaaaaacagtgatattatgacttctttgattggctaccaataaaaatttgcctgtggggtctagcgtaaagtttcttggccaatcaccatgaacgggcatggtttgaacctttttaatagtaccatctattttatttcttttatagacgacaatggaattttcgcctctgttggaaccgtataagtaaagttcattttttgacaaatgaatatcggcacacgaattttcccctttatagttttcatctagggttgaatcgtaatcaatctgttcaaaaccagtatctgtttttttaaccgaggttaccgaacttccatattcattaataatatagataaattgacctgtttttgtcatggcgaaatggcgaggccctgggtttccttccatcttaacaatgtttggtaaggctaattcatacgtgtcattttttaatttgtattgatataaggtattcatgcctaaatcggcgataaataagtcgtctctaaaaaattgtgctgagtgcgcatgtgatttcctgtctgccgtattaaaatcaaaaatctgtgacgcttcattaagtttcccatcccttgcaatgctataaatggacgcagtgcctccactataattggatacaacagctttatttccttgtttgttcaatgaaatatgacaaggcgctttgccgttactggctactttgtttaaaaattgcaactggccattttcttgaactttgtaggcggtaacaaagccctcaagactttcgttgacggcatacaaatactttttgtttggtgaataggctataaatgatgggctttgagtaattcctgctaattgtaaattactaagttccccagttgctgggttaaattctaatttataaatgccttcgctggtgccatctgtataggtgccaatgtagagcggaatgttttgtgcttgattggttaaaaacgacattgctatacccaatgttaaaagtttaatcttcatggtatttcgtttgatagtttcaaaaataggtgttttgaattaaaagatatttgatttttgtttaaaactcttgataacttcaaatcaaaaaagtataaattctatgtatttttaatggctaagtctttgccattataaacgactcaacaacaaacaaataaactttaaggatgtatttaattttcgacaccgaaaccacaggattgccaaaacgctgggacgcgcctattactgatgttgataattggcccagatgtatccagatagcatggcaattgcatgatgccatggggaactgtatcgaacatcaagattatttggtgcagccagacggatttaatattccctatgatgctgaaaaagtacacggtatttcaactgaattagctcaagaacaaggcatttcactagttgaagttttaaaaaaatttaatgaagctttaagcaaaacaaaatttgttgtcggacaaaatgtgacattcgatttgaacattatgggtgcggaatttgtgcgtgaaaatgttgccaatccgctacaagaacttccggttttggatacttgtaccgagcacacagcaagtttatgtcaaatcccgggcggacgttatgggaaatttaaattaccgactttaacggaattacacgagtttttatttaatgaaccttttgctgaagcccataatgctacggccgatgtggaggctaccacacgttgctttttagagttggttcgtttgggtgaatataccaaagaacagctcgatgttcagccacattattttaaggattttaatgaagccaatccgaaaacaattcaattaatcggattaaagcatatcaacctaaaacaagaaagtgctaaaattaaagagcgtcttaaaaacgctaaggttgaaactatttctactgaagaaataaaacaaaacatatctgatttagctgatgtcgattttgtgcatcttcacaaccattcccaattttcagtattgcaatccaccataagtattgatgatttggtagccgccgccgcagagcatcacatgccagcagttgccttaactgatcatgccaatatgatgggggcatttcactttgtgaaatccgtgagcaatcataatagagcggtaaaagcaaaaaatgatgcggctattgaaaaaggcgaaacaccaacggcaatagaaatcaagcctattttaggttgtgaattttttgtttgtgaagaccacaccgataaaaccagaaaagacaacgggtaccaaatcgtgtttttagcaaaaagcaaaaaaggctatcataatctagctaaattatcatcacatgcttttgtggatggtttttattatttacctagaatcgatagaaaacttattcagcaatataaagaagacctgattgttttaacgggaaatttatatggtgaagtgccaagcaaggttttaaacgttggtgaaaatcaagcagaagaagccttgctttggtggaaagagcagtttggtgaggatttatacatcgaactcatgcgccacaaacaggaagatgaaaatcgggtcaattcagtattaattgaattttcaaaaaagcatggtattaaattagttgcgaccaataatacgtattatcgcaaaaaagaagatgccaacgcccacgatattttactttgtgtaaaagatggcgaaaagcaggccacacctatcggtcgcggtcgaggataccgatatggtttgccaaatcaggattattattttaagtcttcggaagaaatgaaaaccctgttcaaggatttgcccgaagcgattacgaatattcaggaagttgttgataagatagagatttacagtttggcgagggaagtattgcttcctgcctttgatattcccgaagcatttaaaaataaagaggatttagttgatggcggtaaacgtggggagaatgcgtatttacgccatataacctatcaaggtgccaaaaaacgctatggagaagatattcctgaagacattaaagaacgcatcgatttcgagttaagtgttattgagaaaacaggatatcctggctacttccttattgtggaagattttattcgcgaagcccgaaatatggatgtgtcggtggggccgggacgtggttctgcggcaggttcggtggttgcttattgcctttggataactaatattgacccgcttaaatacgatttgctttttgagagattccttaatccagaccgtattagcatgcccgatattgatatcgattttgatgatgaaggcagaagcagagtgatggattatgttattaaaaaatacggaagcaatcaggtagcacagatcattacttatggtaccatggctgctaaatcgtccattcgcgatacggcacgtgtgcttgatttgccattatttgatgccgatagaattgcgaaattgattccgaccatgtccaagctagatcggattttcggcttgagtgaaaaggaattgagcagtaagtttaggtctgaggatttagaaaaagtcaatcaattattaaatatttctgaaggtgatggtttggaggctgaaaccgttaatttggcacgcatacttgagggttctgttaggaataccggtattcatgcctgtggtgtgattatcacgcctgatgacattaccaaattcgttcccgtagctacggctaaggattccgatttatatgtcacccaatttgataactccgtcgttgaagaagccggattattgaaaatggatttcttggggctaaaaaccttgaccttaattaaggatacggttaagattgtgaaggcaaaacacggcattactttagaccccgataactttccattggatgatgaaaaaacctacgagttattccaaagaggagaaactgttggtgtgttccaatacgagtcacctggcatgcaaaaacacctcaaggatttaaagcccacggttttcgaagatttaattgccatgaatgccctctatcgtccgggacccatggagtatatcccaagttttgtccgcagaaaacatggcgatgaagctattgaatacgatttgcctgccatggaagaataccttaaagaaacctatggtattacggtatatcaagagcaggtgatgcttttgtcccaaaaactcgctggatttacaaaaggtgaagccgatgtattgcgtaaagccatgggaaaaaaacaaattgcggtactcgataaaatgaaacccaaatttgtagagcaagccagtgcgaatggtcatgatgccaaaatattggagaaagtttggaaagattgggaagcctttgcgagttatgcatttaataaatcgcattccacttgttatgcttggatagcctatcaaacggcctatttaaaagcacattatcctgcggaatatatggcggcggttttatccaataacatgaacgacatcaagcaagttacgttctttatggaagaatgtaagcgtatgaaattaaaagtgcttggacccgatgtaaacgaaagttattataaattttcggtgaataaggataatgctgtgcgctttggtatgggtgccataaaaggggttggacatggtgctgtagtcactattgtagagaacagaaaaaaagatggtccctataaatccattttcgattttgcaaagcgtatcgatttacgggcagccaataaaaaagcttttgagaatttggcattagcaggtggtttcgacggatttaaagcaacacatcgtgcgcaatattttcacgatgatggcgatggcataacctttttggaaaaagcgattcgctatggtgccaaacatcaagataatgaaagctcggctcaggtcagtttatttggtgatgcaagtgatgtgcaaatagcagaaccactagtaccaccatgtgaagaatggggtacgatggaaaaattggcaagggaaaaagaagtggttgggatttatatttcgggtcacccgctggatgatttcaaaattgaaatgaatacgttctgcaacgctagtttggcgttgttcaaggatttaaatgcctatgtaaatagagaactggtttttggtggtgtggttaccgatgtgcaacaccgtgtaagtaaacaaggtaaaggctgggcatcatttaccgttgaagattataccgatagttttgagttcaggatttttggtgaagaatatctaaaattcagacactttctaatgaaaaacaattttgtgtttgttaaaacattgattcgtgaaggttgggtaaacaaagaaacaggcaaaatgagtgaacctcgtttacaatttaacagttttcagttattgcatgatgtgatggaaaactatgctaaaaaactatcgattcaacttaatattgaagatttaaaagcagacaaaatagcacagttaaaagatttaatgcacatgcatccgggtaatcatatgcttaattttgtagtctatgatcataaagaacaaataaagttacaaatgcccagtagaaaacaaaaagtgaaaatatctcaagaattacttaatgaattggaaaatcaggatgtgtattttaagctgaattaacttttgtcctcaaattcatgacaatcaattctaatttcagaggttaataattctttttctaaaagattgcaatagtgggagttcaatttgttgttgtagaatttacacgcataacatgttctttgtacggttaaaataccatttttattaagttgataaataagagtactcaacgttttaaaaaggttttcaagctctgatgtattaatgctgcttaattgtttttttaatggataagcaaagttttcggtattggaaactatgtttatgcctgtatccgataacttaatggtataacttctgttgtctgatgatgaatagtccttttcaataaatccttttttgtccaaagacctaatggcatcgctaatggttggttttgatacattaaattcttttgctaaatggctcacattgcataatcccggtttatggtaagcaataaaaacaagtatttgtatctgtatggggcttatgcccaatacggtcgctttttcccataacaataccttgaaagcttcagaaatgcgttctaagccggcaactattttgcttgaaaggtctgtttcttgattctttgggtcaaatacattattttccataaaaaatgcctgccaacttaatattattgacaggcaaagttagcaatcctaactttaaaaagcaaaaattaaccttttacagcctctaaagaagctccaaagttgagatgtaacacattcccttttggcgtaagcaatgctggaacagatttaacacctaatttttcagcttcagcaatttttgaattattctcccctagatggataatttcaacattatcggcacctattaattcaacaatgtcttgctcagcgctaatacaaacaggacaacctgcatgataaaaaatggattttttcattgtaataaaatttaattcgttgcattattgcaatacaaatatagtaaggaatcctaactataaaaatattttttttggttttttgataaaatgataaaaacttttatgatttgctcaatacagttgaatctttttttttgcgaaaaagaaaagtataaaactaacagcctgatatatttataaaaaatagatagtcaaattagcataacgctaaacaatggggttataagtaaaacaaattgttagcttgtaagctttagagttttttttgactaaatttgtagtttaaattaaaagtcgaacgcgtaaaatataaatattatggcattagaaataacagatgcaacatttgaggaaacagtattaaaaagtagtaaacccgtattggttgatttttgggcagcttggtgtggaccatgtagaatggttgggccaatcattgaacaaattagtgaagaatacgaaggcaaagcggttgttgggaaagtagatgtagatgcaaaccaagaatttgctgcaaaatatggtgtgcgtaacatcccaacggttttggtttttcaaaatggagaagttgttggccgtcaagtaggtgtagctcctaaagcagcttacactgaggctatagactcgcttttgtaatataaatgaaaaaagaaaattgaaaaggtttgccattatggtaaacctttttttattttagttaaaaattaatacattatgagtaataaagtaaaagttcaaaacgctatagatagtaagttattagaacaacgtaaaatattcctttggggacaagtagatgataaatcggcaaaacatgtgattgacagattattgtatttggacgctttggaaacaaaagacattcatttatacatcaatagccccggtggttatgtcacttcaggcttttcggtttacgattgtatcaaatcattaaatagtgatgtttcaaccatttgtactggatttgctgcatccatgggttccattttattgtccgtaggaacgaaaggcaaacggtttatacaacctcatgcccgagtgatgattcaccaaccaagcggtggtgcacgtgggccagctagtgatattgaaattactgcaaaggaaattatattgaccaaagaattaagtgctagactattggctgaaaattgcggacaatcttttgaaaaagtcatgaaagattttaatagagaccattggatgagcgcgcaagaatctgttgcttatggtatcgtagatagagtattgtaaaaagagccaagagataagagccaagaatcaagacagattataaaatcttgattcttgattctaaaagcgaagcggtctagcttctataacatgaacatacaaaacgaacttaataaagccgaaggatttaaaaacttagaattgcttgcaaaacaggtagttgaagggtttatttcaggtatgcataaaagtccgtttcatgggttttctgccgaatttgccgagcataaaatgtacaatcaaggcgagagcacacgccatatcgattggaaattatatgctaaaacagataagctttataccaagcgttatgatgatgaaaccaatttacgttgccacatcatcattgataacagtagttccatgcattatcccgagctatccaatttttcaatacagcatttaaataaaatcgcattttcagcattagcgtcggcttccttaatgtacttattcaaaaagcaacgtgatgccatcggattaagtatttatagtgatgattatgatttttatgcaccggaaaaaggtagtgaacgccatcatcaaatgttgttaaataggttgtcaaacgtggtggtttcaaaaccagtaaacaaacaaacggacacgtataaatatcttcatgaaattgctgaaaaaatacacaagcgttccatgatttttttatttaccgatatgttccaaactactcaagaagaaaccaaattgtttgaagcccttagacatttaaagtacaacaaacacgaagtaattctatttcatgtattcgataaagagaaagagttcacttttaattttgataatacaccaaaacgctttgtagatgtagaaactggtgactatattaatctgtatgccgataccattaaggaaaattatacagcagccgtgagtacgtattttgatgcattgcgtttaaaatgtgcgcaatataaaattaattatgttgaggcggatattaataaggatttcaataccatcttgaccacttatatgatagagcgtcaaaagtttgtttaagctaaaataaaattaaaaaacacaaaaaaacatttgccatataaaaaaaggcatgtatatttgcaaccgcaataaagcaacggtctggtagttcagttggttagaatgtcgccctgtcacggcgaaggtcgcgggttcgagtcccgtccagaccgctaaaattgctgaaagctctaagagattagggctttttttggcactttaaagaagttgtgttgttagtaaacatctagtgtttgctaaaggtttaagtagttaaaccaatggaaagctttccttttttctttatagaaaattgggatgcttttttgttttatgccattcccttttatatttttcctaaaatcataatgcaaaaaaaagtcccaccgaagcaggactaaagattttcatctacggcatatagccttattgtgataagattaaagattagaaagtttaatctgtggtaaatataacttaaaaagtgctatttttgcacaataaaagataaacaatttgagagtttttagtttttgtaaatgaggcaaattctaatttcttttcaaccagcattatttgactggacattttaatcaaatcatttattaaaaacaccttggcagaggtgtttttctttttttttataatctctatcaagccacaactttatatttaatgtacatataaaaagaaaaatcaaattagctttctttatatttaataaatttagccttgtttatattttttgttacatataaatatttatatttgataagcaaatttaatttttaattttttaaaaactagatttttttagattatttttattgtgaaataaaatttgtacaaatatggcaagaattttaggattggatttggggactaatagtattggttgggcaattgttgaaaaagagaataatgatttttctttattagataaaggtgttagaatattttctgaaggagtaaaatctgaaaaagggattgaaagttcacgtgcggctgagcgtaccagttatagaagcgcaagaaaaattaagtatcgtagaaagttacgaaaatacgaaacactcaaagctttgtctataaatggaatgtgtccattatcactagaagaagttgaagcgtggaaaaagtcaagttttaaagattatccattgaatcctgaatttatatcatggttgcgaacaaatgatgatgaaaatatcaatccatatttttttagagatagagcaagtaaacaaaaagtaactttatatgaattagggcgagctttatatcacattgcccaaaggcgcggttttttaagtaatagattggaccaatcagcagaaggtgtttttgaagagcataaccctcaaattcagtctttaattgaagatttagattctgtaaattcaatttttgatgagctaaaagattattttattaatcttggaatcattgatttatctgaaaaaggaggttttaaaaaagatttggatgaaggagaaaagaaattaaaaacactttataattcactggttgcaatagccaaaaggaatgaaaatgatgttgtaaaatgtaaagaggaacttattgttcgattaaataagaaagaagatttaggaaaggtaaaaggtgaaattaaagaaatttcgcaagctatgcttgatggaaattttaaaaccttaggtcaatatttttatagtttatataacaaagggaaaatcagaaatcaatatacttctagggaggaacattatcttgaagagtttataattatatgtaaagttcaaggaattaatggaattgatgacaatgaaaaactgcccgaaaagaaatttacaggtctagcaaaagatttatatcgagcaattttttttcaaagaccattaaaatcacaaaaaggattaataggcaaatgttcttttgaaaaaagtaaatcgcgttgtgccatttcgcatcctgattttgaagaatacagaatgtggacgtatttgaataccataaaagtaggaactcaaagtgaaaaaacattacgctttttaactcaagaagaaaaatcaaagttggttcctaaattctacagaaagaacgactttaattttgaaattttagccaaagagttagttgaaaaaggaacaagtgttggtttttataaatcttcaaagaagaacgagtttttttattggtttaattacaagccaactgacactgtttcggcttgtcaagtttcagcttctttgagaaatgtaatcggagaagattggaaaactaaaatattcacttataaaacattcaattcaaaaaaagaggaagttttaaaatctgtagattataaagatttatggcatttactctcagttgcaacttctgatatttatctgtttgattttgccaaagaaaaattaggatttgatgataaaaacgcaaaagcatttagtaaaactaaattgaaaaaagattttgccagtttaagtttgtcagcaattacaaaaattctaccctatattaaagaagggttactttattctcatgcggtttttatggcaaacattgaaaatattgttgataaagacatttggcaaaatgatgaacagcgtcattatattaaaaatcaaattgctgaaatagttgataattacacttttgaaaaaaatcaattagaaataattaacggacttataaaagaaagtaaactaaaagaagaatattattccaaagaagcagaatccatttataaaaaagatttagccaataaattagtttcattttataaaaacaatgctgttgaaaacgaatcggaacaaaaagaaatcttcgatagtttattccctatttttataggacaattaaaaaaatatgagtttataaagataaagagattagatgaaaaagttttagaatttctttcaggagaaaacgaagatggagaagttttttgtagtaatccaaagcaattaaaaaaattatatcatccatcagatattgacgttttcaaaaagaaaatcatcaaagatgaatttgggaatgaaaaagtagtgttgggaagtcctttgactaattcaattaaaaatccaatggcaatgcgtgcgctacatcaactgagaaaagttttgaatacgcttattcttgatggtcaagttgatgaaaatactcgaattcatattgaaatggctcgtgaattaaatgatgctaacaaaagaaaaggaattcaggattatcagaatgagaacagaaaatttagagaagacgcaatcaaagaaataaaaaagctctattttgaagactgtaaaaaagaagtggaaccaaccgaagaagatattttacgttaccaactttggacagaacaaggaaagtgcgaaatttatgagcaaggaaataatattagtatttctgatattataggaagtaaccctgtttatgatattgagcatacaattccaagaagcatatcccaggataattctcaaatgaataaaactttatgtagtcagcgttttaatagagaagttaaaaagcagaaaatgccaattgagttgagtaatcattcagaaattttaccaagaatagcgcattggaaacaggaagctgataatttatcaagagaaattgatacaattagtcgctctataaaagcagcgtcaaccaaagaagttaaagacaagaaaataagaagaaggcattttctgtctttaaaaagagattatcttaaaggaaagtacgatcgatttatttggaccgaacccaaagttggctttaaaaatagccaaattccagatacggggattattacgaaatacgcacaagcttatctaaaatcatattttaaaagagttgaaagcgtaaaaggaggaatggttgccgagtttagaaaacaatggggaattcaagaaagttttattgatgaaaatggttttaaacaatataaagaaaaagatagaagtaaacacacacatcacaccattgatgctataacaattgcatgtatgactaaagataaatatgatgttttagcttatgcttggaaattggaagatgaacaaaataaaaaagaagcgaaagccattatagaacaagcgaagccttggaaaaccttcaaagaagatttgctaaaaattgaagaagaaattttggtttctcattatacgccagataacgtaaaaaaacagtctaaaaagattatcagagttcggggcaaaaaacaatatgtagccgaaattgaaagagatgtaaacggaaaagcagttcctaaaaaagacagtaatggaaagacgatttacaaattagataaacacggaaaaaaacttccaagattacaacaaggagatactatcagaggttcgttgcatcaagacagtatttatggagctattaaagaccctttaaatacagaagagattcgctatgttattcggaaagatttagaaagtttaaaagccaatgatattgaaaatattgttgatgaatcagtaaaagaaaaaataaaagaagctgttgcaaataaagtgctgttactttcgtcaaatgctcaacagaaaaataaattagacggaaaagtttggatgaatgaagaaaagcaggttccaatcaataaagttagaatttatgccaattcagtaaagaatccattagaaataaaagaacatagtttattttcaaaatctagacacgagcataaacagaaagtttatggacaaaatgacgagaattatggaattgccatttatgaaggaatagataagaaaggtaaaataaaaagagcttttgaatcgataaataataaagaagcgggacaatactttaaattaagtaatagagaatttaaccaagaatatagtattgttgaaaatcctcatggtaagacaggattgcctttaaaatatatccttaaaaaagggatgatggttttattttacaaagattctgctgatgaaatttatgatattagtgtaaaagatttaaataaaagactatataggttatcaaagtttgacgcacaaggtagattaacttttaggtctcattttgaagctaaacaagctagtgaacttaaagagttttataatgtagattttgaaaatcctttggaacaagttagactacaagttagcaaattagatattttagttgaaggttatgagtttattatgacttcgacaggaaaaattattcttaactaaatttgctttacgttctttgacataagattttcataatcttaaacatctcaaaccacaacggaaaatctcccgattttctgccaacggattttctgttgtggtttgattaaagattagaaaacacgatatttttcttataacagtaatgggtttaagttaagttgtggtttgattaaagattagaaaacacgatattattggctgaagttcttggaaatgttatcaagttgtggtttgattaaagattagaaaacacgatattatgggtctaatgtagtagttagacatttagttgtggtttgattaaagattagaaaacacgatattgttttacggtaacgtgattgataaacactagttgtggtttgattaaagattagaaaacacgatattagcccaatcgcttattaaaattcgtcatccgttgtggtttgattaaagattagaaaacacgatatttgtaggcgtacttaatgcttacgctattatgttgtggtttgattaaagattagaaaacacgatattatttacccattcttgggttgctgctgtaccgttgtggtttgattaaagattagaaaacacgatattactacattactctttatacattgggatcatgttgtggtttgattaaagattagaaaacacgatattaaacacttctttttcatcaaacgctcagtagttgtggtttgattaaagattagaaaacacgatattaactaccagatatgggatgcatgataatatgttgtggtttgattaaagattagaaaacacgatattagttggcttgttgccttctgataatcaagggaatatcgtaaaatgtcgttaaaaaaaatgcttctttttagcagtgataaagctagattgaggcattttttttattgaggtggtttacaaacacatcacttttattttattggagtgtttgtgaatcgaaaaataatgaacagttgttttcatagttaaatcccgaatttttcgatttgattaaagattagaaatcgaggaacgagattcggcatagccaaaacacgatattagctggctcgttacctgctaataatcaagagaatatcataaaatatcgtaataaaaaatgcttctttttagcagtgataaagctagattgaggcattttttttattgaggtggtttacaaacacatcacttttattttattggagtgtttgtgaatcgaaaaataatgaacagttgttttcatagttaaatcccgaatttttcgatttgattaaagattagaaatcgaggaacgagattcggcatagccaaaacacgatattagttggttcgttatcttctaataatcaagagaatatcgtaaaatatcataataaaaaatgcttcttttttgcagtgataaggcaagattgaggcattttttattttaaaacaattccaattgtgtgggttgaggttctttgggcacttcagaacgtccccaaaagttcataatattaccaaattgtttatcggttattcgtaaaacgcttacttttcctagcggagggagtaattttttaagccgcttttcgtgtacatcggcactttcactactggcgcaatggcgcatataaacagaatactgcatcatagtaaaaccatctttcatgatgttttttctaaaacctgcggcgtttttgcggtcttttgccgtatcggttggtaaatcaaaaaatacaaataaccacataagcctataaccgtttagttccataattttggatattttatttttttgcgttcgccactataggattgttgtaaagagcttgcggttttttgtaaagccaccattaacggacttttttcggttttaaaataaaccgttcgggttaatatttgtagtagttctgcttttatttcagtagttaaatcttggtcatcataatgttgcataacataatgtacagcctcatcaacaatgggtctgaaaggttccataatatcatctgccaaagcaaaggcattgtatttacttttatgatgaattcctaaagtattcagcaatccgcttccagacaacgctctggcagttgcggctcgcaaaatagcataaccataatttagaaagttatttgggtaatcaccaaaacgttcacgtttaaaatctatgtcaaaaaatgatttccaataaaagttggctgcaacaccttccatatttgaggtatcaccactcaatactttacttgccaaaaactcaaaattatttttattggatgttattttctctaataaaagaccttgatttttaattttttcaataacggtttgttgccataattgtttttttaatggagcactagcttctatttgtgttttaaatacttcttgttgaatgtggtggctattcaaatttaggaacatgccgtttggtaggtgtgagttattgcaaataataacagatgcattattttcaacaagtaaatttagcgcaggaatactaatataaatttcaggatggtctataacaataaagccaatatcttcaatgggaatggttttgtttgtgatttcagaatttataacaagttgttccaattttgaagtaatggaacatttgtttgaaaacaataatgttttttttagcatagctgattgattagattaaactaaaccgctattaaccagttgctaaatgacagaaaataaatgtaataaatttagattgttgattgctatttatccgataatcagttgttttgatatataaagagcaattttttgttttatggtgttcaatcttcctatttaaatctttccttttgactttaaatagaatcagattgtctaaaacagattcaagtagtaaaatattatagtttaaatggatatatttaaatttataaatgataccaattggacaaaatatttaaactttcagtttttattttactatttagcccatgggtttttcatgcccaaaaagaggccaatatttggtattttggttataatgctggtctggattttaatagtggtagccccgtagttataacagatggtaaattggtaaccgaagaaggttgtgccaccatatccaataaagaagggcaattattgttttatacagatggaatgacggtatggaacagaaatcataatatcatgatgaatggcacgggattaaaaggccatttttccagtacaaattcagcgatcattgtaccaaagccagattttccaaatatctattatattttcacggtcgattccgaagcccatcttaatgggttgcagttttcggaagttgatatgtctttagatagaggtatgggaggtgttacatcaagtaaaaataattttttgtttgcccgtaccacagaacaagttactgccataaaaaacccattgtctaattcttattgggtagtttcacataaatgggaaaataatgaatttatagcttatgaggtgacaagttcaggcgttaatacaacccctgtaataagtgcattgggaggtactacaaatggaaactattttggtgctatgaaaatctctccaaacggcaagaaaatagctatttccaatgtagctgattcacgtctagcattatgtgattttaacccagtaacgggacaggtctccaattatatgaatttacagattgttgtttatggactcgaattttcgccaaatagcaaatttctatatgcggctgatattgcagaagataaagcgttaactcagtttaacctagaatttaataatgaaactgatatttttaattcaagggttctaatagccaccgcaaaagccaatcaaaattttggagccttacaattaggacccgatggtaaaatttatatttcaaaatggaatttggaccacatagatgttattaataatccaaatcgtttaggattaagttgcaattaccaggttgaagccatttatcttgacgggaaaatttcaaaattaggacttccaccatttatccaatcttatttcaatcgaactatctcttttgaaaacatctgttttggtagtgcaaccatgtttgaattatcggatacggtagattctgccgtttgggattttggagaccccagctctggaatacataatacttcaacaaacttggagccaacacatgttttttcagctcccggcatttatgaagttactgtgatatctactgatgatggacagaccacaaacagcactactaccgtaattatttatgaccagcatatagtaagtcttcttcccggctttttgaatgatataacggtagttgatagctcggataataattccatatctatagatgtggccaatctagaatctggtgattatgaatttgcacttgacgaccaattttccttttatcaagatgaaccctattttgaaaatgtaaaagctggtatccatacgctttatatcagggaccgaaatgattgtgatgttaggttcattgatatatctgttattggatatccaaaatattttacgcccaatggggatggtatcaacgatttttggcgttttgagggtataaatggacaattccaagccaatagtgatatttttatttacgaccgttatggaaagctactaaaacaattgacaactacctccaatggttgggatggaacttttaatggatcaatgcttccttcagatgattattggtttcgtgtaaaattggaagatgggagacaatttaaaggacattttgctttaaaaagataaaagtctaaataaatgaaaaaagcatcatttagtgttcattcatttgtagttaaaatgctgaaataaaattagtttgaaccaatggaaagctttccttttttctttatagaaaattgggatgcttttttgtttaaaacagagttctgctttatatttcttgtgctttataaaaagcaaatacaagattcttttgtggttttttatgacgtaaaactatataaaaccgcatattatttatttttccattattttcttacaaatcaaaataaattattatatttagaggttatactatagctttccaatacatcataatcttagtaaattgattttaaaatgagaactccgcaaggcctaaataaaatttctaaaattgaaaagatgaaattatttattggtctttttaaaaatagccccataccaaaatcaatttcaagtttaactactaaaaaaattgagtttgtaaattcagcatgggaaaaattaactggttacacaaaaaaagaagcaattggtaaaacagtatacgatcttgaattgttaagtttagaggatagggaattcataagaaaaaaaatactgaaagaaaagtcagttactaactatgaaagttcaataagattaaaaagcggactcgacaagaaaattttaatgagtttttatgttattacaattaatggtgaagagtttgttttaaactggctgagtgatatagaggacttacatttacaaaaagacgagcacgaaaagagacttattaaaaatgtcgaaaattttttatttgctcaagacttcattatagattccattgaaaatatgacagatggatttatatcgctcaacaacgattgggtttatacgtatgttaacaaaagggcagccaaaatgtttggcagaaaatcagaaaatttaataggaaaacatatttggacagaatttccagaaggaattgggcaaccattttataataattatcataaagctctagaaacccaaaaaacaatttcatttgaagattattatcaaccatgggatcgttggtacgaaaatcgtgtagttccttctaaagacggagtttcagttttttttcaagatataacacatcgtaaaaaagcagaagagcttttaataaaaaaagaaaggtacctcgataacattattaataatattggagatcccatgtttgtaaaagatagtgaaagccgtttacttttggccaataatgctttttgctctctttttaatctttctagagaagatatcattggaaaaacattggctgaagatgtgcccccagaagaaagagaaagttttttaagtattgacaaacaagtgctttcaacaggcattgagaatattaatgaagagagccttactgttagaggagaaaaaccccggataatttctacaaaaaaaaccagattcattgatgatgctggtaataaatatctaataggagtaattcgggatattaccgaacggaaacaagtagaaatagatttaaagctttccaaagaatttaccgataatctagttatgtccatgcaagaaggactaataattgtaaatctagaaggcaaaattataatggtaaacgattcaacctgtaaaattctcgaatattctaaagaagagttaattggtatggagttgccatatccttttgccaagatggaagattttgataaaattggaaaaacaaacaaaaaagtagctcatggcgaggcgccatcgttcaaatttgagttcattaaaaaaagtggtaaaccattttgggcttcatttttaacaggtaatataaagaatgataaaggggatgttattgctttgtttggcaccatgaaagatatttcagaagaattaaaggttcaagagaccctggaagatatagctaaaaaatctactcaaaaaaaggcagttatattagagttggctggacttgttgggagtgattttgaattttctttagaaaaaataacctctttatcagctgaaactttaaatgttgaaagagtaagtatttggagctttaataaggataaaacaaaaatattttgtgaaaaactatatacttcaaaaaacaaatcatatttggatgggttaacaattaaaaaagctgataattctgcttattttgatgcattggcaaaattcaaaaccataacggttagcaatgcacttagcaatgatattactaaaggttttaataaaagttatctaaaacctaatgaaatatcttctataatggatttatttattactggtgccaatgggcattatggtattatttgttttgagcatataggtgaagaaagaacttggactagtgacgaagaagagtttgctgcatctatagctagtatagtgtcattaatagttgaaagcaatgagcgaaaattagctgaaaagaatttagtcgatttaaatttaaaactttctgaaacggttgcaaaattagatgatttaagtcatcaattagaacgtgaaaatatttatttaagaaatgaaatcgatcttgttttcaattatgaagaaatggtatatggaagtgaagcatttagtaatgtgctaacagaaattgaaaaagtggctccaacaaccgccacggtacttttgcttggagaatctggcacagggaaagaattacttgccagagccgttcacaatataagtttaagaaataagaaacctttaatcaaaataaattgtgccgcgataccaagggagcttatagaaagcgaattgtttgggcatgttaaaggctcgtttactggtgccgtagctgataaaataggcaaatttgaattagctgatggtggcacattatttttagatgaattaggtgaaatgccattagaaatgcagcctaaacttctgagatttctgcaagaaggtgaaattgaggttgttggagggaataaaaccaaaaagcttgatgttaggattattgccgcaaccaataaagatttgaaagaagaaattaagcttaaacgatttagggaagatttgttttttcgaataaatgtttttccaataacagtgccagcattaagggatagacgtgaagatatacctcttttagtggagcattttattaataagttcagtaaagattatggcaagaacataaaatatgtatcagatattgctatgcaagaatttcaagaccatgattggccaggtaatattagggaattagaaaacttgattgaaagagcagtaattttatctaattctgattcattaatgctttcaagcatcagttctcaagaggctaataaggaacgacttatttccatgtctaatttaacccttaatgaggtacagcgaaatcacattcttaaaatacttgaaaaatgcgattggaaaattgatgggtctaatggtgcttcaaaattacttgatatgaagcccagtactttaagagacagaatgaaaaaattgggcataaataaatcttctacaaactaacggtattccgtgaatttcaattttttattcatttttacaacggtattccgtgagtattttttaatctttatttttttaagcatattttaaatagctaaaaatcaaatagttgaattaattttattgttacttgaggtgctttggcacaccaattgtctttcagtttttaatcaaatagaagacatgtgcaataagattaaatgtaaaaaagctaaattttggatagaagatggtgtgcttatttgtgaattttcagatgataattgcataaaaaagtttagcgaatatttttcagaagaatatttaaaagcaattaccaagttatcaaatggtggatattttccattacttatagatcttaggaaattagataagaactatgctttttctatagctttaatattatcaaaaaggccagagcttaaattagctatactatcaaagtcttttgttgtcaattcctattttttaaaatttgtacttaccatatttggaagaatctatgactcgattattcccaatagaattttcatgaactataataaggccattgaatattcattagaaacccatcaaaatttttatgcccatactaaatgattacagacaaaagaataattataattaataagactagattttggacagactctagaggcattcttttttgcgaattccaaaataaaggtacttatctcacactagaagtagatgctatagaaaaatatgaaaaagctatttctgaattgtctcaaggcaatccaatgccatttttaattgatgtcagagatgttcaaagcaattttagcattgagacggccaaattgtttgctaataatgttgtttttaaaaaaataagaatttcagaagcttatgtaattaattcaataaatactaaattattaataaacacgtacaaaagaatttatgagccaactactccttttaaaatattcaaggattatgatgaagcattagagtatttaattaaagttaaaaaaacattagatggaggcatttaaatattatatgtggcgaacaagccccgagatcgccatttcaaaatttatagaaagcaatgtggctatttcagtttcagataatcttggacgtatagtatacgccaatgatcgtttttgctcaataataggttgtgaagaaagagaacttataggtgtgaataatagtttacttaaatcgaatattcataaagatcctttttataaagaattatggataactattaagaatggaaacatttggaaaggcgttttatctaataagacaaaagaaggaaagtcattttggttagaaactactattgtgccgttaaaagacagcaaaggtgttgtagagagttttgtggcaatgtgtttagatattacgaagttgaatgttgaatatattgaaacggccaatgtagaacttgataaaatgattttaaaaaagaattaatagagtatttataaaatattgaagattcttcaataaaatttttgacaacactaaatgaagactttgattattgtaataaagagaaataaaatttaatgaaactaataaatcaacaaatctggagagataatccagaaaatattttactggattttttaaagagtcagacgagtatttccattatggatattctagggcgtattatctatgtaaatgctcaattttgcaagcttgtagaatcttctaatgaacaacttgtaggagaggtcaatttgcttttaaaatctgagcgacatgttaatccattgtataaaggtttgtgggcaaccataaaacggggtcaaat

SEQ ID NO: 3121 - DNA, 24311 bp, synthetic construct
  misc_feature 1..24311: note = Synthetic
  source 1..24311: mol_type = other DNA
ggcctaaacgtagccgattgatagagggtatttccaatgattttaaactctagccaagcttcgcctggtagtttcatttcggcaaagagaatcaattttccttcttctttattggcatacaaaaccctccaaaaatccagtgcatcaccggcatgaatatcgtgtttgttggtacgtcctcttctggagcccacaccaccatacaatttatctataaaaccacgcaaaccccacaaccagtctccgtaataccagcctgtttctccaccaatagaccagatttggtgaatggtatattctcggtttatgatttccattttgcgtcggtcaatgaaacagtctttttttggtacctgtaaatattcggaaatattacttgtaaaacgaccactgatcagggaatctttccaactcgatgctactttgtcttcatctacttttattaatgctttcgaaagtgcctgttcataagacatgggatgtagctgtaatagttcgttgattttagtatctctacacaccacttcaaccttcatgctgctcactaaggcagtggccaacttataagatgttgaggtgacgaaatacagccaataggaggagagtttaggcgtcattacaggaactgtaaaaatccagcgttttagtttttttgctttggcaaatcccaaaagcatttctttgtatgttaaaatatcggggccgccaatatcaaaactttgattgtaagtgataggatttaaaagtgatttagataaaaaatcgagtacgtcagtgatggcaataggttggcatttagtattgagccattttggggtgatcattacaggaagtttgttgaccaaatcccgaataatttcaaaagaagcactaccagaacccacgataattcccgctcgcaaagtggttagcgcaaaagctcccgagctgagaatgttttctacattttttcgggaggataggtgttttgaaagtgatttgtcattcacaattccgctcaagtaaatcacttgtttagcttcggtgttattaatttttgaaacaaaattctccgctgagatttgttccaattcatcgtaattatcagatgaactcgacatagaatgaatgaggtaataggccgcatcaatatcttccgggatagtatgaagcgtttctttttttaggaaatcaacttcaataacttcaattttttctttgaattcagtcggaatataaaacctgtttttatctcttacgcaacaaattatatcgtgtccctgatggactaaaatgggtaaaagtcgcttcccgatataacctgttgcgcctgttaagagaattttcatggttttttatttaaatttagctcaatttattcgaaatcagactaataaattcttttcgggttttgtttttttcaaatgcacccgtaaaagaggaagtagtggtaaacgaattttgtttttgaatgccacgcatttgcatgcacatatgttgggcctctataaccactgcgacgcctagcggttctaatgcttcttggatgcaatttttaatttggtcagtcaatcgctcttgaacctgcattctgcgggcgtatgcatctacaattctaggaattttactcaatccaacaatttttccgttaggaatataagcgacgtgtgctttaccaaaaaaaggcaacatatgatgctcacacatagagtaaatttcaatgtcttttaccacaatcatttggctgtggttttcggtaaacaaggctgattttaaaatttctaaaggatctaaatcatatccatgagttaagaattgcatggctttggcaactcgttcaggtgttttttccagtccttccctgttgacatcttcgcctaagttttcgattatatttctgtaattagcggctagtatgtccgttgtttcgctgtcgtattgctctgttttttcgtaatttttagttttatttaatatcattttttgtttttttatgaagattagattttaaaggtaactatgccataatccatttcgaatatttggcctgagattgattttgctttttcagaaattaaaaagtctgccatattagccacttcatttggagctaaatagcctttcatcggatgacgttctttcatgttttctttcattcgatcgttgcgtaatatacctgccgaaagtgatgtttcagtaatggtaggggcaatagcattaattcgtatcgttgatgctaattcagccccaagtgattttaccagcccttcgatacccgcttttgccgtggcaatgctggcatgaaaaggcatacccagttttgcggcaacggtgctaaaaagcaatatcgatggatttgttcctttttttaaaacaggcaaatactgctgaatggcctttacggcaccaatcacattaatctcaaaatcatttctgaaatcatcaatacttaaacttccaattggtttcaaattaatcgaaccgggacagtaaattaaagtgtcaatgttttctatttctggtagcgagtttttcattacatccaaggtataatgtttcagattggaatgtgaaatttcaggagcatttctgctgatattatagatgtaattgttttctaattgttgcaataaaatcgcatttccaattcctttgcttccgcctatgatgactatgtttttcataaaatgtaattattgtcttttagaaattttattattactaatgtttctttgtctgttgcatttaaaacgtcctttttcgaattcgcgtaatttttcatgttttgtttttcgaccctgcacccgttcgcgccacattctaaagcttgacggtttcatttcggtacgcattaagtcaatcacttcttgttcttttaaaccaaattgcatttggattgcttcaaatgtggtacggtcttcccaagccatttcaatcactcgatctttttctaaatcagataaagtttgtgctaccattcttaatattttaaatagtcattgaccttgatggttgctttcaaatcaaacattaaattgtataaaccaaagaaagtcctgttcatgtaaataaaatgtttcgaacctcgattgccattcatttttttgagattagtgtcattagcaaagcgttctcctagttgtgcaatactttcaaaaaagacttcatccgaaaaatcaaaagtttctccttggaatggcttggtgaataatgacaatagatcgtaaaacatttgagtgaaataagcgatttcttcttttgaatcatctgttcgaaggatttctaaatcgaataatttctcttggaatagtttttcattgtctatgatttctttgttaattaattcgaaataaggaatgtagaaatcattaggaatggttttcatacatccaaaatctaaggcaaccaattgatttttgttgttgattaagaaattccccggatgtggatcagcatgtacttttttcagaatatgaatttgatacatataaaaatcccataaagcttgaccgagtgtattggcaatttctggatttgaatttttaaattcagacagatgaactccggtcatccagtccatggtgattattttttcggaagaatattcaggataatattccggaaaaacgaggttgtcaatttttctgcaagcatcaaccacttcttggctttgtttcagttccaataaataattggtttcttcaatcaatttgtcttctacttccttaaaatatttatcggaatcttttccctgtagattaaacattctgatggctatgggtttaaccaaagccagatcagacgaaatactgttggcaacaccaggatattggatttttacagccagttttttaccgtttttggtggccaaatgaacctgaccaatactcgcggcattaaccgaattggcattaaattcatcaaaaatctcatagggtgttttgccaaaattagatttgaaggtttttagcaccaatggagccgaaagtggcggaacagagaattgggacagggaaaatttttctacataggcctgtggcagaaaatttttgtccatacttagcatttgagctactttcaaagcgctgcctttcaaacttttcaaaccatcataaatatcttcggcattattttcgttcaatttatctcgggtcaagtctgaattgaccattttttccccgtaatatttaagatagtttacgcctactttagcgcccgtctgaaccagttttgtagctctttcaatttttgaagttggaatatagtctattgttttcattatttattttgtattttttctttaaaaataaacttcccaaaatcgattaaactattaattggtcccacgttcatcaattcgaaactaagttttacggatttttcaatataaatatctgttttttcaaaattggcagagccgtcctccaaccaaaattttaatgtaaatagaaattgaacccaagcgctttcttgaatcgctttttcttgaaaatcttgaattttttcttgttgaatgcgtacttcatcagtcgtgatttcgccaatgaattttttgaaatgatttcttaaacccgaaagttgcagtaaattttttaactgatttttatcttctttgaggctcatactaacatagctgcgattggctacgagtaattcgaaaaaggtaaaatagaagctcagtagcttacttttcatgtcataagagtcataattagtatctttattcagtaattcaacggttttttcaaaaaacagattgtagatctccttttcgatgctttccagatttccaaagaaactgtagaattccgcttcggtgaattcatttaattttgaaaattgatatactgatttaggcttctcgccttgctctaaggtataattcataaacatggatacaatagagtcctttgttattttagattttttagttgccatttttttttgttttttaaaaccgtataaagataataaatgtttaacaaaatgatgttaaagttaaacaaaaatatattcgtatctttgatagactttaagaatgataaattggaatacggatgaaaaaaaatgttttgttgacaggaggtactggatttgtagggaaatatttgactcaattgttgattgagcaaggtttttcagtctctattttgagcagaagtaaaagaacaaataccgaagatgtattttattatacttgggatgttcaaaaacaaaccattgaaaaagaagccgtactccaagctgattatgtcattcatttggctggagccaatattggagaaaaaaaatggaccaaggcgcgcaaagaggaaatactatccagcagggaactttcggctcaattaatttatagtgttttaaaaaaatacgataaaaaattagacgcttttatttctgcttcggcaatcgggatttatggagcgatcaacggcgaggagatctgtacggaggagatgaaaccagccaatgattttttagggctcacttgtcaaaaatgggaagcttctgctgatcgtatcggtgagttgggcatacgcacggtaaaagtccgtaccggtttggtcttggggaaaaatgatggattccttaataaattaacgcccatttttaagttgaaattgggctcagcactgggttcggggaagcaatacatgccctggatttatgtgaatgatttgtgtggaatctatcttgcagccattaaaaatccccaaatgcaaggcgcttataatgcagccatcgatgataatacgaccaatgccagtttttctaaaacattggcaaaagtgtatggctataagatttggttgcctcatgtgcccgcttttttgatcaaaatggttttgggtgagatggctttattagtcttaactgggcgtcgggtttcttcagataaaattaaacaattaggatttcactttcgacatgaaaatttagaggagacagtccgagtttgtttggataaataagtcttaatgaaaaacagttttgacactaacattgacgtttttagctattttactcctcacgatagaaggaacttcaatattgaaatcgtcggtgtttaaagtgaaattagaaatgagttccatgccttcggcaattttttggatttgggcaataacatttatttttttggatttcccacggataattatttcccctttgatcaggtattcctcttttttttcgtttaagtttttaatgtcaaatttttcaataattcctttaaatatggcctttgggtatttcttgctatccatataatttttattgaaatgttcttccatcaggcttctttcaaaacggaactggtttatcattgccacaaaaacgatagtatttttttttgtattcaaaacagaattgaccatttcgtttttagcttccacagcttcaaaaaaaggcacagacgcttcaaaaacaatactgctgtttttggcgatcaatttctcttgtgcatcaattgaattggcaacaagtaaaaggaatagaagtaaaattgttttcattttgattgcttgtatgctgtttcttaaagttacgaaaaataatccaaaatggttttgaaagcagcgtataaaacacaaaaaaaagagccataaaaatggattttcaggctcttttataaggattgttagttttttagtctaattggattagaacattgtgtttctctaaacgattgatggtttcctcagaacagaaattatacatctctttctcgcgttttttttccttttttaaggcaatttggttcaggcaattttcaaaacgtcttacttcttcaagagtagagaggataagacccggaaccatggcatttgcgccatctttgtcttttgaaaccatcgtaaaataagaagaattgcaatgtttgactagtccggtttggatattttctgattcgacgcggataccaacaatcattgaacttttgcctacataatttacgctggctttcattgttactaattcgcccacttcaataggattcaggaaatcgactgtatccacggaggcagtcacgcaataattccccgaaaatttagaggcgcaggcaaaagcaatctgatcgagtaaggaaagaatgtatccgccatgaattttaccgctaaaatttgcgtgtgaaggcaacattaattccgaaatgctgatattagacgaagctacttttttataggtcgatttcatagcgtttagtttaataattggttttcgtctttttcagctcggttgatgatactttcgggaagcgatttcttagccttggcgcccatttttttcaatttttccacgctggtaatcaggtttccttttccttcaaccagcttgttcatcgcaccgctatattcggctttactttcgtctattttcttgccaattttgattaaatcagcaacgaaaccttcaaatttatcatacaaagcaccggcttgtctcgcaatttcaaaagcattttcctgctgcttttggttggtccacatgctgtctatggttcgcaaagtagccaatagagtagaaggcgtcacaatgacgatgtttttctcgaaggctttgttgtataaggttgtgtcttcgtttagtgccatcgcaaatgcgggttccattgggataaatagcaatacaaaatccggactttctatttggtacaaatcctgataatttttgtctcccagttgttccacatggcgtttgatcgagttaacatgttctttcaggtagccgtttttcaaactgtcgtcttcctcattgatgtatttttcataagcggtcaatgatacttttgaatcgactaccatctttttgccgtcaggcaggttaattacaacatccgggaacacgcgctgtccctcgctattggtgtgggattgctgtacataatattcacggtctttttccagtcccgatttttctaacacgcgctctagtaccagttcgccccagtttccctgcatcttgctgtcgccttttaaggctttggtcaggttgatggtttctttgctcatttggatattcatttcgcgtaagcctaaaatctgttggcgtaaagccgcatgataatcgatgctttctttgtgagtatcttcgacctttttttcgaataactgaattttatcctgcaaaggggacaggatgtttttcatgttttccttgttctgctcggtgaatttattcgatttttcgtctaatattttattggccaagttttcgaattctttggtgaatttctcctgtagtttctcgacctcgtctttttgctctttgttgcgttcccaaagattttcaaaatcgacttctttttttgaaagttgaatagccaggctgtctttttcgcttcggatgatttctttctcagaatttatggtttccaattgtttttcgaaagccattttatcattcgaaaattgttcttttaattgattgaattgggaatttaaagcaatcaatttctcttcgagactaatcttttccgattgaaaacgggcagagaataagagctttccaataaaaataccaagggcaagagcaatgataaaaaccaataaaaacgggagcatagttgacataaaagggctgttttttttataaaaagtaaaagtatgaaaaagataggagagttcgttaaaattgataacagacaatttaaaatgtgcttttacacaaaatttacttttagccatggcttataattatttcatccttcgcaaagcctatggttatttaaggtagttgtttataattggataaggcagaagaaacttatgcgatagctgcatcttctcaataatgcacagggagattgtttaggggttgtgtataagttgtttaggtttagtgttttagtagtattaattatagtatattagtactattatagtgctataagagtactatatctatgctttaaatcattttaaaacattttgcataagttgggattaaattagtgattgtatagctaaatattatttacctatgggaaaattagaggggattgttcgttttacggggagttttgacggcttgtcgttttataagcttagggggaaaattgttgttcggaagactggcgggtttaaaggggatgccataaaaacgcaagctaattatgtacggacacgagagaatgcctctcaatttgggtattgtagcagggcgggaaaggcattgcgtatggcattatttccttttgttcgaaaaatacgcgagccatatatgcacaattatgtggtttcgttgttgatacaaattgtaaattttgacactttatcccttcgagggtgcaaaactttgacattaggtttggccagcgatgagggacggtctttgttgaatgggtttgattttaacaaggagttgtcttttaaaaaagtatttcccgttgcttacactgtttcgttggcagaagggaagtttgttgttccagtttttaaaatgggatcgctttcttttcctgtgggcgctacgcatattggactgcagtttttgttgcttcgttttgattttgatcttctagactatcaattgcaaacgagcgaggtttgttattttgcgaaagcggatagcgaagcttcgtgtgagttggttgctcctgctgttggaggaaatggttctttattgggtttggtgtttgcgtctttttatcaagaaatcaatggggaacgctatgctttggagggatgtgtcttgagtgtggtggatttgcaggtgtaagtgtttttttgggttgtaagaaaaaaaagtctcaccgaagcaagactaaagattttcatctactccgccgcggcggattattgtgatacgattaaagattagaaattattttaaaaagtgaatcccacggagtacgcgggattctagattttcatctacgacatatagccttattgtgataagattaaagattagaaattttaatcagaaacaaatatagggaaaactaaattataaacaaagggtattattatagaatttttcttactatatttataaaattgaaataaaaggatttattatggcaaaaatattaggattagatctaggaacgaactcgattggatgggctatagtggagaaagagaataatgatttttctttggttgataaaggtgttcggatattttccgagggtgtgaaatcagaaaaaggaattgaaagttcacgtgcagcggaaagaacagcatttagaagtgcccgaaaattgaaataccgaagaaagttgagaaaatatgaaaccttaaaagtgctttctgaaaatggaatgtgccctttatcttttgaagaagtagaagaatggaaaaaatcgggtttcaaaaaatatccattaaatccggaattcttaaaatggttgcggactgatgaagaccaaaatattaatccttatgtttttagagatagagccagtaaacaaaaagtttctttgtttgaattgggtagagctttgtatcatattgcacaaagaaggggttttttgagtaatcgattggatcaatctgctgaaggaatattagaggaacattgtccccaaattaattcattgattgaagattgtaattctaatactgaaattctaattgaattaaaagattatttttttaatgttggaatccttgatgaaactaataaaggaggtttcaaaaaagagttagatgaaggcgaagccaaattaaaaacgctatataatgctcttttgagtatagttaaacgaaatgaaaacaagtttattgaggctaaagaagaaatcattgcaagattaaaccgaaaagaagatttaggaaaggtaaaaggtaaaatcaaagatatttctcaggctatgattgatgggaatttcaaaacattaggtcaatatttttttagtttatacaataaaaacaaaattagaaaccaatacacttcaagagaggaacattatctatatgagttcatcgaaatatgtaaaattcaagaaattgataatatagatgaaaatgaaaaattagctgaaaagaaatttagcggattagctaaagatttatacaaagcgatttttttccaaagaccattaaaatcacagaaaggattaattggaaaatgttcgtttgaaaaaagtaaaactcgttgcgccatttcgcatcctgattttgaagaatatagaatgtggtcttatttgaataccataaaaatgggaactcaatctgataaaactttacgttttttatcacaagacgaaaagctaggtttgatttcgaaatttttaagaaagaaagacaattttaattttgaagatttagccaaagaacttattccaaaaggggcaacctttgggttttataaatcatccaaagctaacgaggttaattatttgtttaattacaaaccttatgatactgtaactgcaagtccagtttcggcatctttaaaaaatatttttggcgaagattggaaaaccaaaaccatttcatataaaaccaaaaactcaaaaggaattgaagtaaatagaagtgtagattataaagatttatggcatttactttccgtttcaacatctgatatttatttgtttcaatatggcaaagagaaattaggattggatgataaaaatgcaaaagcatttagtaaaattcgattgaaaaaagattttgcaagtttgagtttgaatgcaattaccaagattttgtcttatgttagagaaggattgttgtattctcacgccgtttttatggcgaatattgaaggtattgtcgatgaatcgatatggaacgacagcaatcaaagaaaatttattcaggataaaattgctgaaataattgaaaaccacacttttgaaaacggaaaattagaagcaattaatagtttgattaaagagtgtaaaacggtaggtgctttttattctaaagaagctgaaagtatctacaaatcagatttggataaaaaattaattccttttgttaaattccataaaattgaatcggacaaagaagcaattttaaacgaactatttcctgttctaattgaacaattgaaaaagtatgaatatattaaaatcaatcgtttagacgaaaaagttttagactttataaaaggtaaaaatgatgatggcgaaatattctgtacaaatgaaaagcgaatcaataagttgtatcatccatcagatatagaagtttttaaaaagaaaatcattaaagatgaattcggaaatgagaaggtggttttaggaagtccattaacttcatcaattaaaaatccaatggcaatgcgagctttgcatcaattgcgtaaagtattgaatacattaatttttgaaggacaagttgacgaaaaaacgataatccatattgaaatggctcgtgaattgaacgatgccaataaacgaaaaggaattcaagattatcaaaatgaaaataaaaagaatcgagaagaatatgccaaagatataaggaagttatatttcgaggaatgcaaaaaagagattgaaccaacagaagatgatttattacggtatcaactttggttagagcaaaataagcaagaaatttatgaagagggaagaaatataagtatttgtgatataattggaaaagatcccaaatatgattttgagcacactgttccaagaagtcgttcacaagataattctcaaatgaacaagacactttgcagtcaaaagttcaatagagagataaaaggaaataaaatgcctattgagttaaataattatctcgaaatattaccaagaattgcacattggaaagaagaatcagataatttgaccagagaaatcgaaataatttctcgttccataaaagcagcagctaccaaagagcttaaagacaagaaaataaggagaagacattatttgactttaaaaagagactatctaaaaggaaaatacgaccgatttatttgggaagagcccaaagttggtttcaaaaacagtcaaattccagacacaggaatcattacaaagtattcccaagcctatttaaaatcgtatttcaaaagagtagaatccgtaaaaggcggaatggttgccgagttcagaaaaatatggggaattcaagagagttttcaagaaaacgacaaaaaatattttcacgaaaaagacagaagcaaacacacacatcataccatcgatgcgattacaattgcttgtatgaccaaagagaaatatgatgctttagccaacgcttggacacacgaagacaaaggacaacttggtgaagcacgaaaattattggctgattctaaaccttggaaaacttttaaagaggatttaaaaaagatagaggaagaaattttagtttcacattacacgcccgataatgttaaaaagcaatctaaaaagattgttagagttagagggaagaagcaatatgttgcagaaactgttaaggatgtaaatgggaaagcaatagtccaaaaagatgttgatgataaaataattttcaggcttaataaggaaggaaagcgaattccaagattgcaacagggtgataccattcgaggttcattacaccaagacagtatttatggagccattaaaaatccgttaaatacagaagaaatccgctatgtaattcgtaaagatttagaaagtatcaaagcgtctgatgttgagaatattgttgatgaaatggtaaaagcaaaagtcaaagaagctattacaaacaaagttttattaatttcatcaaatgcacagcaaaaaaataaattagatggaatagtttggatgaacgaagaaaaaggaattccaataaacaaagtcagattatatgccaattcagtaaagaatcctcttgaaattaaaatgcatagtgatttgtcaaaatctcgacacgagcataagcaaaaagtatatgcccagaacgatgagaattttgcaatggctatctatgaagattttgataaaaaaggaaaaataaaaaggtcgtatgaaatgattaataatattgatgcaggttcatattataagttgagtaatgcagaaaataaaatcaactatgacatcgtaactaatcctcacgataagacaggcttaccattaaagtatattctaagaaaaggattgttggttttattttttaaagaaaatcatcaagagattttagaattacctactgacgatttgcataatcgattatacaaattagctaaatttgacgcacaaggtaggttaacttttagaactcattttgaagctagacaggctagtgatttaaaagaaatttatgatgtagattttgaaaccccatttgaacaaattagattgcaggtaagtaaattaaatatgttagttgaaggatatgagtttaaattgtcttcttcgggcaagataacttttatttaaaaaagttaaaagttctttgacataagttttcattgtcttaaacatctcaaaccacaactgaaaggtatggcatccgcccagcagggatgcagtagcttacagttgtggtttgattaaagattagaaaacacgatattcttctcggaggttagaattacttatctagggttgtggtttgattaaagattagaaaacacgatatttgcatttatttcctggtaggagcgttgcaagttgtggtttgattaaagattagaaaacacgatattcggatctacggtgtcagtttcgccttcccagttgtggtttgattaaagattagaaaacacgatattgaattcattaaataaaatcacattatacgagttgtggtttgattaaagattagaaaacacgatattgatgattggcaaaatccaaaacaaaaaacagttgtggtttgattaaagattagaaaacacgatattaatgaaaaaatcagcttatcaaatttgtaagttgtggtttgattaaagattagaaaacacgatattatatttagaaattatattagtaaacaatgggttgtggtttgattaaagattagaaaacacgatattcatgcaaacaaatctaaataagcttgaagggttgtggtttgattaaagattagaaaacacgatatttttctccagcagcgtaatattcaatcttaggttgtggtttgattaaagattagaaaacacgatattactgacagaaaaaggaaaactaccaaacaagttgtggtttgattaaagattagaaaacacgatattatttcacttggaaagatggtagagatgatagttgtggtttgattaaagattagaaaacacgatattaaataagtcagctggtgtagttttgaagtagttgtggtttgattaaagattagaaaacacgatattgtatcgactttttaccccatttgttctcaggttgtggtttgattaaagattagaaaacacgatattaacggctgacaagcgtcttagagagatagggttgtggtttgattaaagattagaaaacacgatattagttggtctgttgtgttctgtatatcaattgattaagtgtaggtatcgtaagataaaatgctccttttttggcttgataacccaatattggcgcatttttttgtttctaatgtttgaaagtattgatttttagggatgtttaaattatttaattttgattaaagagacaggtcgcgacctgtctgtacggtttatgatcaataaaaaaaaatcaattgtttatgaaaagtagaaagcgaaatcgaatggttggatatgattattcgcggaataatttgtatttcgtgacatcatgtgtcaaaaatatggaatgttgttttggtgatgtggttgcggtagggacaggtcgcgacctgtccgtacataatccagatgaaaataatccagatgaaaataatccagatgaaaataatccagatgaaaataatccagatgaaaataatccagatgaaaataatccagatgaaaataatccagatgaaaataatccagatgaaaataatccagatgaaaataatccagatgaaaataatttcgataaaaatgaatcagaaatgattttgaatgaatatggaattattgcaaataatcaattgcaatggttggaaattcaatatccttatattgaactccactcttatatagtcatgccgaatcatatccatgctataattgaaatcgattcgctaaagctaaactcaattcgcaagaacgatacagatcaattgaattcagaggacataaaaataaaatccctttccgaaattatgggtgcttataaaacaacaagttccaaattaattcatcaggcagattatggtgcatttgcatggcatcgttcttttcacgatcatattatcagagatgaaaaggcatatcaaaatatcgtgaattatatagcgaataatccaaattgttggaacaaagataaattctataaaaaaacagtttaaaacagttccagttgtgtgggcgcatccacattttccagtttcgctttcccgagataattaataatcatcccaaattgtttgtcggttatccgcaaaacactgactttccctaagggcgggacaagccggttcaggcgtttttcatgcacatcggcactttcgctgcttgcacaatgcctgatataaacagaaaattgcatcatgctgaaaccgtcttttaaaagactgcctcgaaattgggaagcatttcttcgatcttttttggtttcggtaggtaaatcgaagaagacaaacagccacattattcggtatccgttaagttccataaattgggatatttgattttttttcggtttcctgtaaagcattgctgcagcgagctggctgttttttgcaggcctaccatcaatgggctcttttcctctttaaaataaacggttcgtgttaggatctgaagcatttctgctttcagcgtcgaattgagttcttgttcctcatatttttgcatgatttgatacactttttcatctacaatgggacgaaaaggctccataatatcatcggcaagggcaaaagcattgtatttacttttatgatggatgcccagagtatttagcaatccactgcccgaaagtgcccgagccgttgccgctctcaaaatggcatagccatagtttaaaaaattgttagggtaatttccaaaacgctctctttttaatccttcattttcctgattaggaaatggaaaatgtttccaataaaattgggctgctaccccttccatattggaagtgtcaccactcaaaactttactggccaggaattcaaaggtattcttcgtttcggttattcgttccagtaagattccttgatttttaattttttcaacaatagtttgttgccataattgtttttttaacggcatggaagcttcaatctgatttttgaaaatttcctgttgaatatgatggctgttcagattgagaaacataccatttggtaaatggttgttaccgcaaataataatagcggtattgttctcaataatcaaattcatcgctggaagactcaggtatatttcgggattatcaagcaccaaaaaaccaatatcttcaataggaattgcgctttcccgtatttctgattttatgactaactggagatttttggtggttatcgaagatttattttcgaccaaaagagttctttttatcatggtttatttcgttttggggtttttaataaaatgattgctagtaatttactgattaaaatcacgtgttttgactttttttgtaaaaattttctccaaatgattgcaaaagttttttgcagttgaagaattctatatttgtatttttgcttcaaattttaaaaaatgcttcaccatcatttcatccttcacaaaccctatggttatttgagtcagtttatttatgaattgaaaagaaaaaagaagctgttgggggagttgtatgattttcccaaaggcacgatggcgataggccgcttggacgaagattccgaaggattgctgctattgaccaccgatggaaaaatgagcgaaatcattcgttctaaaaaagtggacaaagaatattatgtgcaagtggacggtattattactcaggaagcaatagaccaaatgaaagcgggtgtcgaaataggtttcaatgggactaaatacctcactaaacgctgtgaggcggctttgattactgaggttcctgactttggcgccagaggcaaaaaaatacgcgatgaacgtcatggtcccacttcctgggcttcgattacggtcaatgaaggcaagtttcgtcaagtgcgaaaaatgactgccgctgttggttttcctaccttaagattggttcgggtgcgaattggtaatgtacatctgaatgatttacaagctggagaagttaaagaagtgtctgattttcaaatagaaatttaaaggtattgaggtgattttctcaatcttttaattttccaatcttttaataaagtatagcatgttaaacatcgttttagtagagcccgaaatcccaaataatacagggaatataggcagattgtgtgtgggaaccgaaagcaggctgcatttagttcatccttttggatttgtcatcaatgacaaaaatctgaaacgttccggattggattattgggtgcatctggatgtgaccgaatatcaaaacctagcggaatggaccgctcaaattcctgataagtccagggtttttctgatgagttcccatgcggaaaaatcctatttggacaccgaatttcaggatggagactggttggtttttggaaaagaaagcaaaggattgggtgaagaagttttggctcaatttgcgaatcatctaaaaattccgatgtctaatttgattcgtagttttaatattgccaattccgtagcttttgtaattggtgaagccaaaaggcaaatcatgttgaagtaaaaagctgaaatttagaattataaaagatttccgttagtttgaaattttatatatttgagtaggctgtttgccattgcggttgactgcaactcattttaaaatttcttttttatgattgataaagctcttcaccgaagtactattttcagacatttggatggtttggtcactgcgcctgtagcctatgccttgcataaaaaagggattctggcttttatactggataaaaaagagacgacgcttaacgaacttagcaagcagtttaaagccaatgaaggctatttaaatgtggctttgcgtgcgttgtgttcccaagggtttctgacttatcaaatcaataatgaaaccgaggaaattaaatttggcttgaccgaaaaaagcgaaatggctttttcactatttcatctgtatcaagatgtggtagacttattgcaattttcgatgcaatttgatcctcgattatttgaagaggcgccttttgaaaaactgagtgtcattttcgaaaaatataaaaagaattatggtattgtattttcggaggatcctttggtcaatgaaatacagcatcaagttttaaaacatattgaaggttctttggttggtcctacgctggtacgtcttggtatgagcggaatgtttcataaatatttcatggaaatttcctttcgcccggaggaatttcacaaatccccagacaatttcaagaaaatccttgacttcttggttcatctgaactggtttagggagaaaaaaggaaattatcaatttaccgaaacgggtttgttttttgccaaaagagcctctgcttatggggtaacggtttcttatttgcctactttcagtaaaatggacgaattgctatttggcaatccgaatgtattgaaaaatgtggaagaaggggaagacgaaattcatgtagaccgcgagatgaatgtgtggggaagtggcggcgcacacgatacttattttaaagtggtagatgagataatcatcaaattattcaatttaccgatagcagagcagcccaaagggattttggatatgggttgtggcaatggcgctttcttgcagcatatttttgacgtcattgaccgacaaacgttgcgtggtacaatgctagatgattatccgttgtttcttgtgggtgtcgattataatcaggcagcgttgaaagtaacgcgtgccaacttgataaaagcagatatttgggccaaagtaatttggggcgatattggccgacctgatttattatcggacgatttaaaagagaattataatatcgatttgaaggaattgttgaatgtgcggacgtttctggatcataaccgcatttgggaagaaccgaaacagattaacaaggatagaatcagccaatcgaccggagcttttgcacacagaggcaagcgaataagtaataatctggtggaagataatttgctggagcatttcaacaaatggtcgccttatgttcataaatttggattacttatgattgaattacacactattgccccttctttaactgccgctaatttgggaaaaactgctgcaactgcctatgatgccacccatgggttttcggatcaatacatagtggaaattgaggtaatgcataaaatagctgctgaagcgggtttattttctgaggctgctgtttttagaaaattccccgattctcctattgctactgttagtattaatttactgaaagggaaataataaataatataaaaatgaggaagtaccagcttcctcatttttatttaatctcgtgagacaaattcacttaatgttacgtaagtgtttcccgttacatcatcatgataaatgttgtatttagttgggtaattccccggttttgcaaaatgttccggttgggaataatcgatactggacatggcatttgaaagtaagtaatctaaagtgatcatcggctcaataaatatcaaattgccattgtaagatccgtataccattattttgctaaaaggtaaataatcgcctaagttcactggcagccagtgttttcccatttgggcttcagcagtagcggcatcaggaggggtgaaataatctgccggcatatagcctggaggaggataattattaaataaatcatttgtttccggggaccattccggtatagccatttgttcttcaaccgatatcatgtaaaagtgaatgtcaaaatgcggtacatcaaatacatgttctggttcatgaccattgggattccaattaattccaatatgatcaaagggggttagctggctggctttaaggtgcaacggaataacaattgtagtgcctgccaagggggcgttgttcttgtctctttcgggatttaatagcgcttctcttgtcatctcaatcccaatttcctttggattgccattggcatcaacactaatccatgaacgtacttttccgtttccgagtgctacttgaggccctttgaatacattgagttgggtagcactcttttttaaagttaaagatttggatgtgtttgtttgtaattcagttgtaatcatttcatcttgactgcaggaatagagaaaaaataagccccccaatagaataatttttttaagtaaagtacacgaattttccataattaaaatttttaaagattagttttaataatgtagataagtcgagtttggggaaatcagaatgaggaatactaaattacaaaacaaaaatgtatttgactgataaacaggtttttttgggtgtgttttatgataattatcctgttcgtaatagaattgtcaattttgttgtgaaatattgattatacaataataaatttccctttttcggaatcaaacgagatgtgttcgtctttgaaaatagtgttgaaactccctttagaaatcaaattacagggttcgtcctgaataacagtttctgttgtcatcaggatcatatcgtcactcaattgaattgccatatcaatatcatgtgtcgaaaataaaatgcatttattggtttcctttgtcaattttttcagcagtttgaatagcgccactttgtgcaataaatccaaatgggtggtgggttcgtcaagaataattaaagcggtgtcttgtgccaaagcgcgtgccaccaatactttttgcagttgcccatcactgatttcataatgttttttggtcgccaaatgactgatttgggtcagttccagcgcttccttgattttggctgaatcaacatctgataatgttccaatccaattggtatacggctggcgtcccaaagcgaccaattcgaaaacggtcaaattactgggcggtagtttttcggttaaaacaatactcaggttttgagccaattctaaagcagtataggatgctatttttttatcattcaaaaaaacgttgccttctaagggtttttgaattccggtaatcgttcgtaataaagttgattttcctattccgttagctccaattaaagcaatgagttttccttgctgtaaattcaggttgaggtttttggcaataggtgtcacagcatttttggttttgtaaccaatgcttaaatttgaggtggacaggatgtttttattcatctatttttgagttttttttaaccatatagattcatagtttttttatactaaaagaattagatagatgttttacttttcatatagattaattcgtttaaaaacgtttgtgttatcatttcttttttaattaaaagattatcccatcatttttcgttttcgaaccaataaccaaattactattggcgcaccaagcaacgaagttatagcattaataggtaaggtgatatccaatcccggcatttgagaaactacatcacaaacgagcatgattgcggcgcccagcaaaagagtgctccaaaacaatatggagtgattactggtttgaaacaatagtttggcaatatgaggaacagccaagccaataaaagcaattgggcccgcataagccgtaatgcttcccgccaaaatgctggtagccagaataatgataagtcgcgtttttttgaaattgattcccaaacttcgggcatagttttctcccagaagcaaggcattcaaaggtttgatgctaaaaagactcaaaagaaggcctattagaacacagcttgttaaaaccgaaattgacgtccaggataaattccctaaggttcccatggaccaaaaggtgaatttttgcaattgctcggctgtgctaaaataggttagggttcccacaaccgcactggtaaaactaccaaacatcaatcccacaattaggattgccatagtatctctcaaacgatgcgaaaccagtaatacagccagtaaaacaatagaacttcccatggtggaggcaaggacgattccgtagggagacaataaaatgctgcttatgaaggcgggcataaaagcagctcctaaaatgacaaaagccacacccaagcttgctccagaactcagtccaaggacataaggtcccgcaagcggattcctgaataaggtttgcatcagcaatccactgatagaaagtcccatgccaaccaaaacggctgtaatggctttgggcaggcggtaattgatgatgatgtattcccatgtagatttactcgcctgtccgccggttaagctgttgtaaacttccttgaaagggatggttatcgagccaaaactgatgtttacaaaaaacaagacgagcagacctaagccgagtaaggaaaataaaagaatattgcgttgtttgttggccaatttagtttagtttttgtgcaaaggtaaaagtataattgggaagcagttcaggatggaagattttgatgtaatcttttaaaactaaatccggtcggctgggagccaattcataataaatcgttccgccggttgctcctatttttccttcaaaggtatatacttgtttggttttaaaagcatcaaattgactgtaatgcggatttgtctttgccaactcggctaccgttttataagggccagtggcaatccaatagttggccgttttggctttttccaatactttttcgaatgacaatcctaagctgcctgtcccttccgtatctgaccaaaggtaatgggctttggcatctgtcaggaattgggcaacccaactattggctttagcgacataccattgatcttggtacatggcaccatataaagccgttgcttctggttttttggtggccactaaatccaaggcttctttgtaattttttacaatgccgtcaaaaagggttttggcctctttttcttttccaaaaagagcaccgtagagttttatccattctgcttttccaaggggcgactgctccatccaatcggcttgaatcaatacttttaaaccgcttttttcaaggttatccatcattggattattattgtcgatgccaaaagtgactataagttcaggagtcatttcgatcagttgctccatgtttaatttttcattttgacctacatttttgaccgaaccattgtcgattcgttttctggttttttcggaagaaatatagt

SEQ ID NO: 3122 - DNA, 24293 bp, synthetic construct
  source 1..24293: mol_type = other DNA
  misc_feature 1..24293: note = Synthetic
ctgtgctacccgtttcttgatgtttttggctttcccgacatagaccactttccccacctgattatagaaatagtacacccctggcttttcgggcaactgctcgaattcggactggggcaggtggggagggaggttctggtcgtgcgagttgcgtttgatcatcttgggaatctccccggcctcatcccataacagtaatcgggagagcaggatggccgtggcatccgcatcaccaccggcacggtgggcacgtgtaaggggtatatccagtgtgcggcacaggttgcccaggctgtaggagggcaatcccggccgtaccttacgggcagcccgcactgtgcagagcttgcgggtggtccatttcagcccggcatgctccagttcatgctttacaaaggaatgatcgaaattcacgttatgcgccacaaatatccggccttccagcagctccaataccttttccgctatgtcatcaaagatgggcgctccggccaccatctcattattgatcccggtgagggcaaaaatgggcagcggtatttccttttgcggattcaccagggtttcccagcggtccagtacttgtatcccgtcatggataatgatacatatttccgtaatgcggcttcccgaggcattaccgcccgtggtctcgatatctactatggcatactcgttctttctcatcctgcttatcctgtctttttctgattagttgctgtattcatcttatgccttggcaggccgatttcctgctcctgcgggtaaggggcacgatgggtcattgaaacatcctcccgtaatcgctgcgccgtacaggtactttcctcttcggtttccctgtagcgcggatcggcaataaaaggcagcttctccattttggatatggtaatggtagggaagtggtagtccacctccaccgtacccaagagcaggtaacagccaccgcccttaaaagggtattgtttcaggctgccggtaaaatgggcggtatcaaagaattccccgttggcatcaatccacgtcccgaaatacatggcccccatcttggtgggtacatgcttgcgcgagaccagataggccagcatcttcacctgctttttatggtactgcaccaaatcccgtgccatgacatccccacggtagccggttttcaaaaggttgaacggggtaaccgataccggaaaacccagcagctcaatctcgtcaaaggcatcctcgaaaggggagcgtttcagttcggggagcctgtactgttgcaccggttcaggaagtagttgcggctggcgttgcaccggcttaaaatgcatcatgatacgtcgggcagtaaccaagagttcgttcttgttcttcccagtgcagcgaaacgccccgatatagatcaaaagctgcagcccttcaatccctataggcaccctgttgatgaaatcctccagcgaactatactctccattgtcactacgttcggatacaatacaacgggcaatttctccctgcagcccctgcaggtgcataaaacccagataaacgtcttttccgtacagggtcgtctccacttcgcttttgttgatacagggggtatggataaccgccccggacatcctcgcttcatgcacatacacctcggtacggtagaacccaccctggttgttgatgaccgctaccataaactctatggggtagtgcaccttcaggtacaggctctggtagctttccacggcataggaggccgaatgcgccttgcagaaagaatatccggcaaaggactcgatctgacggtaaatctctgcgctcaattcctcaggatgccctttggcggcacaagaagcaaaaaaattatcctttacacgttgcagagccgctttggaacgtcccttgccgctcatggcacggcgcagtatgtccccgtcggcagcggccagccccccgtaatgcagggcaatcttgatcacatcctcctggtagaccataatgccataggtttctcccagctgctcttcaaataccggatggaagtactcgaacctatcgggatggttgtggcggaaaatgtattccttcatcataccgctttgggccacccccggtcgtatgatggaagaggctgcgaccagcgttttatagttatcacacttcagcctacgcaaaaggccccgcatggcagggctttcgatataaaagcagccgatggtctttccctgtcccaaatacgtattacagatcgtttcatccttggaaagtgaggtatcgcgtatgtccacggtaatcccgcggttctttttaatgagccgtaccgattcgtcaatgtgcccgatgccccgttgggagaggatatcgaacttgtcaaaaccgatctcctcggccacatgcatatcaaactgcacaataggaaagcccttgggcggtagctccagtgccgtaaaatcggtaatggggtcttccgatatcagtatcccgcaggaatgcatcgagcgctggttggggtatttctccagcagcatcccgtaacggtgtaccaatcgtattacctcattggtatcgtgccggtccatcgaagtacccgagagggcatccagttcctctttcggaaggccgaataccttacccacctcccggaatatggatctgtatttgaattccacattggtaccgcagaaggccacatgatccgcgccataacgacggaagatatattccagtatcacatcgcgctccttccaggaccagtcgatgtcaaaatccggcgggcttttacggttgaggttcaaaaaccgctcaaaatacaaatccagttcgagcgggcagatatcggtaatacccaggcagtaggcaatgatgctgttggcaccgctgccgcgcccgatatgcagaaagcccatcgaattgctgtagcggacaatatcccaggtaatcaggaaatatccgctgaaccccagctcatcaatcaccttcagttccttttccacgcgcaggcgggcagcctcattattactcccatatcttcgtaccaatccctgctgtgccaaactggtgagtagtttccggtcggcttcccgagttccggtatagtgttttttgttgcggggcatgccaaactcatactggaaatcacattgcgcgattagggcaaaggtattctccagcaatttggggtaggagctaaagcgtaccatgatctcttccggtggcagcatatgctcatccgctctgcaataatccgaaggggtgagcttgctgcccagggtattcaggtcaatggcccgcaggatacggtggaggttgtactcggtcttgtcgcggaaagtaacgggctgcaacacgaccatcctgtccgtcctgtccctccaacgcgattgtatcagtaacgataactcaccgctgcgcaccccgatgtattcaaatgcccgcagggtatccggcgccttatccatcggatagatgaccactacctccttaaaatccggtgcctgagcaggtacaggaatctgctcaagattatgataggtacggtggcggttgatctccgctatacccgcacggtttttagccagtgcgatatacaataactgattcccttcacggaattccatcccgaccagaggcttgatatccacttccctgcaaagcctgtaaaactcatagatacccgttaccgtgtttatatcggtcaaagtcatagccgttaccccaaggcttttacccagggcgaccagttcggttaccgggacggtaccgtaacgcaacgagtgaaaggaatgacagttcaggtacatactattgctaacaaataaattaattcatcttaggtttaacaaacgccccgctgcagcgcatcacggcgttggccccgaagcggttcttgatcttatccatggcctgatacagggacatcatttcctgggtatcctcaaagaggttgatctggtaggaaccccgtaccagcctgccgaaacgcacccccacaaggcgcaggctcatgcggcgttggtagagcttttcgaaagcctccagtacggcacgggtcagggtatggtcggctgaggtataggcgagggtcacctgacgggtttcggtatcgaaattggaatagcggatctttaccgttacattggaggtcagccagccttcactgcgcagctggtaggccagtttttccaccatacccgagagtactgcgcgcaggaacaccatatcggtggtatcctgatgaaaggtatcctcggtggaaagggacttgcgctcccggtagggttccaccggggtatggtcgataccattggcctttttccaaagctccagcccgttaagtccgatcatctcctgcagcacctttgccggcatttcggccagggtaccaatgcttcggataccgatacgggagagcagggtaaaggtggcattgcccaccatgggaatctttcggatggataaggggttcaggaacggctgtaccatggcctgtggtatttccaggttgcccttgggcttgccttccccggtaccgattttggagaccgtcttgttgaccgacagggcaaaactgatgggcagcccggtctcacgggtcaccagtgaggagagttcatgggtccatttgtaggaaccgtggaaacggtccataccggtaatgtccagatagaattcatcgatggaggctttttccatcacaggggctttctcttcgatgatctgggaaacggtatgggaataccgcgagaagagttccatatcccccttgacaatacgcgcctcggggcagagacggagcgccattttaatgggcatggccgagtgcacgccgaagcggcgggcctcataggagcaggaagctaccacaccgcggtcaccaccacccacaattagtggaataccctccaaatcactgttctgcagcctcacgcaggacacaaaaaaagtatccagatccatatgtacaatcgatcgctccataaattattcatatttgtactgaacaaaattaggatttatattcccaaaaatatttatatttgtcgggataaataatcacaaaagacgatgtcactattttcagataatatccggtacctgcgaacccgaaaaggagtttctcaggaaattgtagctgaaagccttgctatcacacgggatcgtatggccaaatatgaggggggtaaatcccagccaccctttgaagtcctgattggaatttcacattattatcatgtgagtatcgatcttttgttaactgcagatattcgaaaaatagatattgacgggctgatgcagctcgaggataatcgtatccttttaccaataacggtagacagggaaggggagaataccatagagatcattccccataaggccagggccggttacctgaacggttacagcgacccggaattcattgaaggcctgcagcaggtctccctgccgttcctgaccaatggcaagttcagggcctttcccgtatcgggggattccatgccgccccacagggacgggtcctttattgtaggaaggtacatcgagaacctgggtgaagtacgggacggtaagacctatatcctgctgaccaaagaggacggtatcgtctacaaacgcctgaacaaaaatggcaggaacagcctgatgctggtatcggacaacagcttttaccagccttatactataaaagcttccgatatactggagatctgggaatatgcctgtagcattgccaccaaagaggcggaacccgagaatctcgacccgcagagtatccgtgagctgctctacggtatccgtgaagaagtaaaagcccttaagggagtaaagcactaaacaaagaagcaacactatagtataaaaaaatatactattacaggaacagcaacgatttactattaataaataacattaatttagctactgttaaccccaaccccatggaacccataatccgtttcagggtcagaaaggaacttgaccccactacagaaagaagtatacgtaagcttaagggaggccttattgctcaagcctttaccgatatcatttattttgatacggaagaacccgattattacgtgcattattttaccacaaccccaaacgacagggatcgtgcctgtgaatatataaccagctacagtctaagcaacagtctggaagaagtggtatacctgttgtaattcaggacaatagtattataggttgcgcatcgcttctgtaatatcctctttgatgagttcccaatagtagccccgtaatgatatgggttcaaaatccatatcggccagtgaaaattcagtaaaattgttccggagtaatgcttcgtcatggctgtagggatagcgctgcttatgcagggaaatcatctctttgatactgaaatgctccatcagctcgtgcaggtcccaaaaatccttcttacgcccgccacgctgaatgatatccattttcatggctatgatctcctgcgggccggccatacgtacaccctgctcttccagagccggtgttataaaagggtcggtataatagagatccagtttcacggtattatcccggtctgttccgataagataggattttcccatacccacgggaagtcccgtaccaaaacctttatccagatagggaaaggccgattccagaaaagtctcaatagtctcaaaatcaaccgtaccgtactccgcatcggtaaacaggtcaatatccaccgatacgcggtgtcccagttgcaggctcagggcagtaccacccaccagacgaaattcttttaacacatccgcttccataagtacctgtaaggactcacgaagtatctcatttaccgtattccaatacatcatcctgtcctgttccatttgatagggtgagtagctgttccatttacagccgtaactgctgacttatcccttagtacttccctggctttggcactgccgtaaaaacgcagtatttcctttttctcggagaggtttcccctttcaaatacgcgaaggataaccgccctgtattgcgcaggccagtcaatattatcaatgttggtatcccagaaaagactcttacgcagcaactgcatatcaggatggttaccggtagcagttttccttttctccttttcgatatcataataggtctgcaacagggccagtgtcccttcctcaagtccgagttcccggtcaattttgagtgcggccggcaagggcaggcttctttttcccttaatgatctgattaaaggattgtggggcaaggtcggccgatagggcaatagggcgctgtgccagatccctttttttaagttccctggccagaatgatacccggatggataccccgatatttctcaaagcgcttttccatattacaaatataagcaaaaatgcttatacttgcagtagtgttaattgttaaagtattggttgtcatgattataaaataagtttaacatctgttcactcttatttacggataatgagatgcctaagggcaggatcttccgagaggcgttgcatttctgaggaaataatctgctgtatgtcctgcctgacctgatcgtagttccgttgtaccgtactgctgtcaatccggcgtaccggagcaatttccctgtacgtttcctcttcccggcgtagggccttatgatcgttgatgatttccccatgaaacgcttttaatccgatcctgcattcgggatcatcggctaccattcctacaaattccccggagctgagtgccgcaatctttgaggcgggtatggcctgctccagctggcgagaacgactgacggaggtatcattacggttaacagacaggctttgcctgtcctgcaggatcttcccaaaacgttcggagagttgtttggcagtatccccggtaacctgcccggagataatattcccggtaatattcataatcacctcggcctgttcccgcccgtaatccttacgcaactgactgtaatcctgtatccccagacaggtggcgaccctgttgctgcgtgccgtagcgataagactgtccatattgttaagatagagggtaggaaactcatcgaaaatcaggctgcttttctgccttcccttctgattgacctgttttaccagtcgtgagacatatagggaaagtacagctccataggtttgtatcttctgcgggttattgcccatacagacaatcttcggctcgtccggattattgatatccagtgaaaaatcattacccgagagcacataatacagctggggggaagacagcctggccaaggctatcttagcggatgcaatctgtccctcgagctgttccatcacatcattaagataggcgttgacaaagggattgatcagcacctctatttccttttcgctgcgcaaaagcgtaaaaagactgtcatagtctacctgcatcagttccatcacatggggcagggtacagaattccccgtccctgtaacggcgcaggtaccatatcacggcggtaagaaagttgatgggtgattccacaaagaaatccccctgttttctgatccactccctgttgagccccataaggatggtacgtgccgattctgcggcatcggtaatatcggtcatggcggaaggttcgaggggattacaacggtgcgagcggctcaggtcatcaaaattgatggtataaaacccggccggaactggatacctatccttatttttaagccaggcattataggcgatacgggaaagatcgtcaaatttgaaatcataaacgaacatggtaaatcccttggcaatatgctgggtaatgacatgacgtatcacaaaataggatttacctgcaccgggtgttcccagtaccatcaggctacggaacggattaatgatattgatccagctctttctgaccttgtccctaaggcggtagcgggccggaaggtttatcgaatattcgttttccaagagccgttcctcctgcgggaaggtctcattaaggctgttaaatacatcaccgccctccagacgggcatggatgatacgggagagtttcattcccccggagagcaccagaagaaaccccgtaaaacttatcccggagtagagcagggtagtggtaacccgtcccaaaccggtatacagtatccaaaaactgaaaaaatacagcactataccaagggtaaaataacgtagtgccagcggacgattcatcttttcatccttacgtcccttagcccccaaaagggaaatcagtagtaagcccattgccatcagtttggccctgtgaaaggaatcaaaaagtcctgtatcggccaggttagccagtatacgatcagttatttcatgacataacccccagctggcatacaccctgtaacactcataataacaatgcagtaacaggagtatcagtcccatcagtcgggtcatatccagtatttttcgaaacgcctgttcgttctctcctgttcccatacctgtcactaactattaaacacactaataattcactctgacaaacgaaagtaggagtatgggcacaatcaggcaatcataggaaaacttcccctatgattgtacaaatcactaaaaataaagtccgggatgaacaacaaaaaaaactccagttctcactgaagtttttcatacgtttgggatgatgaaggatttggacttttaagttaaaatccggttcattgttatgttttctaatacttgtttttttgttgagctaagagctttacttgaatctatgcaaaatcattaatctgccctacatacaaaatttgattgtaaagaacgtcataaatcttattccaaggatacaattaataatgtaaaaatttaattttcttaaattcattttgtaaaataaaaaagtcccaccgaagcaggactaaagattttcatctacggcatatagccttattgtgataagattaaagattagaaattttaatcattccaaatttagatcttttttttaacttaacaaataatgatggtgttaaaaactctgtattttatttcttacttttattattttgattaaataaatattatggtaagaatattaggattggatttagggactaactctattggctgggcgatagtagataaagaaggaaccgatttttcccttgtggataaaggagtaagaatattttctgaaggagtaaagtctgaaaaaggaattgaaagttctaaagcagcagaacgaactgcttacaggagtgccagaaaaattaaattcagaagaaagctacgaaaatttgaaaccttaaaagtactttctaaaaatggtatgtgtcccctatcagttgaggaggtagaagcctggcgtaaatctaattttaaatcatatccattaaatccggagtttttaaaatggttgagtaccgatgataatcataatattaatccttatgcttttagagatagagctagtaaacaaaaagtttcgccttatgagttgggtagagcgttatatcatattgctcaacgaagaggttttttaagtaaccgtttagaccaatcagctgacggaattattgaacaacatgcaccaaatattgaaaatagaattgaagatgctcaaactactgccgatttattaattgagattaaagattattttgaagtattagatattcttgaaaaaaactctaaagatttagacgaaggagaaaagaaattaaaatcactatttaatgctcttgaaaagattattagatctaacgattttgaaaatgctaaaatagaattaattggcaggcttaacagaaaagaagataaaggagctgtaaagcaagaaatcggggatatttcgcaagcaataaaagatggaggttttactactttaggtcaatatttttgtagcttatataacaaaaataggattcgaaatcattatactgcgcgtgaagaacattatgtaaaggagtttgaaattatatgcagcatccaagggatacagggcatagatgaaaatgaaaaattaattgaaaaacgttactctggtttagtaaaagaattgtatagggcaatatttttccaacgccctttaaaatcgcaaaaagaactaataggtaaatgttctttagagaaaagtaaaacacgctgtgctatttcgcatcctgattttgaggaatacagaatgtggacttatataaacacgattaaaattaaaacacctgaagatgaggatttacgttttttaacttcggaagaaaagcaaaaattaattcctaaatttttaagaaaaaaagatcattttaattttgatgatttagcgaaggagctaatgttaaagggtgcttcctttgatttttataaatcaccatctgttaaatatgcaaattatctatttaattacaaagcaaaagatacagtttcaggctgtgttgtttcagcttcgctaaaaaatatttttggagaagattggaaggttagaagctgggcttatcaaactcagaataataaaggtgaaaaagtttcccgaaatgtagattacaaagatatttggcatttactttctgtttccacatcggatgtctatttagaagagtatgcgaaggataaacttggtttagatgaaaaacgtgctaagttgtttagtaaaataagactgaaaaaagatttttccagtttaagtttaaatgccattaataaaatacttccgtatttaaaacaaggcttgttgtattctcatgctgtttttatggctaatattgagaatattgtagatgaaaatatttggagtaatcctacagaacgtatgtttattcaaaatgaaattgcgaagcttattgatactaatactttcgaaaatagtaaactggtagttgtaaatgaattgattaaaggttgtaaagttagcaactgttattattctaaggaagctgaatcgatttacagggaagatttaaaaaagaaagtaatttcaacttttaaaaatagtgatagccaggaatcaattgtaaacgaactattccccatttttattgagcaactaaagaaatacgaatacatcgaaattaaacgtttagacgagaaagtaattgagtttttaaagggtaaaaataaagatggagaaatctattgcagtaatcaaaacaggttaaaaaagctttatcatccctcagatatagaggtttttaaaaagaagattattaaggatgaatttaacaacgaaatcattgtattaggtagtccgttgatttcatcaattaaaaaccctatggcaatgcgtgccttgcatcaattgcgaaaagttttaaatgccttaataatagaaggattagtcgatacaaaaactaaaatccatattgaattagctcgtgaattgaatgatgctaataagcgtaaagctatccaggattttcagaatgagaacaaaacgaaaagagatgatttcagaaaggaaattaaagacctgtattttgcggaatgtaaaaaggaaattgaaccaaccgaagatgatttattacggtatcaattatggattgaacaggataaaaaagaaatttatgaagaaggaagaaacatcagtatttgtgacattattggcgaaaaccctaaatacgatattgaacatacgataccaagaagtatttcacaggacaattcattgatgaataaaaccctttgtagccagcgatttaacagggatgtaaagaaaaacaaaatgcctgttgagctatctaaccacgaagatgttttattacgaattgatcattggcgtaaagaagcggaaaaattaacatgggaaatagagcaaatcgtaaaatcaaccaaagccgcaactactaaagaagccaaagataaaaaaatacgaagaagacattacctaacattaaaacgggactatttgaaaggaaagtatgagcgatttatttggactgaaccaaaggtaggttttaaaaacagtcaaattccggatacgggaattataacgaaatattcccgtgcatatttgaactcttattttactagggtagaaagtgtaaaaggtggtatggtcgctgaatttagaaaaatttggggattacagccgtcttacattaaagacaataaaaaatattatgaatctaaagaccgaagtaaacatacacatcatgctatagatgcaattaccattgcctgtatgaccaaagacaaatatgatgtgttggcgagtgcctggagtttagaagatgacacggaaaaagaaaattacaaagctgtaaaggagttgttagaaaaatccaaaccctggaaaacttttactgaagatttaaaaaagttggaagaagaaatactagtatcacatcatataccaaatgttgttaaaaagcagtctaagaaaataattagagttaaaggaaaaaaacaatacgtagccgaaactgagaaagattttaaaggaaaaactattctaaaaaaagacgttaatggtaatataatttacaaggttgataaacaagataatcgtattccaagatttcagcgaggcgatactgttcgcggatctctacatcaggatagtatttatggagcaattaaaaaccctctgaatcaagaagaaattaagtatgttattcgtaaagacttagaaagtatcaaagcatctgatgttgaaaatatagttgatgaagtaataaaagaaaaagttaaagaagcaataagaaataaggttctacttatttcatctaatgcccaacaaaaaaataaaatagctgagaaccaaaaagtttggatgaatcaagaaaaaggaatagctattaacaaagtgcgactatatgctaattcggttaaaaatccactagaaatcaaagaacatagtctattatcaatatcaaaacatagacataagcaaaagatttatgcccaaaatgatgagaattttgcaatagcaatttatgagaatattgataaaaaaggtaaaacaaaaaggtcttatgaaatgatcaataatattgatgccggctcatattttaaattaagtaatgataataaaaacacttatgatattgtcacgaatccacatgacaaaaccggattacctctaaaatatattctgaaaaaaggtatgatggttttgttttataaagatagtcctcaagaaattttagaacttcctactgaagatttgtgcaatcgactgtataagttgtcaaaatttgatgcacaaggtagactaacttttagaactcattttgaagcgaggcaagctagcgacttaaaagaaatctataacattgattttgaaaatccatttgagcaaattagattacaagttagtaaattaaatatgttagttgaaggatatgagtttacattgaccccttttggaaaaataaattttctttaattagatgtttttgatgtacaacttttcatctagacatctaactggaatgcggttttgctaagcagaaatcttataaagattagaaagcacgatattcaagcggcaaaacaactgaccaacctagtagttgtggtttgattaaagattagaaagcacgatatttatttcattagccggcgccattgtatctagttgtggtttgattaaagattagaaagcacgatattaaaatgtaaatgcaacgcagtttgcacagggttgtggtttgattaaagattagaaagcacgatattgaaccaaatgaatttcacaaatacgcaaaagttgtggtttgattaaagattagaaagcacgatatttacctatgccatcaatgttaagaagtaccagttgtggtttgattaaagattagaaagcacgatattgtcgcaatcagaacctgtaatactagaagtgttgtggtttgattaaagattagaaagcacgatattctttcaaaaactatggctgtatgatacagggttgtggtttgattaaagattagaaagcacgatattctgaccttacaactccagcaggtctataaggttgtggtttgattaaagattagaaagcacgatattttatgtgatacgcatcacaatagtaaatcggttgtggtttgattaaagattagaaagcacgatatttttctttcggtgtgaggcagtataatactggttgtggtttgattaaagattagaaagcacgatattaaaaaggccttatctaaaaactggtatgtggttgtggtttgattaaagattagaaagcacgatattaaatttcatttgattttgtacctcagatatgttgtggtttgattaaagattagaaagcatgatattatagccttgcttcgatgtcggacttcccagttgtggtttgattaaagattagaaagcacgatattttgattacattgctgataattcatgcccatgttgtggtttgattaaagattagaaagcacgatattaatttaccgcatggcataaaaggatatggggttgtggtttgattaaagattagaaagcacgatatttccaaatagtttttctgttgccggcccttagttgtggtttgattaaagattagaaagcacgatatttcatagtctccacaaaaatcatttgcaggagttgtggtttgattaaagattagaaagcacgatatttgacgccatagtccttgttgttgaaggagagttgtggtttgattaaagattagaaagcacgatattccttgtagctttgtcgcttgccgacaatatgttgtggtttgattaaagattagaaagcacgatattccaacaggtatagctgcaaacaatattcagttgtggtttgattaaagattagaaagcacgatattctgctgtaactgcaggttttgccccaggttgttgtggtttgattaaagattagaaagcacgatattttcttcacgcagcaagggcaaacgatgcagttgtggtttgattaaagattagaaagcacgatattagtcgccttgttgtctgttgatatacaataatatacaatgctatttcgtgataaaaaatgttccttttttggtagattaacccaagattggagcattttttgttttctaaatatattatattatagcggttgttagcattgctaagcataagagttgattaaaaaagttccaattgtgttggttggggttctttaggcacttctgacttaccccaaaaattcaggatattcccgaactgtttatctgttattcgtagtacacttacttttcccaatggaggtaatagtttgtgaattcttttttcgtgtacatcagcactttcactactggcacagtgacgcacatagacggagtattgcatcatagaaaaaccatcttttaaaaggctatttctgaatccggatgcattttttcggtcttttttagtgtctgttggtaaatcaaaaaatacaaataaccacataattctgtatccatttagttccataatttaggatattttatttttttcctgtccccagtatagcattgctgtaaagagctagcagttttttgtaatgccaccatcaatggacttttttcttctttaaaataaactgtacgagtaaggatttgtaagatctctgctttaatagatgtatttagttcctgttcttcaaagttttgcataagctgatatattttttcatcaactataggtcgaaagggttccattatatcgtcagccaaagcaaaagcattgtatttgcttttatggtgaatacccagtgtattcaataaaccactacctgataatgctctagctgtagcagctcttaggattgcataaccataatttaaaaaattatttggatagtctccaaaccgttcccgtttaaactttatttcaaaaaaagatttccaatattgatttgccgcaacgccctccatattactagtgtcaccacttagaacttttgaggctagaaatggaaatgaatttttagcaccagtaattctttctaataaaattccttgattatttattttttccacaattgtttgttgccataattgctttttaagtggtatacttgcgtcaatttgatttttgaaaatttcttgttgaatatggtgactattgagatttagaaacatgccatttggcaaatgattgttagcgcaaatgatgaccgaagtattattttctatcaataagttcatcgcaggaatacttaaaaaggtttcagtattgtcaatgacaagaaaaccaatatcctcaataggaacagtactttctctaatttctgattttaaaactagctgtaaattctttgtagtaataatcgttttgttctcaactaatagcgttctttttatcataagcgaattaatttaatataaaggtattttaagtttatttaataaaaataaacattatatctattcaatgtattgattattagtgtgataaatataatctatagatgtatttatgtttataactgagcgagattcccttttcattatcttctctttaaatgtttctttttcctcttgaactctttcgatacataatcaaaattatcctccactttcatcaacacacccaaaaaaccagttagttcctttaatccaatagatgtgatatgctctcgtagaatgtcacctaattctttttgtgagtaatcaatttctcttacaatattttcctgattcaatatgcacctatcctgtaaccccttagtgctatactctttcccaatactactcccattaaagacactttttgtcttgtggtcaataaatgttatcccatatattaaaccttcagtattctgacgcaggactgtatcaactccttccttttgtaaatgttttacaagctgaggaaggataataatattgccatttagaaatgctgagttaatcaaagttttgattcgggacttgttcgggtgtctcttaatctcattaactgaaaatttcgtctccaagttcttcagtgtcggcctgtcgtgaaacctgctggcctttatgggaacacccacacgatttcctttttcatcgagtgtatggtataataatccgttatgtttcgcaacccttgaattttctgttcctttatccgcttcaatattgtaaagtttcagcacagcattcagttccggcaggctggtgtacttgtagttgttcactacaaaattcagaacgttctcaattgcttttttggtttcaactttaccatactggactcttgccgaaactggttccggtttgtattcctttttcttttgattctccgcttttacaagattgaaagcctgctcaatctccttacgtgccggttccgatttgtccttgccaatattgtgcatggcaatccgctttccatcttcctgtacattgatagaaattatatgaatatgcggatgccctgcatcatgatgttggtagattaggtagggctgctttccaaagccaattttatccatatacctctctgctatatccaatagtttttcttttggcaggcttacttcactcgggtcgaaattcagggagatatgtatagtattgcgcttcacattttcattcagcttgcactgcttttcaaggcggttaagtttcatcgcataagttagcctgtcgccatccacaggataattccactgtccaatacattcagctttgccttccttgattttgttctcattgtagttcagcatcgccctgatggaatggccagtcttcattattgcaaccatttttcagccagtttttggagttgctctttaacctcttcaatcttggaaaacaaagttttcctctggttctcaaaaagtaaaagcaatccctttatttcggcggcttgtgaagtcgcatttactcttcttaccagctggttaaagttactgccgatagcattcagctctcggttcagatagctcatttgtacaatcgcttcatcggttgaagtatctcttgtgattgtagtaatcggtttgctgaaaaggcaatgccttacatactcgcttacactgcggcaggtagtgttcttccagcggctttcaagtgtggtaaattccttttcggtaaggcgcacataaatacgcctcttacggttgttgttttcagtctccataatatcatcttcattggttcaacagttttaagacataatataatcccccgcccccgagttccgaggaatgggcggcaagatgccgttgtccgacaacgggacatcttgccattgccgcagacaaggcaatcgaatattatatttctgtaataggtttttattcatcttcaatgtgttatacagattataataagattacaatgtcaatcggaggtgtaggaggagaagaacttcccgactacttttccgttactaccgttactaaatcctgatgctgagcagaaggttttggaaccgtaaattttagacaggtttgatggtgttttgttgtgatctgctaagataatccctcttatagcccaattcctatcctaggtaaatattgattaagctaaatagctaaaagagatttagttttgtcatgactataagtaataattaaaactgattgcgtatgctgacaacaaatgaagtagcccaggtgtttgaaactattttaagcagcccggggatgaatgatgcggtacgtattgatatgcgtatttcgagaaaaaatgtcttgttgctgacccatgttatcgaacagcggctgataagtaaaggtgagacaaaagatgtattgctggcttcggtttctaatgataccagagacgaactgaaaggtattctggtcgattttttggagaaagccggacttgtggaactaagcgaaaaacttcagcaattttcacaattgccccaaaagcaatgataataagtcaaggatgcctataatggcatcctttttttgtacaattgttttccacatgtaaaagctcgtttttataatctgttgtaagtgggtaagactgtaatttggttgctataaaaaacacctgccttatgcgctttacagatctacttagtaaatatattttctctgtcatcagttatttttatattcttttatttagttacgcagcagttagtaagcttttggactttgagaatttccggatacaactgggacagtcaccacttgttagtgctcacgccggagtgctttcatttgcagtgccaattgccgagttgctgattgcaggaggtctaatttttaagcatacacgtttcatatcctttttgatgggctacctgctcatggtgatgttcagttcttatatctatttcatattacattacagttctttcgtaccctgttcctgcggaggcattcttgagaaaatggggtggcaggaacatctggctttcaatattattgttacgctgttaggaggtattgccatagttacagaaagatacagaagagtatcaggtttaaaaaatgtgaaatggggaatcttactattggttttaattgttctgactgcttttggaatattatcggtaggaatattgttcagaagttcagaatcactgattcacaagcgaaatccttttgtgcgccaattcataccttttagtgcccatgagcaaaaccgtgctacacttgactttaattcctattatctggcaggggcagacagtctgacagtatacctgggaaactatacagcaccccgctacgtaacggcattagacacttcgctgattataagtacctcctttctaatagatataccgaaggagatatcctttcaccgatctgcaaaactctctgttgttcctccacaattctttctcatagacgggcatgagccaatagttttacgagggcgtactgcgaaatggaaaatagtggaaaagtacagtcccgatgtattcttttcgaagagtgctgttttggattccgtacacctgatgatcagaacaagaaatgaagcaaatggtgaaagcgtattggctaaattgtccctggaagataatgctgttacctattatcctcatatactggagcgacagctggatggtgtgtttgatactgacggggatcttttatatcaatctgactcaggcacccttttttacctttacagataccgtaatcaatttataacaactacttccgaagtcacgaccaacaggcatcatacgatagataccaataccagagccaaactcacgtttgctacactggaagaaaaggggcagaaaaagtttgccgtccctccgctaattgtcaataaatctgttgccctttataaaaatcttgtttttgtgctttccatgcagcgaggtcgttttcaatcacttaaaatgtggcgcgcgaccagcactatcgatgtttatgaccgtgatacaggggtatactattccagtttctacttatatcatatcgatcatacgtccattcgggactttatggttagggaagacaggctttatgctattgcaggatccgcacttgtgtcctataaactggaagaggctatcactaaacattatcattgactacttaaaatactacagtgctgtatcagggaaagccgaaaacctgaaatagagtaggccttaacttataaattttaatattatgaaaaaatttgtaatgcctctggctacctttgcgttagcaatcggaggtgcttttctgaccacatcaatgggtaaagctcctgaaaatattagtgttgttcagggatacatccatacgggtaatccattgcagccgtgtgagctttccattgaatgtgagaccacatcaggagacttctgtactgtaggtgcagataatacccgagtgtggggaatggatgggaatcaatgtcctgtagagctctttaaaattcagtaacgtcactgtcttatgtattggaagcgcagcctcatctcggggttgcgctatttttgaggtacctatcaaaccactccagtattctcaaggtcaggtcttttcggttttcatgtttaaagagcgcatgaccttcccccgggtagaggaggagtgtatggggtttccccaaccttcgcaaagccaaataaaattctacactttgctgccaatgcacctgataatcgttatctccagaccaggataagagaggtgtggtaagtgcctgagctgagaatacaggagaattagcaatgtaccccgtgatgttctgaaagagtccttgatccattctcatctggtgatgttcataacgccagtagtccggcactttataattgcctatggttagatatcctcttataaaatcattaatggccgaaccggaaactgctgccgcaaagcgattggagtgtgttatgatataattggtttcataccccccaaaggaatgaccgatcagacctatagagctcgtgtcgactttggcagtagttattgccttatctattgcggccatcacacattccaatgccgaaggtccaggagtaccgagggtataactaatatcaggaagcagaaccaaatatccgcttgtggtcagcatggttatattaaatccacaggcatccaaaagggaagggtttacatactgccgaaaccgatgagactgtttttcataaatatgtactaccataggatattttcggtcagggttatacccggccggataatataaggctcccgataatcgctgattcccaactgtgtattcaatacgttcggaatgaccccaaaggtactcgtgatgttgcctgttagtctgtatcagaggcacaggtttcttttcctgtcgtttcagcatgatttcaggaggataattatagtcttcccgctgaaaggcgatggtcttcccgttttgtgataccagaaagtcatgatagtgaaatgacccactagtgagtttcctgtattttcctttatggatttcaccgaagccggattcgtttccagtagatgtgctgattgctacatagaaggaaaggtcattacttatttctcctgttgttattccatctgcattgcctttttttccggtgacggtagccgatttaatgattgtataatgtacattattactcgggggagtaagcctttctagggatttgccgtgcaggtctgctaaccagataccatcagaagtcgtcagtactatcttatcatcgttgattactttatagggactgtcataaggaaaggcttcttcctgcatatcattgttagccgctgtctgtaatcttcccttagtgatattataatgtttgctgttaacgggatcataactccaccagtccccatcactgaaataaagaaaataagatgttttaggcattgccatcaacttcagggatgaacctgaatgttttttcagtaacagctctttttttcctgatgccaggttcatgataaaataatctgccggaggctgtaagcgggtctgcggttcataggtttttgcgttgaacagtattgcaaaatgaccgtcgccgctacaaaaatattcaggcagtatggaatcggtcagttgaagaactttatcggaatttggataccatatacataccctttccggcgatttgcgataagtatcactgttttccttaggatagacccatttatcggaagttttccatacctgtaccgatggctgcgaagcttttttttcctttagttcaggcctttgtaccttaaaggctatcgctttatcatcagtgattgaaaccggtccgtaagcgagttgatatccttgtggaaacccgaaatatgattctggtttcagggtatgtcttttgtccgattttatactgtagcaacagagggtatgattagaggagccttcgtcttttttcatataaacaaaggtttccgactggtcatcccagctcatgggaaggagctcatcgctgacattttcttcattaaggacaatactgtaattatcaagtcttatgattgcaagagtgtttttatgttgttccttagccgttacagcaatatattcaccggaaggggcggttagcattcccgtcactttcttttggtatcttacagtattattactatcgataaccaaaagctccttttctccgggagaaatactctgtattattatcaaattcccctcagcggtgaaaccatgctgtattatattctcataggtatatttcgcttcacttttcaggttgatttttgttagaatcctgttacggttcagtgccgtgaaagttgaattatctgaaaattctcctgtaacggcacccggaagagagaacttttttccgtctctgacggattgtacaaaaagtgtatcttctcccgtttcgtaaaatagggtataggccatccattttccatcactggagagagctgtaagggaaggtttactccacctggcgtatgcttccctggtaagtatttttctttgcggtagcacctgccctgaaagggagcaggtaacaagcaacaggacagatttcaataaaccctttcttagtatgtttctt

SEQ ID NO: 3123 - DNA, 22655 bp, synthetic construct
  source 1..22655: mol_type = other DNA
  misc_feature 1..22655: note = Synthetic
cgttcttacctcattactgtacaaaaaacatcctgccgaagttaaatttgtcctggtcgatcctaaaaaagtggagctaacactttttaataaaattgaaagacattatttagccaaactcccggatactgaagatgcaattcttacggacaacgccaaagtggtcaataccttgaactccctgtgcgtggaaatggacaatcgttattcgctgttgaaagatgcgatggtgcgaaacattaaagaatacaatgataaatttaaggcccgaaaactaaatcctgaaaatggtcatcgctttttgccatacatcatattagtagtggatgaatttgccgatttaataatgactgccggaaaagaagtagaagttcccattgcccgtttggctcaattggccagagcgataggaatccatttaattatagcaacacaaagaccttctgtaaatgttattactggtttgatcaaagccaactttcctgcaaggatcgcttttagagtaacatcaaaaattgattccagaactattttagacacttccggagcagatcaattgattggacgcggagatatgctttatacaaatggtaatgatgtggtgcgcatccaatgtgcttttatagacacccctgaggtagagaaaataaccgatttcattggttcacaaaaggcatacgccactgcttacttacttccggaattcgttggagaagatagtggcataaatcttgatgtagacatctctgaaagagatactttgtttagagaagcggccgaaattattgtcaacgcacagcaaggctcggcatcattgttacaaagaaaactaaaactaggctacaacagagctggtcgactaatcgaccaattagaagctgctggtattgtaggaccgtttgagggaagtaaagcacgtggtgtacacatcctggacatgagttctcttgatcaattttttaacaatgaacaaaacaattaatactatgaaaaaatttactctaattacatttattcttctttttagcttttcgatacaagcacaagataaaaaggcaaaagcccttttagatcaggtaacagcaaaagtgagaagttatgagaatattgtaattgatttcaaatattccttgaataatgcaaaagaaaatattaatcaggacagtaaagggaacgtaacgatgaaaaataatcaatatgttcttaattttatgggaattaccaaaatttttgacggtaagaaaacctacactattgttccagaagatgaagaaatttcaatttcaagctttaacgaaaaagacgacagtgcaattacaccttcaaaaatgttaactttcttcaatagtggttataaatactctacgaatatcctgcaagatgtaagaggtcgaaaaatacaatacatcaaactaatccccactaattcgaaagatcaaagaaaagaaatactattaggtattgatgtacaaaccaaacacatctataatttgatagaaatgggtaaaaacggaacaaaaactactttaaccgttaattcttttaaaaccaatcaacctttgtcgaaaaatcaatttatctttgccgaaagtaaatatccaaattactacatcaataaattagattaattcttaggtgaaaattcttgacaaatacttattaaaaacattcctgattacatttactacggtatttgtaatcttgttttttatattcatactgcaaaccgtctggctgttcattgctgaactagccggtaaagatttggatgttgctttgatcattaagtttttgttattttcgatgcctcgaataattccacttgtattaccgctttccatattgctagcttcgataatgacctttgggaatttagcggagaactatgagtttgcagctatgaaatctgctggtatttcattacaaagagcaatgcgtagtctcacggcttttattctcctgctaagcatcgtagcctttttttttgccaacaatgtaattccgtacgcagaatataaattcatcaatttcagaaaaaacattgcccaagtaaaacctgccatggccatagccgaaggacagtttagcgacgtgggtaattataatatcaaagtcaataaaaaatccggaaagaacggaaatattttgaccgggattaccatccataagaaatccagtataggagacgggagcaaaacagtaatcaaagcaaaagacggagaattagtcagcagcgagcaatccagcatccttcaattagttctaaatgatggttactattatgaagatctcgtaccgaaaaaatacgaagatcggataaagatgcctttcgcaaaaagttactacaagaaatataccctcaatatcgatttatcacaattgaataaagtaaatgtcgacgacaagaatattgccaacaccaatacgatgttgacgataagcgagttaagctacactttagattcgctgcataaaaatttgaaaaccgaaatcgtatcgtattcggaaaacatcaatttgcgaaccggaatcaccaacaacaatattcttcctaaaacagccgtagaaaaaaagaaaacaattcccgctgacattttatcagtatatacaaataaacaaaaattagagatcttaaaaatagcgaacagtaacaccgtaagtaccggatactcgattgacgcaactaaagtcaatttagagaacaagcagaaaaacatcaacaaccaccaacttgcctttttcgataagtttgtaatcgcatatgcctgttttatgatgttttttataggagctcctttgggcgccatcattagaaaagggggacttggactgcctattatatttgctgttttaatttttatttcttttcactttataaacactttcgggaagaaaatagcgcaagaaaacggcatgtctccttttatgggagcctggatgtcttcctttattctcaccccattagctatactgttaacctatcgcgcaacaaacgacataggattaataaacatggatgttattttaagtccgttccaaaaactatttcaaaaattatttccatctaaaaaataaatacctatcatggtcacaaataaaatacaacttaacacaatcgaggaagcaatcgaagacatccgtcaaggaaaaataatcatagttgttgatgatgaagatcgagaaaacgaaggtgattttttggcagcagccgaaaaagtaactccagaaatgatcaacttcatggcaactcatggacgcggattaatttgtgccccattaactgaaagccgttgtaaagaattaggattgcacgtaatggtcactaacaataccgatcctatggaaactgctttcacggtttccgtagatctaagaggtggcggagtaaccacaggaatatccgctgctgacagagctaaaaccgttttatcttttgccaatgctgacactaaaccacatgatttagccaggccgggacatatcttccctttgattgccaaacaaggaggtgtcctcagaagaacaggtcatacggaagcagcgattgatttcgcccgattggcaggtttcaagtcggcaggagtgattgtagaaatcatgaatgaagatggtagcatggcacgtttgcctcaattggccaaggtggctaaaaaattcaatttgaaattggtttctattgaagatcttgtagcctacagaatgcaacacgacagtctgattataaaaaaagaagattatgacattgagacgcgctacggtacttttagacttagagcgtaccaacaaacgacaaacaaacaaatacatattgccttaacgaaaggaacatggaatatcggcgaaccggttatgaccagaatcaattccactttggtaaacaatgatattttaggaacactaacaaatgatgccgataagaaactggacaacatgttccagctgatcaataaagaaaacaaaggcgctattctttttatcaaccaagaagtgcagtctgttgacttattgaatcgcatagtagaattgaaagagctgcagacaaaaggtgtttttaaggcgccacaggtcaaaatggacaacaaagattttggtatcggcgcacagatactgcatgatatcgatatctcaaaaataaggttagtctcaaatgctgaacaaacaaaacgggttgggatgataggatacggcttggaaatcacagaatatgtaaactattagcccttttttaattcttttttaaaaatatattttccctaaaggcaagaaaatgaaacatttaaaaaacagtctaaaaaatagcttaaatttttatccaaattgtttttgtaaaccgaaaaaggtgcttatatttgcactcgcaatcaacaaatgattgtcgctcactggagaaatggcagagcggtcgaatgcggcagtcttgaaaactgttgactgttacaggtccgggggttcgaatccctctttctccgcggaattaaaaccctaacaactgttaatcagtgagttagggttttttatttacaatatatccccacataatccccacaatttaattgttttagaataaggagaaacaagacatgattacctcaacactattttatatttttcttacatgctatttatgattgaataaattgtagattgacttcgaagtatttttagtcaacagtcaatcatctaaattaaaaagatctaataaaagtattatttatgccttctagatcttagataagaagtaaatattatttacagttaattgttataatatcttttagattcgttgaatagcaaggtgaaagactttcttgtttcatcttccattttctttttaagtcttgactagcaaacttaaccttatcccctatcttcatatttagtttatccattacattcatcaatactttatgcttaggattttcatactcaaacatagataattgctgggtttgatctttgctaattcccataagaatcacacctgcctttttataactatagccttctttatatatagattgtaatgctgcttgagcatacttatttaactcaaatgtagatgatgtaggaaatggtaatttaaccgttttatagccactgtactgaggcaaatcctgtctgaatctgttggtataaataaagacttgaatcaattcacaattacttttttgttttcttaatttaactgcagctaatgatgcaaaagaagaaacacgttcacgcaattcattcttcgttttcatcattatgtcaaaacttcgtgttgttgcgatgttttgtttgggtttgatatcttcgaaattaattgttggctcaccctctaaatcctttttaagccttaaccctactactgtaaaatactttttaacgtacgtatcacttaattgagtaaattggtatgcatttgtaacaccaattgattgtaatctttttgaaaactgcctacctatgccccaaacatcttctattttagtccatttaagcgctttaattctcttttcttcagaatctataatataataattttttgtgcgttcagggtactttttagcaatcttattagccacctttgctagtgcttttgttggtgcgaaacctacactgacaggaatcccaactccttttttcacaattcgatgcatctccaaacctattgcatctaagtttgcatacttatgaccatgaaacttaaggaaagcctcatctattgagtaaatctctacatcaggagaaaatgtgcttaaaagcatcattactctattagataagtcaccatataaagtataattagaagaacatactacaatgccatgttgcttaaccatatcttttatttggaaaataggaacacccatttttacacccaatgctttactttcattagaacgcgcaacaacgcaaccatcattgttacttaaaacaacaataggcttgtttctaaggctaggcttaaacactcgttcacagctagcataaaaattgttacagtcaattagagcatacatgttatctccttttacgatggtattttaaggtatttattacgattccccatatttgaaaggattcattttctgtaatctgaatgggtttgtaattatcattttccggcattaaccaaacgcaatccttttctactctcagtcgtttcaaggtaaattcatcataaattagacaaactgctatatctccatcctctttctccgcagaattaaaacactaatacttgctaatcagtgcgttagtattttttatttgcaatatatccccacattatccccacaatccaactaaatagaatcaaattcatattaaaagagtaaaacccaagttcaaataataagtacgtctcgaatattattacccctgctcccttctatttaaataattaacccttaaatactttttctagttacatcatcagttgcaattctgcaaagaccgcaatgtttgcagaattgcaaagtatatccgttggaacacagaatttaaatgtatttttaaaaagaaaaaaaaagaaagcactgcaaattgaggaaagaatgaagggaaatggagaaaagaatgactgactggaagtgaataatgaactctaaatttgcttgatttttttatcttacaattaaatactcttcgttagaataacaaccccaaacaccgaagtaaaaaatggaatttttatgaaattttgtatgaggagcgatgtggcgttattgcggcaaatgaacagcagcctcaggatgggaaaagaacggagtttacggagtttacggagtttacgaagtgatatggaatactgatagtgttgcacgttaagaaaaacaaaagacagcatagcgttccttgatttaatgcaaagtgataacggagtaaacccaactgctggtcataggagcaaccgctgaattaacaaggagcgacagacatagcactgctcaattgaatgtaccggagtttacggagtgaaatgagatgaagctgtgttctggatgtagtagctcctacgaacgcaggaagagaacgtgtggagatgatgaacgaacaacttaaaataacaactgcttattttcaagctgttgttattttagtgctgtgaagtgtctgtggaatgaaaggaaggaagaatgactgactggaacagcatcatttaacaaagtgaacgaccaaagtgagaacgcttgattgcctttatttcattggtatattgctgctacaaccaatataattagttaacagcataattccacaggcaatagctcctacaataaaattataaaatacattttctgttgtagacttactttttaatgcctcattatcaaacataagtctcccaatgtaaccaaataataagcaaaaaagagggagcgttattaaactaaattcaaatttttcaaaaccactcatagtattagttaaaattacgtttttaaaaaggaatattgctcccaatatgagcaaacccaataaaaggtttaatcacaattcgttccttaagaaatgagtttttatttttaaaattgaaacactcaattaaattgattatttcactttaaatgatctcaaatgacttacagttatctaaagttataaagcaagatgggttaattatacagttttaatcgatagaattaatccttaatacaacgaacagaaaaatcaccccagttatatatcgatacttctccaaaccatttatagccataatacaaggatcgaacgtaagcattgttaaaattttcagtagaactccacgataaacttacctccaagaaggattccactcttctcttgcattgtgatttattctaaccacatttgttccgtctgaattcattgtataaattgaacttccaccgtccttgtccttacttgatatgaatactactttagcaccatcaggagaccaagaggcgcggcctgtgtacgtagggttagtaccgtttgtgaaattggtgattttgatttcatttgacccatcagagttcatagtgtatacgtgggcgatatcgtttacttctgactcaaatagaacttttataccatttggagaaaattttggattactttctcctcttacgttatgatttattctaaccaaatttgttccatctgattttatcgtataaattgcacttccgccatcgttatccttacttgatatgaaaattattttagttccgtctggcgaccaggaagcttcacctgtccaaagtggattagtaccatttgtgaaattagtaagtttgatttcatttgtcccatcagtattcatagtgtacaaatgagcgatatcgttgacttctgatgaaaatagaattttagtactgttgggagaaaatttgggattgctttctcctcttgtactatgatttattctaaccacatttgttccgtctgaattcatcgtataaattgaacttccaccatccttgtctttagttgatatgaaaattatttttgttccgtcaggagaccaagaagcgttgcctgtgtacgtcgggttaataccgtttgtgaaattggtgattttgatttcatttgacccatcagagttcatagtgtataggtgggcgatatcgtttacttctgattcaaatagaattttattactgttagctgatgatgtagataaggtaacactaaattcattagaatacgccactgcattacctactgcattataagatattattctgtacgtgtacgttgaattagacgccaaactattatccttgtagttataaacattagtacctacggaaccaatttcagtgaaattaccagaacctgtttttctttcaattttaaatcctgtttcatctgaagaattatctgtccaatttaatgaaacctgagtgctgctggttaagttacctgttaatcctgtgggagctgtaggaacttttgcagatgaggatgaacagaagaaatcataagtaagattagtcaacgaataattttcctggtaaagaagttgaccattataaaattgaattacagtcatttgagagccagtagaattaatgctgaatttaaatgattctttatcgtttacaccaccatcaatatctaaccataattcagtagtagtgtttttgacaattgtaacaatataactgtttccattagaggaatttgatcctttactaattttagaacagatcatctgattgttatttgcagtttcaataactacagtgtgaaggaaaacatcttcatctttaaacccccaatagtcatttcctgtaggatcagaattttgatttttccaaaaagtattttgatatttttccaaaaaggtttgagaatccccgacaggttcagtattagtactacaacctagaaacaaaacaaaaactaacactaaaattaagatatttttcataacatttaaagttgtaaactaattagtgatttttttaaagaattgacttacagttatataaagttaatacagtaggatgaattaataatgcgtctttattcatttaggaaaacaacttattaacaatcagattagtatgggaggctatcggaggtgaaaataacatctgggggttattgctgggagtggtctaccctacctttcacacagaaaaataaagaaattataacccagcaggttatatttttgatagaataacctgtttcatgataagagctttgggagataaaaaagactagttaatgccatatattatttttggatccaacattttgatttcctatagaaaggaagaaattatgggtggtgggtatacaaatcagattcatcacaaatttttaaataaaatttgaagataaaaaaagtcccaccgaagcaggactaaagattttcatctacggcatatagccttattgtgataagattaaagattagaagttttaatcaattacaaatctaattataaaataattagtgtgcaatgtggaaaaccgtaatgttgctaattactttagctgtatttttgaaaattcctacaaaaaaaggattgatatggcaaaaatattaggcttagatttaggaacaaattcgattggctgggcgattgtagataaagatggcagtgatttttcattagtagatcaaggggttaggatatttccagaaggagtcaaaactgaaaaaggaattgaaagttcaaaagctgccgaacgaactgcctatagaaatgccagaaaaattaagtttcgaagaaaattaaggaagtatgagacacttagagtactttctgaaaataatatgtgccctttatctgtggaagaaattatagagtggagaaaatcaggctttaaaaaatacccattaaatccagaattcattagttggttgcggactgatgatgataaaaacattaacccttattattttagagataaatcaagtaaacaaaaagcaaccttattagaacttggaagagccttttatcatattgcacaacgcagaggctttttaagtaaccgattagatcaatcgttagaaggtattatcgaacagcatagatctggtttagaagatattattgataatgcttcgtcttttactgaacttcaaattgaattaacagattattttcaagatcgtgatttaattgagcgtaaagcatctaatttggatgaaggtgaaaaaaagttaaaaacaacctataattcatttcttaaaattattactgacaacatcaaagattttgacaaaaccaagtctttacttattgaacgtttaaataagaaagaggacttaggagttgtaaaacaaaaaattggcgaaatttcattggcaatgcaatctggtaattttacaactttaggacaatatttctttagcttatataataaaggtaaaattagaaatcaatatacagcacgagaggagcattatctttctgaatttgaaatcatttgtttggcgcaaggaattgaaggtattatagcctctgaaaaacttcccgagaaaaaatattttggactagctaaagaactttatagagcaatcttttttcaaaggccactaaagtctcaaaaagcctccatcggtaaatgtacttttgaaaaaaacaagtctcgatgtgctgtttcacatcccgattttgaggaatatcgaatgctgcaatatatcaatacaataaagataaaaactccaaatgatgagcgtttacgctttctttctaatgcggaaagattaaaaatcatgcctaagtttttacgaaaaaaagataactttaattttgaagaattagtaaaagaattagtccctagcgaaagtaaatacgccttttataaatcatcatctgccccaacggctaattacttatttaatttcaatttaaattcctctgttagtggctgtgtagtttctgcctctttcaaaaatgttttgggcgaagattggaaaactaaagagtatagctatcaaactattaataaaaaagcagaaattgtaacaagaaatgttgactataatgatttgtggcatttgatttcagtttctacatctgctttgtacttgcaagaatttgctaaagacaaattgaaattagacgacaaaagagcaatttcgttcagtaaaataaaattaaagaaagactttgccagtttgagtttaaaagcaatcaataagatcaatccttttttaagagaaggtttattgtattctcatgctgtttttatggcaaatattgagaatattgtagatgtcgatatttggaacgatcctaatgacaggaaatatattcaaattaaaattgccgaattaattgccacaaattcctttgacaataatttattagatatcataaatgatcttattaaggaatgtaaaactgaaggatgttattattcaaaagaagcggaagctacttataaatcagatttagataaaaagctaagttcctttttaagatcaaataaaattgaagaccaaaaggaagctattacaaatgagctactcccactttttattgaacaacttaagaaatatgagttcattacgatcaaacgattagacgagaaagtattcggttttttaaatggtcaaaatgatgatggtcaagttttctgtaacaataagaataagcttaaaaagctatatcacccttcggatattgatgtttttagaaaagaaataacaaaagatggaaatggaaatgaaaaattagttttaggaagtccattaatttcatctattaaaaacccaatggcgatgcgtgccttacatcagttaagaaaagtgctgaacgctttaattattgaaggacaagttgatgaaaaaacaagaattcatatcgaaatggcacgagaattaaacgtcgctaataaacgaaaaggaattcaggattatcaaagaggtatagaaaaaaataggaaagagtatattgaagagataaaaaaagattacaaagcagcaagcggtctagatattgaacctactgaagatgacattttacgatatcaattatggattgagcaggatagaaaaacaatttatgaagaggaatgtacaaatattaggattagtcaaattataggtagcgatccagactatgatatagaacatactattccaagaagcagatctctggataattcaaaaatgaacaaaacgttatgtagcaagttgtacaatcgtaagattaaaaagaataaaatacccgttgaattaagtaattatagtgatattttggatagaattaaaccttggcaaaagaaatatttggccttagagtatgaaataataagtgtctcaagagccattaaagcagcgactactaaggaacaaaaagacagaaaaattagattgcgccataagctgaatttgcaaaaggactatttcaaaggaaaacatgaacgttttacctatactgagccaaaagtaggtttcaaaaacagtcaaatcccagatgcaggaattatcacaaaatatgccaacgactatttaaaatcgtatttcgggagagttgaagcggtaaaaggaggaatggttgcggaatttagaaaagcctgggggatccaggaaagttatattaaagacggtaagaaatattacgaagtcaaagattgtagtaaacacacccaccattgtattgatgccattactattgcttgtatgactaaagacaaatacgatgtcatggcacatgcttgggatttagaggatgacgtcgagaaaaatcaagataagttaatgaagtctgttctcgaacaatctaagccatggaaaacctttaccgaagatttaaaaaagattgaggacgaaatattagtttcccatcatacaccagataatataaagaaacaatctaaaaaaattatcagaattaggggtaaaaaacaatttgttgctgaaatggaaattgatgtaaacgggaaaaaaattccaaaaacagacagtaataacaaaattatttttaagaagggtttcaagggagaaaaaatagcaagatttcaacaaggagataccattcggggttctttgcatcaagatagtatttatggagcaattaaaaacccattaaataatgaagaaattcgatatgtaatacggaaagatttagaaagtattaaaacttcggatgtagaatatattgttgatgagatagtaaaacaaaaagtaaaagaagctattttaaacaaagttttattgctttcatcaaatgctcaacagcaaaacaaatttgccgacaatcaaaaagtttggatgaatgaagaaaaaggaattgcaataaacaaagttcgtttgtatgcaaattcagtgaaaaatcctttgcatgtaaaggaacacgctttgctttcgaaatcaaagcaggagcataagcaaaaagtatatgctcaaaatgacgagaattattgtatggctatttacgaaaaggatggtagaaaagattttgaattaatcaataatttcaatttagcaaaattggaaaaacaaggaaaaggatattattctttatttaaagaaaaaacaaataacggaaaaacaattcaaatgcctattgcaaaaaggaataatcgtgatttagttttgaaaagagggcaacaagtcattttctatgatctcggaactgaaaacccggatgatgtaaatgacttaattgatctgaaaggtagaatttatattatagaagggttatcaattcaacgaattgtccgaccatctggaaaagttgatgaatatgggattataatgtttcgatattttaaagaagctagaaaagccgatgacttaaagagtgataaatataagccagatggcgttttcaaattggaggaaataaaaccgaccagaaaaatgaatcataaccaatttactgcttttgtagaaggaattgatttcaaagtcatgccatctggtaaatttgaaaagttgtaattagattaaagattagaaaaaacgatattgttgataaatttcatgtacagggaatacatgttgtggtttgattaaagattataaaaaacgatatttactatcaattcccaatctaacaaagcatagttgtggtttgattaaagattagaaaaaacgatattcgccttaaagttatcgccagtaacttctatgttgtggtttgattaaagattagacaaaagttggaattacaaaagtcccgataaaactaaatacatattcgataaaaataacaatacttgaaacgataaccaatcaaggaaacattggacttgtaaaaaagagtatttatataagttagacgtattacaggagtacgaagttgattggaaagaattttctaaaataggagattctatttttaaatattgtttaattaaaatggatataggataagataaataaacaacgaacgcacaaaactagcaacgatagatctgggcaataggcttaatggaaagttggttttgtatttgggacgctttagtaaatcccaaaatagagcttaatttaatcccagacccgctgcagtaacagaacgttgtgtgctatagtaatgaaaaaaaccgaaaacagaaaaatgaatttagacactaaaattgcattaataacaggagcaaatacaggaattggaaatgctctaacggaaaaactaattgctgaaaattattttgtaattggaacatctagaaatgggaaaattgaaagtattaattctgaaaacttatttgttgtagagttagatttgacaaaccaaaagtcgattgaaaatgcgaacaaaataattaggaataaattcaagggaattgatattttagtgaataatgcaggaattggtccagatttaggcaaacgggaaccagatttagaaagtttgagattgacttttgaaacgaacgttttcggtcttgttaactttactgaaactgttttagatttcgtaaatgaaaatgggaaaattttaaatatttcctccattatggcaacattgaatctgatttcaaaaatggattcgacagcatatagaatgtcgaaagctgctttaaacatgtatacaaaaactttatctgcaagattaaaagatagaaacatagatgtgaattcaattcatcctggttgggtaaacacaagattatcaagagaaggcgcgccattaacaacagagttttcagcaaacggaatatttaaactaatagaaaccaaaatggaaactggaactttttggaacgctgaattacaagaaaaaatgttgtggtaataaaaaatacggccaagctaccgcctgcatgaatttagtcatagattgagtcaatcggctcaccattatgctgtcggcagaattgataagcaaggttctaaatgctgttctcaacattttcccagcttctcccgctctacggaattcggcaccgttctctcgcgttctatacaacgcaggataagttgcaattcttttcgcatcgataccgcctttttctctggccaaatgcccgtctttggttttgtaaaaagtaatatctccgatagtacctttcaatttgattataccgttctgtattgccataatttctaaaatttaaattaatagttgtttcaaatttcctcaatcatcctcctgttgcaaagctttcgattgatttcgaaaacaaagattacacttaaactaataatacagaacaaggcattgttccttatgtcttgcggtggcttaaatgacctttttaaacataaatatcactcaaaaaaggaaagggaatattcgctaatcatatcatctcacaagaatcaacagagtagcaatacaaaagccactcaaagcctactcaaagttatagaaagtgcatgcaaatcgaaaacaagagcttgtgtatctacctgaaggacatactaggcattatagggaagagttaccggcaaagcaagagtattgcaaacaatacctaaagaactaaacaagctttaaaacaaattggcggacatagtcaatttctgctcgtagactagtataaaacacgaacaagtagcatcctttattattggacagaaacctttcttaagttgtttaaattttatttaacaaataattcctgaaaaaaattcgttaatcttatacttttaataccttagctctgaaacattatgccttaattatgaagcatctaccagaatgtcaacttattttgaataaacttaaaattgacttgccggcaaatctgttttatcacactattcaccatactcttgatgtatatcgatgcgctgaaagtattgcgaaagaagaaggcataagttcttctgatttaaaactgcttcttgttgctgtcatttatcatgatgctggatatcttaaacaaaataaagatcacgaagagttatcctgtgccatggcccgagaacatctatctctttataaatacactaaaaaagaaattgatgttatttgtgctattataatggccacaaaaatacctcaacgaccgaaaacccatttagaagaaatcatttgcgacgctgacttgaattatttaggtcgtgatgatttttttagtattggagaatatctatataatgaaatgcttgcttttggttatatcaacaacagggagcaatggaacaaagttcagttggattatatgcaacagcataattattttacagccacagctattaaacacaaccaatcgcgaaaaaataaaaatttaaaagaattacaatcactgataaaaaaatatcaataatgggaacgaatactagaaaaaatataattgatgtaattacgactattactggcatattgttttgtggcttcgcactgaaaggatttttggtgcctaatcagtttttcgatggtggggtaaccggaatctccttgttacttcatgaattataccattggaatataggctacgtaattgttgcagtcaatatcccttttattattatgggtgcattccaggtaaacaaaacgtttgcattaagaactttgcttgctgtcgtaggtctggcgctttgccttcattttattccctatccacagataacatccgataaattgcttgtttccatttttggtggtgtattcatgggattaggtgttgggctggccattagaggtggttgtgcacttgatggtattgaagtactggctttatatacaggaaaacggatcagttttacgatcagtgaaattatattggggataaatataatcatctttttaatcgcagccgtgaagttaggattacctgtagcgctatattctattttaacttattataccgcttcccgtactatcaactttgtcattgaaggaatcgaagaatatactggagtcaccattatttctagtgaaagtaaaaaaataaaggagaaactagtattggatttaggacgtggtatcacagtttacaaaggagaaagaggcttcatgaaagaaaattttgacacaagtcagcccgtagatatcgtttttaccgttgtcacgcgaatggaattaaaacgccttaaaaatatggtagaagatatagaccctaaagcttttgtctttactagtataattaaagaagcggctggaggtatccttaaacgcagagctagacattaaaaaattctgctattcgacaacctcgtaagtagttacaggtttttctttatttttcaaattaaattcaccattgtgtttacatataaacgattcctgtgtttgcaaatacacttcttccgaaataataatttgccctgctttagcaatggtttgaagacgttgggcaacattgacagcgtcaccaattacagtataatctagccttcttaacgaaaccgaaccaatatttccagataccatttctcctgaattgatgccaattgatatttcgggcttgtatgtttgcccccctttcaacgctacttcaatagagctgatttgttctttgacggcaagtgccacgtctatagccctgtccagatggtattcgcccctaaaaaccgccatgactgcatctcccataaacttatcgacatgccccccctgagcgatgatttcctttacgattttgtcaaaaatcccatttaacaacgcaacaacctcatttgccggaatcttttcagtaatagatgtaaatccgcaaacgtctataaacataactgttgcttccagtaattcgttcttcagcagactgctttcaaactccttattagtcataaaacttaatacattcgaatccacgtacatttttagaatattattttccttgatcgctttaatcgtttcccgcaattgtttaacatggagaatcgtcttttccatggtcaagtcgagatcatcaaaatcgaccggcttgatcacaaagtcaaaagcgcccctgttcatggctgtcctgatattctgcatatctccataggccgacaccataatggctttcaacaaagagttggcttcaggcaacctactaagtaaagtaagcccgtccatcaccggcatattaatatcactaagaatgatatcaagatcagggtgttcatgcactttctgaagtgcttcctcaccgtttctggcaaagatgaattcgtatttgttttcgcgaatttttcttctaaatttctgtttgactagcatttctaagtctgcttcatcatctactacaagtattttagccattattccagaaggtgtttaagtttttctttcaataaattaaaatctaaaggcttggtcaaaaaatcgtttgcaccatttttatcggcctgtcttctattttcatcatcgccatatgctgtaatcatcatcacaacaggttcgggttcgtggtaatttaagcgaatttcagacaaaagttcaataccgctcattcccggcatattaatatctgagagtattaacacgatttgcgaatgtccctttttcataaaatcaagtgcttcctcgcctgaaagagcaaaatcaaattcaaattcgttcgcgcgtaattccttcctgaaacgctgcaagaaaagcggttgtacatctgcttcatcatcaactactaatattttcatcatgtgttcgtcttaattaatttatcaatagtctttttcaatcattaacattattaaagataagatataaaaaagttccatttatcctaaaggcaagcaaatagtaaaaatagtgtattccttttctttactatctatagcaattgttccaccatgagcgtttactatgatatcataacttattgacaagcctaatcccgttccttcacctgcaggctttgttgtgaaaaatggctccatgattttgtctttgatattctctggtattcccattccgttgtctttaactacaatttcaattaccttgcctttaaggacagtagtgacagtaataaggggtttataatccttgctcgccattttctgtttatgatgagtcgcataaaatgcattggtaaacaaattaagcagcactctcccaatatcttggggaatcacgtttatcttgggtaaactctcctcaaaactggttagtaactccgtattaaagcttttgtctttagctcggagtccatgataggccaagcgcaggtattcatcggcaatcacattgatattagtaggctctttaacattattaccaacccgactttgtttcaacattcctttcacgataccgtcagctctcttgccgtgataattgattttttccaggttttgtttgatgtcttttgcaatggaaagtgcttcctccttttctcctttaatcatttcctcttccatttcgtcaattaactccatgctcacttctgagaaattattgacgaagttcaacgggttctggatttcatgcgcgatacctgcagtaagttcacccaatgaagccattttctcagattgaatgagcttggattgggtggattttaaatcttctatcgactgtttcaaagatgcggtacgttcttgaacttgcttttccagagtttcattttgtaaggataaaatagactctttttcttttgaaagcttttgcacccgctctagactaagtcttaactcttgactgcgtttaccaaaggaataacctaaatatacggctaaaattatcgggttaaccataaagacaaaaggaataaacgctattatatctatctgtaggaaaccaatcatctccaatacaattaaagaccaatatacaagacaaataaaactagagcttgtaaagaggatactacctactttatttttgttccaggattttacagctattcttataatggtcatatatccaagaattccccaaacgggacttaaaatgtcaggatcatatagaaagtaacaacctatagctacgaggcctaaaaaacttacaattttataaacaatatctaaaggctgctcgaaaatcttgtataaacaatacaatgcaataatccaggaaattacaatacaagcaccatagcagaatgtaatccaaaatggaataccgggataaacactaacccagattacaccgataacaaatagaattaaaaaaaatatagatatcgcaaagtatccattgattttttcacttgaaaaaaagagaaaaaaggataagaaaataataaacatcaaaatagttattcctaaagcgatataatagttatttataaattgttgatgaaaatagatccgattattttttataatatctctggagtttgcattgctaagtgttgaggccgcaattcttatgaaaccattggtagtagcatattttgggaatttatattgtgcattcacatagcgtactgccaaaatctgttcttttcctttttctagcggtaattcaagtgtttgttgataagggttattgtagataattttatctatatctgaacttactttccctaattggtgaattaacctcccatctaaataaatttcagaagcgcctaattgataaatatttaaaacaatagctttgtttaagctactacccgctttaatgcacattctaaaccagacaatttcaccacggtttgcaattgcattttcaccattaggcatgtttaaattataagacaaagaggactccttccaggatgaatcgtcaaacgaagggttcgcccattgcatgttatctcctttttgataacgccagttattttctaaagtcaaccattgatttgctaagttgctgtcagtgacaacacatgctttttcggattgactgaaagtggcgagcgaaaacaatagagtccaaatataaagaatgtacttcatgaaatttatgaatttaatgttagtgaaataataaattcagttccttcgttttctattgtgtttactttcaattcgccaccatgcgcattgacgatatcatagctcatagataatcctaaacccgttccctgacctgttggttttgtagtgaaaaaaggttggaatattttgtccaacaccttttgtggaataccattaccgttatctattacgcttacttttacagtatcgccaacttttttggtgcttactgtaacggttggttcaaaactgtttactatttccccttcggagattaggatacttttctttttttcattggtagcataaaacgcattggtaataagatttaaaatcactcttcctatatcctgtggaataatatcgatattaccaatggtttcatcataagtggttactaaagtcgcattaaacgatttgtctttggcacgtagtccatgatatgccaatcgtaaatactcatcggctaaagcattgatatcagttggttctttgacaccagaactactgcggctgtgttgcaacatgccttttacaatagcatcggcgcgtttaccatgatgatttattttatcgaggtttcgtttaatgaaatccgcaatggcaaagccttcatctacgtcaccttttttgaattcttctttcatttcgtcaatcaactcattactcacttcactaaaattagtcacaaagttcaacggattttgaatttcatgggcaataccagctgttaattcacccaatgatgccattttttcagattgtatcaattgcgattgggtggatttaagttcatccaatgctttttgtagttcgtctttctggcttagaagttcagcagtacgttctgccacttgaatttctaatttttcttttaacatttctgattgttggaagtctttttctctttcgatggcttttaactgttcactttcaatgtctttgcgttgttttctgtttatgaaaaacatagcaaaaaaccaaa

SEQ ID NO: 3124 - DNA, 19961 bp, synthetic construct
  source 1..19961: mol_type = other DNA
  misc_feature 1..19961: note = Synthetic
aaacccaattgagcaagaaggtacttatcctttgccagaagcacagttggatcgttttatgtttgcgatcaagttagattatccttcttttttggaagaagtgcaagtggtaaaaaacactacttctgatgttaaattaacgattaatcctttgtttagtgctgaagaaattattgaataccaacatctaattcgtcgtattcctgttgcggataatgttattgagtatgcggtaacgttggttagtaaaacgcgtccaaataatccgttgtcgaatgagtttgtaaagaattacctagattggggagcaggccctagagcgtcacaaaacttaattattgcggccaaagccaatgcagcatttcatggaaagttttctccagatattgaagatgtgaaggctgttgcagttggaattttgcgccatagaatcatcaaaaattataaagccgatgcagaaggaatttctgaagaaatgatcatagcaaagcttttataacgttgtagttttgttatttagaaaggttcttagttaaaatgatagctaagagccttttttttagctgtgctgtattttgaaattcttaaaaataccttctttaaatactgaatacataatattttaataaaaaaataaatttttattaataaaagataatgtttgagttgttttggtaataataattttcaaaaataagacttctattaaattttttttaagtttccgctttaattcctagctttgctcatgcaatttaaaaccttatttatggcttttggtaatcgaaaaataagtacaattagccattaactttataaaccttttcattatgaacacttatagcgattacattaaagaaatcgaagaacgaaaactacaagggctacatcctaaacctattgatggtgcagaattgttgtctgagattattgcacaaattaaagatgtaaatcatgtagatcgtaaagattcgctgcagttttttatttataataccataccaggaactactagtgcggctcatgttaaggcgaagtttttaaaagaaattattcttggagaagtagtagttgaagaaatacaaccttcttttgcttttgaattgttatcgcacatgaaaggtggtccttctattaaagttttacttgacttagttttaggggaagataaagctatagccatcgaagcagctaaagttttaaaaacacaagtgtatctttacgatgcagatatggcgagacttaaagaaggctatgagaatggaaatgagattgtaattgatattattaaaagttacgcaaaggctgagttttttactcaattaccagaagtgactaaagaggttaaagtggttacatttattgctggtgaaggagatatttctacagatttactttctccaggaaatcaagcacactctagatcggatcgtgagttgcatggaaaatgcatgataacacctcaggcccaagaagaaatcaaagccttacaagcacaacatcctgatgcatcagtgatgctaattgctgaaaaaggtaccatgggtgtagggtcttcaagaatgtcaggtgtaaacaacgtggcactttggacgggtaagcaatctagtccttatgtaccctttgtaaactttgcgcctattgttggaggaaccaatggaatttcacctatttttctaactacagtagatgttactggaggaattgggattgatttgaaaaactgggttaaaaaattagatgcagatggaaaacccgtgttgaacgaaagcggtgaccctattttagaagaagtatattctgtagccacaggaacagtgcttacgattaatacaaagaaaaagaaattatataaaggagaccaagaacttattgatatttcaaaagcttttactcctcaaaaaatggaatttattaaagctggaggatcgtatgctattgtgtttggaaaaaaactacaaacatttgccgctaatcttttagggattgatattccgttagtgtatgctccgtccaaagaaataactattgaagggcaggggcttacggctgtagaaaaaatatttaacaaaaatgctgtaggtactatttctaaaaaagtattacatgcaggctctgatgtgagagttacggtgaatattgtaggttcacaagatacgacaggtttgatgactgctcaggaattagagtctatggcggcaactgtaatatcgccaatagtagacggtgcgtatcaatcgggatgtcatacagcttcggtttgggataaaaaagcgcaggctaatatcccaaaattgatgaaatttatgaatgactttggattgatcacgggtcgtgatcctaaaggtgtatatcatgctatgacggatgttatccataaagtattgaacgatattactatagatgattgggctatcattatcggtggtgactcgcatactagaatgtctaaaggcgttgcatttggagcagactctggtactgttgcgttggctttggctacaggcgaggcgtctatgccaattccggattcagtaaaagtgacttttaaaggaacgatgaaagaatacatggattttcgtgatgtggtacatgctacacaagcacaaatgcttaagaaatttggtggcgaaaatgtatttcaaggtcgtgtaatcgaggttcacttgggcacgcttacagctgatcaagcctttacttttacggattggtctgctgaaatgaaagcaaaagcggctatttgtatttctgaggacgcaactttaatcgaatcgttggagattgctaaaagcagaatccaaatcatgattgataaagggatggataatgcaaataaagtgcttcaaggcttaattgacaaagcgaatgttagaattgctgagattacatcgggagagaaacctgccttgagaccagatgcaacagctaagtattatgcggaagtagagattgatttggatcaaattgttgaaccaatgattgcggatccagatgtgaataatgtggatgtttctaagcgttatacccatgacacgatcagaccattatctttttatggtggtactaaaaaagtagatcttggattcataggttcttgtatggttcataaaggagatatgaaaattttggctcaaatgcttaagaatgttgaagcacaacaaggcaaagttgaattcaaatcaccacttgtagtagctccgccaacgtacaacatagtagatgaattaaaagccgaaggtgattgggaagtgctaaaaagatattctgggtttgagtttgatgataacgcacctaaaggtgcagcacgaactaaatacgagaatatgttgtatttagagcgaccaggttgtaatctttgtatgggtaaccaagaaaaagctgaaaaaggtgatacggtgatggctacttcaacgcgtctgtttcaaggaagagtggtggaggatgctgatggtaaaaaaggagaatctttattgtcttctacgcctgtagtagtgctttcaaccgtgttgggtagaacaccaactattgaagaatacatagcggctgttaaaggaatcaatttgactaaattcacaccctcaaataagcagttgatttaattaattgctgtattttaactgtaaagcctgagttttaaactcaggcttttttatttttctttgttaaatgcagctctaatttattgtgtttttaacactattatttagttaaataagtatatttgtaattgttgagaaaagtttgttttttgcgtataaaatcatgctttttttgtgtgaaatttagattaactccgtttttgataaaaatcgcccccaatttttaaagaaaaattcatgaaatattttggcttaattttattgttttttagtactgctacctctactcttttttcgcaagaaaaatacattcaacatcaaatttcacaaggtgaaaccatttcaacaatagccgaaaaataccatgtaagtcaaaaggttatttttgaattgaatccaaaagcttcaggagttttaaaattgaaatcggttttgaaaattccaaataaaaactataaaaaagagttggctcaaaaagaattagcggccaaaatgaaacgttccaaaacaattgagtatgaagttttacccaaagaaactttgtatgggattgccaaaaaacatagtctctcagttgatgatattaaaaaaagtaatccatcgattgatctagtgggtttaaaagtaggaaagaaaattaaactcattgttcctgcaaattttgtgctaagtcctgaagtggcggttgtggatagagatagtgttagtctcataaatgaaaatgctgcaagtagtaaggaaactcaaaatgtaagtgctattgttgccgaacacaaagccgttcaacctcatacagtattggcaacggaaaccaagtatggagtatctaaaaaatataatatttcagttgcagaattggagcaattaaatcccaatctaattaataaaaacttggccattggacaaatgttgaatgtccctttacaggataaacaagtgactgcagtacctgtcggtgagccgtcttctgctactactctaggagctgttgctttggaagtacaagatcaggctgttacaaaagttgaaaacgcaactacagaaaacggtacaactgtaactaaatcagttgatgcctcagtgcatcaagttttgccaaaagaaacaaaatttggaattgcaaagaagtacaatatcactgttgccgaattagaacgtttaaatccttcgattaaaaacacgcttagagttggtttggttttaaaaataaatgagggtacgtcttcaactacagatgcaattgcgatcggaagtactaaaaacgaggtagtatcttctaatgaagaaagtgctactaaattttttggagattttgcagttgcggatcatttaatagaaaaagcttctgataatttaggcattcgttaccgatctggtggtacttcaagagcaggttttgattgttcaggattgatgtatacaacctttgatgcctttgatattaaattgcctagatcttctttcgaacaagccaatgttggtttaaaaatagcaccccaagaagctcaaaaaggggatctgattttctttaaaactcgtggtagtggtcgtattaaccatgtgggaatggtagtagaagtcgaaggtaacgaaattaaatttattcactcttctacatctaacggtgtgattatttcttcaacaaaagaaaattattaccaacgaaactttgcacaagttaatcgtgtactgaaatagaccaattgtctttttattagcattttttgcgttaggcattacttcactcatgctattttcataggagttcagtgaacttcgtttgcagtgaaaatccttttttaggctttttcggtctcaaaaagattgtaacgaaaaagcccgacccttgtagtaacgcccaaatagcgagatgaaaaaattgctgtttagtatagaagtaagtctaatccattaattttctcggagtagaattacattgtttttttgaactcttttctttagccattcttttagttttttttcatcattggtagtcaaaggctttctgctgttatataccgctacggttttgataagtgtactatccgtgttttcgttgtacgtatgattggcaatagaaaggttggttatatctggaaataaaatgctaatttctcctcttaatcctttattgtcaaatgagttgctttttagtttattctttaaattcacaatgattaaatcttttttggtttccttcgaattctcgttgatataattctcggaaattaacttctttatgtcggtcgtatcttgtttgatgataagtttagtgttttctattttgtatttttttagagaagcattcagttttttttcctcctgactacttacttttttatttagaaaggccaactcgatgcttttgggattggctttgtaatttattttttgatagacaatagtgaagccgttctctataaattcttgatttaaatacaattcaatcctttgatggtattttttttcttgagctaataagtaagcaaaatacacacttggcaaaatcagtaataagattatggtcgaaatggtgtattttattttcttacggtagcgttgatcaacaattttgacttcaggatatttaagatattttacaattacaaaggttgaaatacagataaaaacacagttgatggtgtacaaaaaaagtgccccaagaaaatatttccaattcccgatagctagtccgtaaccagcagtgcacaatggcggcattaaagctgtggcaattgcaacaccaggaatcggatttcctttttcaactcgcgtaatggctataacgccaactaatcctccaaaaaaggctataagaatatcgtaaatattgggcgctgtacgtgctaaaagctcactttgggcttctttaaaaggcgttagcatgaaataaatagtcgatactaacaaacttacaagagtcgcaatcaagagatttttggcggctttctttagtaattcaaagtcaaatatacctaaactaaaacctgcgccaacaatcggtcccattaacggcgagatcaacatcgcaccaataatcactgcagttgaatttacatttaaacctactgacgctacgactatggcacaagccaaaatccaaacagtagatcccctaaaagagatgttggcttttacgttttcaagtactttttgtttgtcttcttcgccagtgtgtagatctaaaaaactttgtattcgattcattgtgttgttttttattctgttagcgttaccttgagggtggtgctaacttgttttgatatttttgaggtaataattacgggtatttttatgttaaaatcttccgtgtttaaaataaaagtggtagaaagcgataggccattgttggatttgttgatccaagctttgcaaaacacaggcttcgattttccatgtattttaatgatgcccttaatggtatattcgttgggtttttctgtaagggattcataatttaatttttctattctcccaataaaagaggctttggggtagcggtcactttctaaataattttcattgaagtgttgttgcatcaatgggagtttaaaccgaaattgttgtatgtaaacggtacaattaatttcatttgtggttaaaatcaccgaacaagatacttcgttatttgttgctttgatttcttcaaaaaaaggtacagaggcttcaaaatgaatcgatcctttggtagttgaccattcattttgagcttgcgccagcaggctgaacatacagagaaaaatcaaagtgttttttgtcatgtgatgaacaataggttcacttaaagttacactttatatgtatgttgagcaaattaattttttttaaccgctttgtctgttaatgaagttataattctaacttaatattgtatttggttatgttttttagattttctggggaataaaaatcaaacacttcttcgtgttcttcgtggatttttttgagttcaatttgcttcaaacaattgctaaaacggcgtacgtcattttcggttcttaaaattaaaccgggtacgctgacgctttttcctaattcatttttggcaaccatcgtaaagtaagacgaattacaatgtttgacaaggcctgtttgtatgttctcggattcgactctaatgcctacaatcattgaacttctacctacatagttcactgaggctttcatagtgaccaattcgcccacttcaataggttgtagaaaattgactgtatcaacagaagcagtaacacaatagtgtccggaaaatttagaagcacttgcaaaagcaatttggtctagcaacgataagatatatcctccatggattttaccgctaaaattggtgtgcgaggggagcattagttcagaaatggtaatatgagaagctgaaacagatttgaatataggggtcatgaattatcgattattaaatggagagacttctttttgtactgaggttataaaaaaacgagtttcgccccaccacataaaagtgcgctttttttcttcataggttaagcgaacataatgaccttgtaacacttttaaactatcgataactgctttgtctttgtctaaaactgaaaagcgaaaaatttgtgctcccgaaatgccttggctcaattcgccttcccaagttttgatgaccacacctttatgactcaaacggattaattctccagaacgcacgccatcgctaacaggaatgtaataaataaaggccatataaatagaaacgattagcactccagtgagtagtaataaagcggcaatttttttcatcggaattcatttaaaggtttgttgagtcagcttcggctctttttaatacattttctggtaatgcctttttggctttggctcccattttttttagtttttcaacactggtgatcagattacccttgccttctactagcttgttcattgcggccccgtattctgttttgctttcatctatttttttgccaattttaatcaaatcgccaacaaatccttcaaatttatcatacagagcacccgcttggcgcgcaatttctaccgcattttcttgttgtttttggttggtccacatgctgtcaatggtgcgtaatgtggctaataaagtcgatggagtaacgatcacaatattcttctcaaaggctttattgtataagcctgtatcttcatttagtgcaatggcaaatgccggctctatcggaatgaaaagcaaaacaaaatcaggactttccatctgatacaaatcctgataatttttctcacctaattgctctacgtggcgctttatagagagaatatgttcttttagatatccagcctttaaattatcgtcttcttcattaatgtatttttcgtaggcggtcaaagacactttagagtccacaatcatttttttgccgtcgggtagattgataacaacatcgggaaatactctgcttccttcagaagtagtatgcgattgttgtacaaaatattcgcggtctttttccaaccccgatttttccaaaaccctttccaatatgagttcaccccaatttccttgcattttactatctccttttaatgctttggtaaggtttaaggtttctttactcatttgaagattcatttgttgcaaacccacaatttgctgacgtaacgccgcgtgataatcaatactttctttatgggtatcttctacttttttctcgaataactgaatcttatcttgaagcggactcaagatattcttcatgttttccttattctgttcggtgaatttattcgatttttcgtctagaattttgttggctaaattttcgaattctttggtgaatttttcttgaagttgttctacttcatttttttgttctttatgtcgttctagtaaattatcaaaatctacctcttttttagaaagctgaatggccaaactatctttttcatttcgaatggcttctttttcttgaaggctactttgcaattgtttttcgaaagtagttttatcgattgtagcttgttctttttgttgttgcagcaaatgttgtacagcattgattttctcttccaagcttattttttgtgactcaaaacgagctgaaaacaacagttttcctatgaaaaatccaaggccaagtgcaacgataaaaaccagtaaaaaagaaaataattcagacatagaggtgttttttttagaaaagtaaaagtaagaatttaatatggagtgacaagttggagtttgtcaataaaaaaagtcccaccgaagcaggacttaaggttttcacctacggcatatagccttattgtgataagattaaagattagaagttttaatctgtggtaaatgtaggaaaaaaaacttgagttcttatgaggaaaaccgtaatgtgattaatttattttttcatagctttaaaaattcttacaaaatagagtgtattatgacaaaaatattgggattggatttgggaacgaactcgatagggtgggcgattgtggataaagaaggcaatgagttttcattagtggataaaggagttagaatattttcagaaggagtgaaatctgaaaaaggtatagagagttctcgagcggctgaaagaactggatatagaagtgcacgtaaaattaaattcagaaggaaacttcgtaagtatgaaactttaaaggttttatcaaaaaatggtatgtgtccattatctcttgacgaggttgaagcatggcgtaaatcaggttttaagcaatatccgttaaatcctgaatttttaaattggttacgtacagatgacgttcataatattaacccctatgtttttagagatagggctagtaaaactaaagttacactttatgaagtaggaagagcgctttatcatttggctcaacgaagagggtttttaagtaatcgattagatcaatctgctgaaggtataattgagcttcacgctccaaacattgaaagtagaattgaagaaacaacaaccattaacgacttaaaaattgaaatccaagaatattttgaaggcttggacattttggataaaaatgcgaaagagttagatgagggtgaaaagaagcttaaatctctatataatgctttagataaaataattaaagcaaatgaatttgaaaaagctaaaacagaaatcatagctagattaaattggaaagaagaccaaggagcggtaaaacaagaaattggagaaatttctcaagcaatgaaggatggttgctttgagaccttgggtcaatacttctatagtttgtacaacaaagggaaaataagaaatcactatacagcccgagaagctcattatcttaatgaatttgaaaaaatttgcgaagtacaaaaaataagtgcaattgacattagtgagaatatccctgaaaaaagatattcaggattggcaaaagaattgtatcgagccatattttttcaacgacctttaaaatcacaaaaaggattaattgggaaatgttctttggataaaaccaaatctcgttgtgctatttcacatcctgattttgaagcgtatcgtatgtggtcttatcttaatacgattaagattaaaacgccacaagaagaacaattacgttttttaactatagaagaaaagcaacaattaattccaaagtttttcagaaaaaaagacaactttaatttcgaagacctatccaaagaacttattccaaaaggatatactcctgatttctataagtcttcaagtgcaaaaactgcctcgtatatttttaattacaaagcaatagatagtgttgctggttgtgtggtttcagcctctttaaaaaatgtattaggcgaagaatggaatacaaaaacatggacatatgaaaccaaaaatagtaaaggcgaatttgtaaaccgagaggtagattacaaagatttatggcatttgctgactgtttctacctccgatgcttatttagaagaatacgcaatagagaaattaggattggatgaaaaaagagccaaatcattttctaaaatccgattgaaaaaagattttgcaagtttgagtttaagtgcgattaataagatacttccttatctcaaacaagggttgctctattcgcatgcggtatttatggcgaatattgaaaagattgtagatgaaaacatttggaacaatccagaagaaagactgtacattcaaaataaaatcgctgaaattatcgagaataatacttttgaaaacagtaaattagaaatagttaacgggttaattaaagatagtaaattaaatagttgttattattctttagaagcagaacagtcgtataaagaagatttagtcaaaaaagtaaattctatttttaaagaaatcgataacaaagaagctattgtcaacgatttatttccagtttttatagaacaattaaagaaatacgaatacatttctgttaagcgcttagacgagaaagtattggaatttttaaaaggtgaaaatgaagatggtgaaatctattgcactaatcctagcaagttgaataaactttttcatccatcagatattgatgttttcaaaaagaaagtaattgaagatgagtttggtaataaaaaagttgttttaggtagtccattaatttcatctattaaaaatcctatggcaatgcgagctttgcatcagttacgtaaagttttaaacactttgattattgaaggtttggtagatgaaaaaacgcgagtacacattgagttagctcgagagttaaacgatgcgaataaacgaaaagcaattcaagattttcaaaaagaaaaccaaaccaaaagagaggaatttcgaaaagaaattaaggccttgtatttggctgaaattaataaagagattgagcctacagaagatgatttgttacgctatcaattatggatagaacaggataagaaagaaatctatgaggagggtaaaaatatcagtatctgtgattttattggcgaaaacccgaagtatgatatcgaacataccgtgccaagaagtatctcgcaagataattccttaatgaataaaaccttgtgtagccagcgttttaatcgtgaaattaagaaaaacaaaatgccaattgaattggcaaatcacgaggaaattattaaacgtgtggaccattggcgcattgaagccgacaaactttcgtgggaaattgaacagctttcaaaaggtataaaagccgctgcaaccaaagataccaaagacagaaaaataagaagaagacattttttaacattaaaaagggattatctcaaggggaaatattcacgctttgtttggaaagagcctaaagtaggttttaaaaatagccaaatccccgacactggaattattaccaagtattctcgagcgtatctaaactcttatttttctcgagtagaaagtgtaaaagggggaatggttgccgaattcagaaaaatatggggtattcaggaaagttatagtaaagacggtaaaaaatattacgtagaaaaagaccgtagtaagcatacgcaccatacgatagatgcgattactattgcttgtatgactaaggacaaatacgatgttttggcaaaagcttggacagatgaagacaatgaaaacctaccattggctaggaaattattagccgactcgaaaccttggtctactttcacagaagatattaagaaaatagaggaagaaatcttggtttcgcatcataccccagataatgtaaaaaaacaggcgaagaaaataattcgtattcgtggtcaaaaacagtatttggcagaaatgacccaagaagaaaacggtaaaaaagtgcctcaaaaagacgaaaatggcaaaataatttataaattaaatactgacggtaagaggattcctagagtccagcaaggcgatacggtacgaggttctttgcatcaagatagtatttacggagccattaaaaatcctttgaatccagaagaaatccgttacgtgattcgtaaagatatagaaagtatcaaggctacagatgttgaaaatattgtggatgaagtggtaaaagaaaaagtaagagaagccattgctaataaagtattgctcatttcttccaatccacaacaaaaaaataaattggctgacaatcaaaaagtttggatgaatgaagaaaaaggtattgcaattaacaaagttagattgtatgccaactccgtaaaaaatccgctgcatattaaagaacacagtaatttatcgaaatcgagacacgaacacaaacaaaaagtgtatggtcagaatgatgagaattatgccatggcaatttatgaattggatgggaaacgagaatttgagttgattaacaattttactttagctaaattgcaaaaaacaggagaagggttttatcctttattcaaagaaaaagaagttaaaggaaaaaaaatattatatccaattgctaaaagcaataatagagatgttgttttgagaaagggtcagcaagttattttttatgataaagctcttgaaaaacctttagacatcagtcatatcgatgattttacagggagaatttacataattgaaggattgtcaatcaatagagttaaatcaggaaacaatatttatgagtttggtgtaattcaattgagatattttaaagaagctagaaaagcagatgacattaaaaaggataagtataaaccagatggtgattttaaattaggtgaaaataaaccgacaagaaaaatgagtccaggacaatttaacgcatttgttgagggaattgattttaaagtattgccttcgggtaagtttgaaaaaatataattatggaagaatcaaaactaacaaaagaacaaatagagaaaattcaagctaaattggatagaacttccaaaagtggtttagtacaaaaacaaactaaagaagaaatgttagcagaattcaaaaggaaattaaatatggtatagtttttttatatctacaaagttggactcacacttgtggctttggttgtatttttttctccatcggaatgtaaaaaaaagttggaattgctctttgacatgaagttttttaaactcttaaaccaccaaaccacaactgaaaggtagggcatccgcccagcagggatgctatagctttcagttgtggtttgattaaagattagaagacacgatattaaataccaaaagagaccacctatagcaccagttgtggtttgattaaagattagaagacacgatatttttaagattctccgttattgccaaagttgtgttgtggtttgattaaagattagaagacacgatatttcccgaaacaactaatccattaccaagagcgttgtggtttgattaaagattagaagacacgatattatctaattgcctacgtgcgtcaagtgaaatgttgtggtttgattaaagattagaagacacgatattcgttaagcattgttgcagttgtggactagggttgtggtttgattaaagattagaagacacgatatttaattcatcggctgtaagcgatattctagtgttgtggtttgattaaagattagaagacacgatattatggaaatatgaaaacaacaacaattaacagttgtggtttgattaaagattagaagacacgatattggagattgcaacatagagttgttgccaacagttgtggtttgattaaagattagaagacacgatattcaaaaaaggtgatatacttattagtagtcagttgtggtttgattaaagattagaagacacgatattacagaataatggcgatcgcagacatataaggttgtggtttgattaaagattagaagacacgatatttcaatgtttcggattagctaaaaacacaacgttgtggtttgattaaagattagaagacacgatattttgctcttggttttcatacactaaattaaggttgtggtttgattaaagattagaagacacgatattaacggcggcagctacagtttcggcgtggtagttgtggtttgattaaagattagaagacacgatattttcatttcattaggcaagaagctcttgccggttgtggtttgattaaagattagaagacacgatattatcggcctcctcttcatttacatatggagcgttgtggtttgattaaagattagaagacacgatattgatttttgaagatgcaaacgttgggataagttgtggtttgattaaagattagaagacacgatattttcagtattagatatttttggttgcgtaagttgtggtttgattaaagattagaagacacgatattataaaaaactatttggctgaaatggcaacagttgtggtttgattaaagattagaagacacgatattcaatagttgataattgtttcaaataatttagttgtggtttgattaaagattagaagacacgatattttttctttgtttgtttattatttgagttaagttgtggtttgattaaagattagaagacacgatattcctttgccaataagtgtgcgcgtctttgaagttgtggtttgattaaagattagaagacacgatattttggtaatgtttgaccatctgtaacggtaagttgtggtttgattaaagattagaagacacgatattacaatgttttttcggagtcatttagaacatgttgtggtttgattaaagattagaagacacgatattaaatgaaaggtgaattaccgttagatgtagttgtggtttgattaaagattagaagacacgatatttgacttggcttttgccttttcagaggctagttgtggtttgattaaagattagaagacacgatattacgcatccctggagccgtaattcttacctcgttgtggtttgattaaagattagaagacacgatattataattgatttgctacgcattcaaaatcttgttgtggtttgattaaagattagaagacacgatattgcatcggtaactaccccttgaacttttccggttgtggtttgattaaagattagaagacacgatattagttggtttgttaccttctaataatcaagagattaatttggaatatcgtataaaaaaacgcctcttttttgccctgataaagcaagattgaggcattttttattttgtagattaaaacagttccaattgtgtcggttgtggagcttttggtacttcggctttgccccagaaattcataatgttgccaaattgtttatcggtaatacgcagtatacttactttgcccataggaggtaagagttggtggatccttttttcgtgcacatcggcactttcactactggcacaatgccggatataaaccgaaaattgcatcatactgaaaccgtctttgatcaaatggcctctaaattgtgaagcgtttcttctatcctttttggtttcggtgggcaagtcaaaaaatacaaataaccacataattcggtagccgtttaagtccataatttaggatattttattttcttgcgttcgccagtatagcattgctgcaaggaactggcggttttttgtagcgccaccatcaacggactcttttcgtcttcaaaataaacggtttgtgttagaatttgcaataaatcggctttgattttggtgttgaggtcttgttcttcatactgttctatgatttcaaataccttttcatctactagcgggcgaaagggttccattatatcatctgccaaagcaaaagcattgtatttacttttatgatgaatgcccaaagtgttcaataatccactccccgaaagggctcttgcagtggctgctcgtagaatggcgtaaccataattgagaaaattattagggtagtcgccaaatcgttcccttttgaaggcgatgtctgtagtttcaaaaaagcttttccaatattgactcgcagcaacgccttccatattgctactatcgccactcaatactttggaagccaaaaaatccaaggtgtttttttggctggttaatttgtggagtaaaagaccttggttagtaattttttcaataatggtctgttgccacaactgttttttgaggggcaaggaggcttcgatttgatttctgaagatttcttgttggatatgatggctattcaagtttaagaattgtccattgggtagatgattcttattgcaaatgataactgccgaattgttctcaattaataaattcatagcaggaatactaatataaatttcaggatgatccaaaaccaaaaaaccgatttcctcaatgggcaccgttccttctctagtttctgatttaacaatgagctgtaaatttttggctgaaatagaagatttgttttctattaaaagggtcttttttaacatgggaataaaagtttaagtagttattaataagtgtaatactatcaaaacacatgcctatctcaagtacgagcatcaaccgcagctattaactgtggttgattttggtttggatcgctttgttttgctgtcttgttgtatctttgtggacaaattttaaacatgagaatactagtaatatccatttttttgctttctttttgcaacgggtttagccagaaggttgccaagccctatgtcgttttagtgtcattagacggattcagatgggactatcccgatatatttgatactccaaatttggatcgtttggcccaaaatggtgtaaaagccaagtccatgcagcccagttatcctaccaaaacatttcctaatcattactccattgtcacaggattatacccggatcatcatggaatagtaaacaataatttttatgataaggagatacaaaaagtatttaccttaaaaacggcagccaaaagagaagcgcatttttatggaggaaatccgatttggaacctagcggaacagcagggagtaaaaaccgcttgttactactggcccggttcggatacaggagtaaagagtccgagtatctttaaaatatatgatgatacagtaagttacgaaagtcgtattaataccgttatcgattggcttagtctatcagaatccgaaagaccacacttaatcaccttgtattttgatcaacccgacaaaactgggcatgattttggtcctttatcagccgaaaataaaaaaacagttactgaagtggatgcagtaattggacaattgatgcagcggcttgatgcgcttcctatcggtaaagaaatcaatctcattgtgctctcagaccacggaatggcatcaattagcaatgacaaaaaagtagccattctcgattaccttcaaccagaatggtacggatatgctgccgtaatcaatcccattatgagtcttgaagcaaaaccagaatatactgaggctattgccaatgctttaaaaaaagtgcctaacattaaatggtatccttcggcaaaagtacctaagcgactgcattttggcgccaatccaagagcactcgactttgtgatagaggccgaggaaggatttagtttggtttataaacccgatcaaaaagttagcggtggtacacatggctatgataacgacatacaagatatgcaggcaattttttacgctaaagggcccaactttaaaacaggaaaaaaagtaaaatcatttcgtaatgttagtgtttatcccttaattgccgaaattctgggactgaaaacagaaacaatagatggagacttggccgaggtgaaagcgatgttgcgtaactaatttccattagacttacaatgtagttcatacatcatcctttctactgcacaaatcctcaggctatacatttagtgcaatcgtggtgtatacaattgttatggcgttctccttatatatagagaagtttggttttaagccagaagtttggtggtactatatataaggagccgggctattcgctacaagtcctcgactagtttcgttgtcactacactagtctgtgggcttttcactactatccctaacgcgtaaagtcgtatctaagcgctaatcttgtatatagactaatgctttatatgtatggagataaaataaatataaagagagcggttttgtcctctagcctcaaactctatattctatactgtaaaagctgtttatacactatatatactgtatggataaagtatagatagagtatgaaaagtgtattttactagtgatttaggattagttgttgaataatgaagttttttcaattcgtaaagtttgggttaaataatgattatcagagctttattgaattattaaaaaataaatcaaaaaaagttttaaaaagggcttgtttaaacgaaaaaagggtctacttttgcacccgcaacaacggcaacgttcttttaaaaactggcaagcgattgatacaaaagaaaagaaattttcaaaaataaaaatcaaaaaaagcttgtgagaaataaaagagttatttacctttgcaccccgcaaaacacgggaagttccttgagagatt

SEQ ID NO: 3125 - DNA, 19007 bp, synthetic construct
  misc_feature 1..19007: note = Synthetic
  source 1..19007: mol_type = other DNA
tgatggtagttccatttattatattaatttatcacaagatgattttaaactgggtggcagttcgtttgcgcaaacccaaaacaaaattgggactgatgtacctaccataaaaaattctgaattttttaaaaatgcatttaatgtaattcaggatttaataaaaaacaatcaaattcttgcaggtcatgacattggaagtggcggattaattaccactttactcgaaatgtgctttgccgatacaaatttgggtgcaaaaattgatttaaatttagttgccgaaaaagatttggttaaagtattattttctgaaaatatagcagtggtgctgcaggcaaaaaatgatgaaattttcgaaaaagcatttcaaaatttagaatttttcaaaatcggtgcagttcaaagcgaagctatattatctgtagaaaactacacttttgacatcagtgctttacgcgatcagtggtttgaaacatcttatttattagataaaaagcaaactaaaaacgacaaagcatcggaacgctttaaaaattataaaaatcaaaggttacagtataattttccaaatcagtttacaggaagcattgcaactttcccacgtaatgaccgaccaaaagctgcagtaattcgcgagaaaggaagtaattctgagcgagagttagcaaatgcaatgtatctggcaggttttgatgtgaaagatgtgcacatgaccgatttaatttcgggacgcgaaactttagaagatattcaatttataggtgctgttggtggattttccaattcggatgttttaggatctgctaaaggttgggctggagcatttttatacaattccaaagcaaaattagccttggaaaatttcatgaagcgtgaagacacactttctgtcgggatttgcaatggctgtcagctgtttatagaattggaattaatccaacctgaacacgaagtccatggaaaaatgaaacataatgattctggaaaacacgaaagcattttcacctcagtaacaattcaacaaaataattcggtaatgctaaaaacgttggcaggaagtacacttggcgtatgggtttcgcatggcgaagggaaatttcatttgcctatgcccgaagaaaattaccatatagtggctaaatatggttacgaaaattacccggcaaaccctaatggatctgattttaacacggcaatgttatgcgatacaacgggacgtcatttggtcatgatgccacacatagaacgttctacctatccttggaactgggcatattatccaaaagatagggttgatgaagtttctccttggatggaagcttttgtgaatgccagagtttggattgagaaacgataaaatttagattttaatttttgaatttttagtaaatgaagcttctgccaactataattcatttctattttgaattacgctattagtatcagactttgtcaatcctttagcgaattgagtaactttagtactcgatgtatttattttggaaattttactagtacccgttttgatattctttaagatataaattgttaccattggatactaaaagtgttttattttagtcaacctattttaggaagagacagtaaccaactcaaactatttcttaaaaagcattttaaaaagactcgcacctattttgcgttgcataccgcttttggtagttggaatgcaggtacttcgtgcaaaactttgtttggcttgagtgattcctaacaatctgtttaacgaaaatgaaaatccaaatttgcccataatgttttgattttaatttattttttttgttttatttaattacgaatacctgatagcacatgttgcaataaacattaaatttattatagtattttttttacctcgtctttgctacttaattttttaattactaaaaaaatcataaaagagtttttgactataatttttagaattgattgtagctaatgctattctatacatgaaagcataagaaaaactactttgtatgcctataaaatttactccttttggtctaaattggccatttagctgtaaagcaaaaaacataatttttgaagaacctaacacaagaaatcagaaacaagaaaaagtgaaaaatataaattattatattaattatgtaaggaataatatttagaactaaactatcttcatacttgagtatttctactatgattaatatttaaaaaaaggaaagtcaataaaatcatcagaaattaaatctgatggaacttttgtaaaagaataatttaatcaattttgacacttaaattaaagggaattttctgtactgcaaaattcccttttcatttgaatatcaaagaagcatttcaactaaaataataaataaaattatggataaggaattaataaatagagttgctggattaagtttgttgttttggattgttaaaatattttcaacaacggttggtgaaactgttgctgattatgcttcggtaaatttgaacttaggtttaactttaactacgatagtaatgggtattgttacaattttagtaatcctctggaattttaaacaaaaaaaatattttccgccatcttattggtccttaattgtgatgatgagcattgaaggaacattaataactgatattttagttgaagtatttactatttctttattgaccttggacattattttcggaatagcaatggcactagtattttatttatggtataagaaagaacaatcattgtctatacattcgataagcaataataatagagaaagattttattggataattgttttaacaacgtttgctttgggcactggtgttggagatacagtatcagaatatttacaagtaggctatctatactctttatttatttttggatccgtttttattctggctggtgtgttatattattttaaaattataaaagatgttttagcattttggattgcttttattgttacaagaccaattggtgcttcgttaggagatttattgatccaagacccaaaggacggcgggttaggaatttcagtagcgataataaatagtattttttttattgtaattatagttgctgtaacctttttaacaatcaatacatctaaaaacaccacattgaaaattaatcccaaatagggagggtttacaatctgcgccttcattaaataccaactttactttagtaaaccagttggttatacttattaaaaacgtcagttcgagtgttttttgtgtagtaaaatgttacaaaacttttcgatacgcttcgcactcgaagtgacgtttattgagaaccgtttctactaaaatttttattgttctgtcaccctgagtgaaattgaaggacgattttctatctaaaatcgcttgaactgacaaaaaattatcatcataaactaattgcaacaaacaggttatactaaatctttttatttaatcgcgtcttagcgtaaacaactttgtgagcacggattacaaatccgcgatatcgttgtgttgacaaatccgcaccatctgggttacaaatccgcgctatcgttgtgttgacaaatccgcaccatctgggtcataaaatttgttccttgtcctaaaacaaaataccatttccctttttgttttatataagtttctgccctaatcactttaaaataaacatctccatttggtgatgaaaaaacaacatcagcaactttggttttaatggctgttgttccattaaaaatccttaacaattcagtgccaggaactgatgctactgatttaaaagttaaaccattttttacaaatttttgaagttcctcgtcaattccatatgatatagttccgtcagcaccaatactaacagaattgtcatttagagacagtgatttgtcaaaaatattagtaatcgcattgattatttttcgatccttgggataatcagttgtattatattttccttcaggaactatttgtgcagtgacttttaaagttgtcaaggcaatgataaaaaaaattagtttcatttttgatattttattgattagattcatttaaattcaattttagttggtttataaattcttttctccttatgcaaattgcaattcccatcaataaccatgtaaaacctcataatccaatgaggatgatacaaacggatgcaatctgaagttttttaattttaaaactatttaaaatttctatgattttagttttaaatatttactttttataattggtaattattaatttttttattttccaatttttaataaaatctaaatcaataaattttaataatgacttgtagtctactttaagaattatgaaaggtttaaaattgtaaaggtggtccaacaactttcattccgtgttcaagagatattttattaccttcttctggcgttggcttaaaatttggatcaccaagaagtctgaaaaaatcttccatttttcctgatggctgaaaaaaaaataacatctttcctgtatcagaaagttgtgcaaaagcatggggaacagttcttggtaaaaaaatagtgtctcccgtttttaaattatgcttttcatcacccacttgaaatagatattcgccctgaacgataaaaaatatttcatcttgattaggatgaatatgtaaagcaggtccacctttttggtttcctatatattcaaaaattgtcaattcaccgttggtatctttttgtgaaactttaatgtcattagggcaatttccaaataacattgttttttcgccaaatctactttcgtttgctttcacaacaaatcccttttttggtctctttggcttttcggctattgcaacttgcccgacaaaaagtgctggaattgctaatgctgttgtcaataaaaatttcttacgttccatatgtcaaatttaaaattagagtttattttttagtttacctattgtagaattttgttgggtaacacagtaatacctatgcgtaatttattatttaaaaatctaaatttctaggctctccgtttaaagctctaccttctaaaattccgtcataatataattttctaacaccatccaaacgtttttttacatctactaaaaaccccatttttttattaaataaatactgttcatgagccaaaggtaaatgtgctgctattttgttattttcaaatttagtgtatgctttttttaatgcctctctaaaatcataatgagcttcaataggaatgtactcattttcttcaatcattctgttaacaagcctgtcatattctgtatcttgattttttctatttttatcatcttcattataatttctaatttttatttgcgtttctctatcctcaaacgtatctacaaaaaacataaaatctttttcatcataactgcttattgaaggtcgttgatcaatcggttgaggtggagttgcaactgcagcatttttttgctcttcggcattttttttccgcaataagttcatataaaattcttctttttcgcctctgatgtttggcaaaagcaatagcgaaccacttcctgttcttgagttatgaaactcataccattcgggcatcatgcagtcttgattatcgtctgtactggtatattcttcttttaattcatcataatcttgggcattatagctttcaaacccaaagtaatcatcgctttgatataaaaaactttgatagagttctatgtcttgcttggtaagcggttctataaaagggcaattgataatgccaccacgccaacattgaaaatcataacatatttcgacaccttctagggtaatttgctcagctcgccagagacattgtaaatcaaaaagttttttgtgaagtataatttctaaatgttggtgggctaggttaatccatttatcgcggcgttcttcaactctgcgactatagtagtctttccataaataagcttggtatttcttgtctatgtacgaatttataaaattttcgacagacctatcagtatagccagctaaaaactgttgcatcgattggttttcactaatttctttgcgccattttatttttaattggttttcatcaagcgtttcattaatcccttcttctgcattatttttagtgttgtcatcatagtgttcgtcttgattattgtggtgctcttccatactactactattttagataaaattaaatttataaattattaaacatttccattgcatcctattgggtttgtttaactaacttgaaatcaaagctaataaaaaaaataacacctgcaagatgtgatttttatcacttcactctttttttgtcattcagacaacggattaatcacacaatataatcaacacaaaaattaatgaaaatattataaactaacacttcacgtaaattcccaacccccaaaagattttaaacccttgagggataagtgtttatcaaaaattaaaatctcttggctctccattcaaaactctaccctctaaaatcatttttttatcttcctcaatcatatttaaaaatggatttcgtttctctttttcatgcaaaccatgtttagttttataaagatatgcttcatgagcttgcggtaatgcttctactattttaccaatacaataatcattatacgattgttcgatggctgctataaaatcggcgttggctttcatcggaatgtattcttgttgtgctatcatctgatcaaaataataacgaataccatagtccaatctactttcagctttagattcaatagtataatatttgtgttttctttgataatcgggtgtttcaaattgggttacaaaactttggataatttcaaaatcataatagttaataaaaggtctatcatctgatggtataataggagtaggggcaggagcaacagatttttttttcgcttctatttcttgttgcgctaatttggaatagaagtgttctttatcacttctaatagtaggcaaatcaagtaagtttattgtacccgttctttcataatgatagtcataccattcagaccgctcttcttcatctacattaggagtaacatggtttttttttaatttatcataaaatataaaaccatccgtattgaggtcatcgagaataatatcatcttgaagcaaaaagtcttgatacatctttatttcctctagcgtaatgggttctataaaagtacaattaaatggatcgccaaaagcgcaattaaagtcatcagatgtttcaacctccggtacttttactaaattagcattccaaaggcattgcaaatccacaatctttttttgcaatatagtactcaaatgatcttgacatttttctagccattcttcttcgatagttttatcattttttgaaaatttattatgagtataccatacatattttttattgatataataacttataaaaccttcaatagcatattctccttttgattttaaataagctatagctgcagtattagcattaatctcctcccgccattgcgatttaagttgtttttcttcaagaatattttcaatatcctcttttgtccaggtattaattctattagttaaatcatcattattttctgaatttgccataacgttcaagaattaaaaattaaaattacgttcttcaccattaagttctcttcctttaagtattcttttggtcaaaaaaactcttacatcaatcatttcatctttcttactttcaaacgaaagtcccatttttttgtgaaacaaatactgttcataagcaataggcaaatgctcggcaattttattcaaataatagcggttgtatcctttttctaatgcttctctaaaatcataatgacttggcacgggaaccaaatcatgcaacccattcaattcttcgagcaattcataataacgcatcgcatcgttatcactacccaagtacaacttgctgtgctgatgatagtttttttgtgctgtttcatcttcaaacgtggttacaaaaaacttgataacttcatcatccaaataattaaaatagggtctaggctccgaagccacatactgttcgggcttttcttttcgttctttctcatgaactaaattcatataaaaatcttctttttcacctctaatatctcccatcaataataatacgcctttgccagttctcgaattatgataatcataccattcgggcatcaagtagctttcttcaatattctgatttccttctttaatttcatcatagttctgccagttatcaaattcaatatcgttgcggtcaagtgcatcttgcattaaaaaatcgtgatacaagtcaatttcttcttctgtaattaaatctaaaaacggacagttaaacacatcattttcccaaatttcaaagtcataacaaatttcaatttctttaaaagttagctgttctgcacgccacaaacactgcaaatcaaacagtttcttttgcaaaatagcttctaactgtttgtgcccttcatcaatccatagttctcgtctagcttcatgaattttttgatacatatcaccatacttatgccagccatattttgaatgaatataggcatcaagaaagtttttttttgcaccctcacgataaggctcaaaaaaaggattgactgcctcattctcgtctagttcattgcgccattgcagtaaaagcactttgcgttcgttaatagaatcaattttatcgtcaaatcgatcctttggagattccatattaccgtccatactttataagttttaaatcaatacaggataaaaataaaaaaaataataatacaaaactcaatcctaaatctaaaattcttaattttcaattcgtaattcgtaattctctcctccgacccttcgagttaattttcaaaataaaaatgcaatttttattttaaaatttgtatcgaacactgggaagcacagcactctttttccagtagttctcgattagcttcgctcagttcggctttgcctcgtgtcaattttatattttaaaaactagcgtttttaaaacagaaaatcactcgaagtgacggtaggaatagcgatttggtttagtagttctaacacttgtattttaaagttcttagaatattatatatcactatttccaccgcgtcacttcgagtgattttttaaaattgcgtttgagcaattttaaaaaaatgtatcgagaactgggaagcacagcactcttttttcagtagttctcgattagcttcgctcagttcggctatgcctggtcataattttgctccactttgttgtacaaaattactcgaattgccgggttgcaaatctgtgcaatgctttgaggaaataaccaagcgataagggttgtgtaatttaaagtaatcaactcaaactatttcttaaaaagcatcttaaaaagactcgcacctattttgcgttgcataccacttttggtagttggaatgccggtgcttcttgcaaaactttgtttggcttgcgaaatccccaacaatctgtttaacgaaaatgaaaatccaaatttgcccataatgtttcgattttaagttttttagtattactttatttaattacaaatccctgatagcgcatgctacaataaatctcaaatttactactaaatctttttattttacatcgtttttgattaagagactttataggcatggattgcaaatctggactatcctttggaggacaaatcaaagttaatatattaaaatttaattttggaactcctagcattttaataaaggagttttttatgggttaattaatagtagatctagccagttttaaaaacctgttaaatgaacttgtacgattggaagttttgattttacaactaaataggaaattttttaataaaaaagtcccaccgaagcaggacttaagattttcatctacggcatatagccttattgtgataagattaaagattagagatttttaacctaaaacaaatgtatagaaaaaataattataaacaaatgcaataaactttaaaatggttaagttttttttgtttagttttaaaacttgttaaaaaatagaatgatatggcaaagattttaggattggatttagggacaaatagtattggttgggcgattgttgataaagatgagaatgaattttctctggtagataaaggagtaagaattttttcagaaggagtaaaatcggagaaaggaattgaaagttcaaaagccgctgagagaactggatatagaagtgcaagaaaaataaagttgagaagaaagcttcgcaagtatgaaactttgaaaattctttccgaaaatggaatgtgtccattatctgttgaagaggttgaagaatggcgtaaatctggttttaaacaatatccattaaatccagagtttctaaaatggttacgtactgacgatgatcaaaatatcaatccttatttttttagagataaagcaagcaaacaaaaagtaacgctttatgaattaggaagagccatctatcatattgctcaaagaagagggtttttgagtaatcgtttagaccaatcggcagatggaataatagagcaacatgctcctaatattgaaagtagaatagaagaagctaaaactataaatgaattggcagttgaagtaaaagattattttgatggattagacatccttgataaaaattcaaaagatttagatgaaggtgaaaagaagttaaaatcattatttaatgctcttgaaaaaatcattaactcaaatgattttgaaaaagcgaaagttgaagtaattgctcgactgaatagaaaagaagaccaaggagcagttaagcaagaaataggagagatttcgcaagccattaaagatggtggttttgaaactttagggcaatattttagtagtttatataacaaaggaaaaataagaaatcattatactgccagagaagagcattacttaaaagagtttgaagtcatttgcgaaaagcaaggaataataggaattaataaggaggaaaaattacctgaaaaacgatacaccaatttagctaaagctttatacagagcaatattttttcaacgtccgttgaaatcacaaaaaggtttgattggaaaatgctctttagaaaaaagtaaaacccgttgcgcaatatcccatccagattttgaggaatacagaatgtggtcctatatcaatactattaaaattaaaactccagaagatgaaaaacttcgctttttaacttcagacgaaaaacaaagattgattcctaaattcttaagaaaaaaagacaattttaattttgaagatttagccaaagaactaataagtaaagacgcaacttttgagttttacaaatctacaaatgcacaagcagtaaattatttatttaattataaagcaaaagatactgtttcgggttgtgtagtttctgcttcattaaaaaatgtatttggcgaggattggaatacaaagcaatggaaatatcaaactaaaaatgctaaaaatgaaacattaagcagaactgttgattataaagacatttggcatttgctttctgtttcaacatctgatatttatttagaggagtatgctaaagagaaattggaattagaccataaacgagctaattcttttagtaaaataagattgaaaaaagattttgctagtttaagtttgaatgctattacaaaaataacaccttatttaaagcaagggttattatattctcatgcagtatttatggctaatatcgagaacattgtggacgagcacatttggaaaaatccacaagagcgtttgtatattcaaaacaaaatagctgaacttattgacaacaatacttttgaaaatatcaaattagaaattatcaacggattaattaaagattgcaaagttgataattgttattattctaaagaagcagaagcaacatacaaatcagatttagaaaaaaaagtagtctatgtttttagaaataatgaaaatcaaaaagctattatagaagagttgtttccaaaatttctagagcaattaaaaaaatacgaatacatcactattaaaagattagacgaaaaagtagttgagtttttaaaaggcgaaaatgaagatggggaaatctattgtagtaatcaaaaccgtttaaataaattataccatccatcagacattgaagtttttaaaaagaagattatcaaagatgagtttggcaatgaaaaagtagttttaggaagtccattaatttcatcgattaaaaacccaatggcaatgcgcgctttgcaccaattgcgcaaagtattgaacactttaatagtggaaggattggttgatgaaaaaactaaagttcatatcgagttagctcgtgagttgaatgatgctaacaaacgtaaagctattcaagattttcaaaatgacaataaaaaagaccgtgaaaaatatagagaagaaatcaagaaactctattttgaagaatgcaaaaaagaaattgaacctaccgaagatgatttgttacgttatcaattatggattgaacaagaccgaaaagagatatatgaagaaggtcgaaacattagtatatgtgatattattggagccaatccaaactatgatattgaacacactattccaagaagcatttcacaagataactccttaatgaataaaacgctttgcagtcaacgttttaatcgtgatgtaaagaaaaataaaatgcctgttgagttaactaaccatgaagaaattaaacttcgtgttgaccattggagaaaagaagccgaaaaaatgacatgggaaatagaacaaattttaaaatcaacgaaagcagcagcaaccaaagaagctaaagacaaaaaaataagaagaagacattatttgactttaaaacgggattatcttaaaggaaaatacgaacgttttatttgggaagaaccaaaagtaggttttaaaaacagtcaaattccagatacagggattattactaaatattctcgtgcttatcttaactcttattttaatagagtagatagtgtaaaaggcggaatggttgccgagtttagaaaaatttggggattgcaaccctcatatattaaagatgacaaaaagtattatgaaattaaagaccgaagtaaacacacccatcatactatagatgctattactatagcttgtatgaccaaggacaaatatgatgttatggcaagtgcttggggtttagaggatgataccgaaaaagaaaactacaaagcggttaaagcattattagagcaatccaaaccgtggaagacatttaccgaagatttgaaaaagttagaggaagaaatattggtttcgcatcatacgcccgataatgtcaagaaacaatctaaaaaaataattagaattagaggaaagaaacaatatgtagccgaagtggaaaatgatgcaacaggtaaaacgattgctaaaaaagatgcacacgggaaagtgatttataagctaaataataaaggagaacggattccgagattacaacaaggtgatactgttcgtggttcgttacatcaggatagtatttatggagcgattaaaaacccattgaatattgaggaaattcgatatgtgattcgcaaggatttggaaagtatcaaagccactgatgttgaaagtattgtagatgaagttgtaaaagaaaaagtaaaagaagctatcgctaataaagtattactaatttcttctaatgcgcaacaaaaaaacaaacttgacggaacggtttggatgaatgaatcaaaaggaatagctattaacaaagtacgattatatgctaactcggttaaaaacccattgcaaattaaagagcatagtgcgttgtcaaaatcaagacacgaacataagcaaaaggtgtatgggcagaatgatgaaaactattgtatggctttatatgagcttgatggaaaacgtgattttgaattaattaataatttcaatttagctaaacttattaaacaaggccaaggatattatcctttaaacaaagaaaaagaagttaaaggcaaaaaagttcaaatacctattgctaaaagcaataatcgagatgtagttttaaagcgtggtcaacaagttgttttttatgataaagatgttgaaaccccaaaagatattactgaaattattgattttaaaggaaggatttatattattgagggattgtcaattcaaagaattaagtcaggtaataatgaatttgaatatggagttattatgttaaggtttcataaagaggctcgaaaggcagatgaaataaaaaaagataattttaaaccggacgggatttttaaattaggagaaaataaaccaacaagaaaaatgaatcaaaatcagttaactgcttttgtagaaggaattgattttaaagttatgccttcgggtaaatttgagaagatataattataattttgtcatttcgccaataaggaaaaattgcataaagtaaattaatatgagattcctcctttgtcggaatgacaagagtactcaaaaagttctttgacataagattttcataattttaaacagccaaaccacaactggaagttatggcatctgccttgcaaaagatgcagtaacttacagttgtggtttgattaaagattagagaacacgatattttgatattggtacacgcagacgagttattagttgtggtttgattaaagattagagaacacgatattagcaaagcaactaaatactttgcctttgtcgttgtggtttgattaaagattagagaacacgatattaaaaagaagttagaagcagaaggttggttagttgtggtttgattaaagattagagaacacgatattacgtctgtcattctcagaccaacctcgagggttgtggtttgattaaagattagagaacacgatattataaaatacaaaataggttgaatgaactatgttgtggtttgattaaagattagagaacacgatattgacacaatagcaactataaccgaatcgatagttgtggtttgattaaagattagagaacacgatattgctattgataaaagagtttgtaaatcataagttgtggtttggttaaagattagagaacacgatattattccgctgtcatcaccagaataagttatagttgtggtttgattaaagattagagaacacgatatttaattgcgtgtcagatatagtattgctgtggttgtggtttgattaaagattagagaacacgatatttatctttaatcaaaggcaatacatcactaagttgtggtttgattaaagattagagaacacgatatttacgggattgatataaataacagcggaactgttgtggtttgattaaagattagagaacacgatattcgtaattcacgagccaatttacacgtactagttgtggtttgattaaagattagagaacacgatattattactctagcaacttggaagcaagtaggcgttgtggtttgattaaagattagagaacacgatatttagtgggtatggttatcttcataccttatagttgtggtttgattaaagattagagaacacgatattaatcaggctataccagcaacaccctcatgggttgtggtttgattaaagattagagaacacgatattataacatcagttgtgttattaaaagctagggttgtggtttgattaaagattagagaacacgatatttttataaaagtcgttaagtaaatctttaccgttggggtttggttaaagattagagaacacgatattcatagaaaaatacaacggaacggaaggcttgttgtggtttgattaaagattagagaacacgatattctgctcacttactaaagaacaattattaaggttgtggtttgattaaagattagagaacacgatattattccatcgctggttcgtttacaagcgatagttgtggtttgattaaagcttagagaacacgatattatgccgaaagcgttgttatcaaaagcagacgttgtggtttgattaaagattagagaacacgatatttaatcctttcgacacaaagtaaatagggtgttgtggtttgattaaagattagagaacacgatattaatagggttggttatcgcagcgatagttgtgttgtggtttgattaaagattagagaacacgatatttaaactcatttcgtgagccttccgcttctggttgtggtttgattaaagattagagaacacgatattcaggaatattgaatttgaaacgataagtttgttgtggtttgattaaagattagagaacacgatatttactgcttcaatccaaaataactcatgcgtgttgtggtttgattaaagattagagaacacgatattttgtaacgattaccgccaaggcaagcgtaagttgtggtttgattaaagattagagaacacgatattgataaagacctcgattggatgaaaggactgttgtggtttgattaaagattagagaacacgatattacaaaagaagtagtttgtgattcagcttatgttgtggtttgattaaagattagagaacacgatatttaattatccaactacctgcacgttcaaacggttgtggtttgattaaagattagagaacacgatattaacaattttcaattagccgtagcgggaacagttgtggtttgattaaagattagagaacacgatattataagaggaataacagcgttacgtcgtgtagttgtggtttgattaaagattagagaacacgatattgcatccaacaatgtcggtgttattgaaatgttgtggtttgattaaagattagagaacacgatattgattcaatttgcacaaaaccgcacggcatagttgtggtttgattaaagattagagaacacgatattagttacgccgttagcttctaatagtcaagcaaataaagggttatatcgtgataaaaaatgcttcttttttgcagtgataaggcaagattgaagcatttttttaattcaaagtgttgtggtttacaaacaccaagtggttattttttagcggagtgtttgtgaatcgaaaaaatagtaaccctcattttctattcaaatatttcaaatttttcgatttgattaaagattagagaacacgatattagttgcgctgttagcttctaataatcaagagaataaagtaaaatatcgtataaaaaaaatgcttcttttttgcagtgataaggcaagattgaagcatttttttaattcaaaacaattctaattgtgtaggttgtggtgcttttggcacttcggctttaccccaaaagttaaggatattgccaaattgtttatcggttattctaagtacgcttactttacctaagggcggcaataatcggtggattcgtttttcgtgcacatcggcactttcgctactggcacaatgacgcacgtaaacagaatattgcatcatactgaaaccatctttaagcaagttgtttctaaatccagacgcattctttttgtctttctttgtttcggtcggtaaatcaaaaaatacaaatagccacataattcggtatccgtttagctccataattttggatattttattttctttctttcgcctgtataacattgttgtaacgaactagctgttttttgaagagcaaccatcaaaggacttttttcctctttgaagtaaacagttcgggttagtatttgcaaaagctccgatttaagaaccgtgttcaattcctgttcgtcatagttttgcataagttcaaaaaccttttcatccacaatagggcgaaaaggttccataatatcatcagccaaagcaaaagcattatatttacttttatgatgaatgcctagtgtgttcaataatccacttcctgataaagctcttgccgttgccgcacgaagaatagcataaccataatttaaaaagttattgggataatcgccaaaccgttctcgtttaaactttacttcaaaaaaagatttccaatactgactggcagcaacgccttccatattactgctgtcaccactcaaaactttgcttgctaaaaattcaaaactatttttacttttagttattttttctaacaaaattccttgattagtaattttctcaataatggtttgttgccacaattgtttttttaatggtatgctagtctcaatttggtttttaaaaatttcttgttgaatatgatgactgtttagatttaaaaacattccgtttggcaaatgatttgaattgcaaacaatcacagaagtattattttcaataagtaaattcattgcaggaatacttagataaatctctggatggtcaataaccaaaaaaccaatgtcttcaataggaatgatactctctctaatatctgatttaataactaactgtaaatttttgcctgttaatgaagctttgttttcgagtaaaattgtcttttttagcataattttattattagaaatatctaaattactaaaaatcaataagtaaatgatttaaaggaaatttttttatttcaataataattacaaatattaaaatgttattgagatttatttatagaatcacccgcagtgttggttgaattattttacggttattagttctaacgtttagttgtagatggagacaagtagcgtactgtttacaaaaataaattcttgtaatcctcaaacttaataataatctgacacacaaaaaaatattttccctttctgtaattcaaaaagaagcatttagctggttgttctttaaaaagttgttaccaagaaacataaaaaaaatcccaagtgtttttttaacacttgagatctcagttcataattgtactacggtataactaactccgttaataatattatgcaataacaacagtacctaggtattggctggttgcgtacagcttatcgttactagcaacaaaagtagcccaaacgtgaacgctacgtcctgttaaaaacgcagggactacaacgttggctgtaccttggttacgcataccagcatctaacgattgcactaccgttttggtagtttcttcataaagtactattaccagtttgtcggtggttttggcatcaccttgtgcgctgtt

SEQ ID NO: 3126 - DNA, 17088 bp, synthetic construct
  source 1..17088: mol_type = other DNA
  misc_feature 1..17088: note = Synthetic
ttcaatacctttaaaagcattgtcgtcaatatctacatctttcatcatttttccagcaccaggaatcattcccatcaaatctttcatgttgcccatttttttgatttgttgaatttgcttcaagaaatcatcaaaaccaaattgatcttttgcaattttcttctgaattttacgggcttcttcttcatcatattgttcctgagcacgttcaaccaaagagataacatcacccattcccaaaattctatcagccatacgatctggatggaaaacatcaattgcttccattttttcgccagtaccaataaatttaataggtttatttacaaccgatttaatagataaagcagctccaccacgggtatcaccatctaattttgttagtacaacaccatcaaaatttaaaatatcattaaaagcttttgccgtatttacagcatcttgcccagtcatagaatccactacaaacaacgtttcttgcggatttatagctttatgaatattcgaaatttcagtcatcatagcttcatcaacagccaaacgaccagcagtatctataattactacatttttacccgttgcatttgcatgtttaatggcgtttaatgaaatttcaacaggatttttattttcaacttcagcataaacttcaacaccaatttgttctccaacaacttgtaattgatttatcgcagcaggtctgtaaacatcacaaccaaccaataaaacatttttatttttcttggtttttaagtagttagctaattttcctgagaaagtagttttaccagaaccttgtaaaccagacattaaaataacagttggtttgcctgcaaggttaatacctacagtttctccacccatcaactctgtcaattcatcttttacaattttaaccattaattggccagggtttaacgtggttaatacgtcttgaccaatggctttttctttaacggttgttgtaaaatttttggctattttaaagttaacatcggcatctaataaagctctacgaacttcttttaatgtttctgcaacgtttacttctgtaatttttccatgtccttttagtacatgaaaggctttatctaatttatcacttaaattattaaacatatgtctgcttcaatttttagaattgcaaatataataaaaactgcttaattctaaagttgaaaattagattgatatctggtttaaatttgtttagaactttataaaaaatacagcagcctaatgtgataaatattaccttttgatttgaaaaaatatctaacatttgcatagaatttaaaaaatgcaatatgagtaaaattgtaataattggcggcttgtctgctggaccatcagcagcggctaaagctagaagagaagatgaaaatgctgaaataatactttttgaaaaaggagctaacataagttatgcaacttgtggtatgccatatgctttttcgggtgtaattgaaaatagaagtaatttaattgttgttaaacctgaattactgcaaaataggtttaatattgatgttcgtttaaacgaagaaatcataaaaattgataccgagaataaaatagttttttctgacaaaggcgactataattacgataaattggtttttgcaacaggtgcaaaatcggttgtgccacctataaaaaatattgaaaaagcaaccaattggtctacatgccgatctatggttgattttgataaaattaccaaagaaggtttggcttcaacagctaaacatattacggtaattggagctggtttaattggtgttgaagttgctgaaaatttaagagaagttggtaaagaagtaactttaattgaaggcgataaacaaattttaaatatgtggcagcaaaaatttggaaattttgctgaaactattttaaaagataagggtattgaagttattacttcgggcttggtttcagaatttgaattggatgataattggaaaataaatggtgtaaaaattagagacggcaaaaccgtaaaaaccgattttgttattttaagtgttggtataaagccaaatacagatttattgattgaaaatggtgcagcacatattggaaatggcgcattgattgtaaacgagttgatggaaacatctttaaaagatgtctatgctgctggtgataatgtggcggttaaaaatattcaaaccaataattacgactattttccactggggacacactctaataaagaggggagagcagcaggagcaaatgctgttggtggtgcaatttcttttaaaggtgcgtataaaactgcaattgtaaaggtttttgattatactttggcaagaacaggtttaaatccaactgctttaaataaattagagattccttttaaaactgtattaacggttgcgggtgcaacaccaagttattatcctggacaaaaagatttaattaccgaaatttattatcatactgaaacgaatgaaattttaggtgcagaattatttggagaatatggcgttgataaacgtgtagatgttttaagtacagcaatttatgcaaaattaaaaatcacagatttatcgcagttagatttggcttatgcaccaccgtattcacctgcaaaagatccggttgtagttacaggttttgttgctgaaaatatattgaacaatacaagtgaacaaatttctgttgaagaaatggcagtaaaattagaaaataatgaggtttctaactatttgttaattgatgccagaactgccgatgaatttaaaaaaggaaccattccttcagcagttaacttgcctttagatgaaattagaaatcatatcgattttataaaaagtcaacaaaaaccaatcattattttctgtcagaaaggattgagaggttatttggctgaattgattttaagacacaacaacatggaaaatatagtaaatgttgctggtggatttaaattatggcaaatgtttagcgaaaatatagaaattcctgaaactgttgcagttaaataaaattaaacataagtaacaaaaaagccttttaaatttttttaaaaggcttttttgtttagtaaaatctaaaatctaaaatctaaaatctaaaatctaaaatctaaaatctaaaatctaaaatctaaaatctaaaatctaaaatctaaaatctaaaatctaaaatctcactacttactgccagatgcaacaaattttattgaagttgtatttacgcaataacgttcgcctgtagtttctttagggccatcattaaaaatatgtcctaaatgtccaccacacgaggcgcaaataatttcagttctaaccataccatgacttttatctaaaacatattcaaccgtaccgtctatagcatcatcaaaagatggccaaccacaatgagattcaaatttactacccgattcaaataattgtaaatcacaggcagcacaatggtaagttcctttttcaaaatgtgacgtataaccaccttcactaggtgcgtcagttcctttttgtcgtaaaacccaatattgttgcggagttaaaacttgtttccattcttcttctgtttttatcacttttttagtcatagtttttgtttttgaagcttgtgaataaccaattgttgtaattatatttaaaaataaaaatattatgagtgcttttttcatgtttttagttattatttattaattgttaaaatcttaaaaatataaagcatcttataacataagacgtattcaatttaaacaccttacaatgttttattattatgaaatttttttttgcaatgtattaattatagttatctttaaagatagaatttgtaatattgtaccaaatttaaacctttaaaaaaatgaaaagaattgttgttttagtaattgttagtttaatgatatttagttgtagtacagtgccaattacggggcgtaaacgtataaatattgtaagtgatgctgaaattttaccttcaagttttgcgcaatatgaaggttttttaaaggaaaacaaaatttcaacaaatgctaaatcaagtgctcaaattaaaaatgtaggcttaagaatttctaaagctgttgaccgatttatgcgtgcaaataaaatggtaaaagaagcagatgcttaccgttgggaatttaatttaatagatgatgcaacagtaaatgcttggtgtttacctggcggaaaagtagttttttatacaggaattttgccaatttgtgccaatgaagatggtgttgcagctgtaatgggtcatgaagttgcacatgcttttgcaaaacacggtcaggaacgtatgacatcttcttatggacaacaattaggtggcgttgcagttgcaattggaacctcaggacaaactcaagaatctcaaatgttatggaatactatttatggtgttggctctcaagtaggcatgttggcttacagtagaacacatgaaactgaagccgataaattagggatggtttttatgattatggctggttataatccagaagaagccattcaggtttgggttcgtatgagccaaaaagcaggaggaaatgcaccaccagaatttttaagtacacacccttcaaacgaaactcgaatttcaacgttaaaggcatatttgccaacagctatggcaatggctaaaaagtacaacgtagatgtaaaataaagcaaactcaaattttaaaaaaactaggtcttaaagtaaagccctagtttttttttgaaaaattcaatcatatgaaattttatcaaaaagaaattcaaatttcaccaaaaaaaagaggattttatttaattacaaatgaaattttaaattcatttcctgaaatcaatcaaattcaaataggtcagttacaggtttttatcaaacacacctcggcaagtttaaccattaatgaaaacgcagattcgtctgttagagtcgattttgaaagtcatttcaataaaatggttcccgaaaatatgcactattttacccatacttatgaaggtgcagatgatatgcctgcgcatattaaagcgtcacttttaggcaattcagttacaattcctataaccaaaggcagtttaaatatgggcatttggcaaggcatttatttatgcgaacacagagattttggaggcgcaagaaatttggttttaacagcctttggaaactaaaaactttcaaactttcaaccaatataacttgggtgctacccacaaggggtcgggctattcgctatatctttttttaaattccactgcgttgcatttaaaaaaaggatgtcgctgctatccctagcacttaaaaacaggtatcgcactattttatttgtaaaaaacaattgtaaactatttagatggaaaaaaatagttttacgtttaaatacttcgtaaaaaatccagatacctgctttaagtttagccaattacagccaattttttatttctataaattttaaatttcaacaaagcatagcttaataagacaaaaattgcagataaaattagcaagcctttaacttcaggccaaacatcacttaacgtagcttcatacatcagtatttttcgcaatcctattaaaaaatgagttgaaggaacactgtctgcaagtgcaacaatataaggtggcatttgacttaaaggccaagtaaaaccactaattataaagctaggtgttgcaacaaccatcaatacttcagttgcctttaactgactaggaatggcgatacttgccaaaataccaagaaatgttatcgccaaaacataagcaatcattagtaccaatattgcccaaatatttgcattaaaaggaacttcaaacattggaaacataaggcgtaataaaaatataataacagttcctataatccaaaagggtagggctttaacaaacattgcattccaaacatttttagcttttggcataaacgttgtataaaaagttttttcttcaaactctctggcaaaactcaaagcaagtgctaataaaaatacttgttgaagaatgattcccaatacacctggccataaaaaggacatataatttccagagggattgaaaaagcgattgtaactaactccaaatgcctcgtattgcgattgagccgtaactgcaggaatgcctgttttttttagaccttcaatttctatccccgcatttaatgttcctaaaatttgctgaatggcttttactccataattggctgttaaaacattggaagtatttatatctataccaatttctggatgccttttttgaatcaattgagcttcaaatcgttcaggaatagtaataattgcagcatattctttactgataatttgagcttttaaatcgttttgatttgtcaataaaacagcatcaagaacttcattgtcatctatcatatctaacaattgattacttaatggcgtttgatctaaatcaataaccaaaacaggtaaattagttgcttttccttttttatatacagcgccaagtaaaacaccataaagtagcggagcaccaataaatattgcaattactacagagttggtttttaatagtgaaaattctctttttaataataagatccaatttttcatagttcgtttttattgtaataaaacagtcatatttgcatataatttacctgctttttcttggtctgtaggtattaattttaactcgtaagttgcttcgccaagttggtaatcaggaaaagcagttgttatatctgcataatgtgttaattgtttaatacttataagtttaccttcaaagttggtgtttgtaaaaggtgagttaacagtaaaagtttggccaataacataattagcaattttactttcaggaattgtaaacctaaagtaagtgctatttaataaataaccagtaataattccatatccaggcaaggcaagttctccattttttaaggcaattgtttcaattgtcatattttgaggtgcaataacaaaacgttcgttataagctacattggcttcttgtaaagcacctttagcacgctcgtaagctcccaaagccattcttattttttcattcctaacacctttttttacttcgttgtactttgccaaaacaccttcatattgcgcttttgcacccatatatgtcatataaatttcatcgtgtttttgattagataccaagctgtctaaaaacatagcattgaccctgttatatgatttttcggcaaacgtatattgttctgtaaccgcatctagttttgctgaaacttgtgcaagctgatcgtttgttgcaccatttaaagccatttcgtattgtgcttttgcagattcaacagcaccttcggcctgttcttttttagcttcaatttcaggaacaataagttgtgccaaggtgtctcctttttttacaattgcaccttcttcaatataggtttctaaaattctaccagggtatttgctcgcaatgttaataacatctcttttagcttttccttgtaaaccttctatttttttgttagaacacgaagttattaaaacacttattgataaaaatataattagatttttcattttatttttgattgatgatttataatttttgaacttgtaagcttcctgttgcttttagcaattctaaagcactatttctttgtgcccaaacagtatcgtaatagtctaatgttgtgctagtatattctgcttgtgactctaaaaaatcagacaaatggatcaaaccattttggtattctttgtaactgatgtctagcgatttatttgctgtttgcatctgtttgtcttttaattttgtttgagcagtaagattgttaaattgtataagacaatttttataatttagttctaacaaatcatttacttcttcttttttatttctggttttttctaaatcaatttttatttgatcacgttttccttttgtttccaaaccatcaaataattcccatttcataccaagtcctaaagaatttaaggggtaaagactcaactcgttaacacccaaatcgcccaagttaccattgtgtatcccagcatattggtgagatgcaaatgcttgtattttaggtaagtaaccatttatttcagatttgtattggtattctgtagctttagtggcttcatctaatgcagccaattctggacggtttaaataactgttacctaaatcgtttaccaatcttggagttaactcaacttttattgtcgaaagcctagaaacatcaatacctgttagttgatgtaattttaatagtagtagttctttgccaccatcatattccaattgttttgatgccagttttaattgcgctatttcaactttttgaaattcgtgttgtgttattaagccttgttcaagggctttttttgcaacaatagtctctttttctaatcttttagtttctatttcaagcagtcttttagtttgttctaaaagagccagcttgtcgtaataactggcaacttctgtaattaaattagcctcttctaatttgtacatttgctcttgcgcttcaattttatgctccatagcctttgataagtagggcgcttttaaaccggtaaataaagtccatttagcagttaaaccgcccatccaaacattgcctttaaaatcaatattttgatttaaagcaggaatatctatacctgttggaggtagttcaatagctgggattccaggaattagtggtggtaatgtaaaacttggtattgtaacaggaaacacgtctgtttctagatttaatttacctgaagtgtaagcataagaaccacccaactctaaagttggtatataggtatgtttgatactttttttaacttcttcgcttttttctatatccagtaaattattttttaatgatttattataatctaatgctgcatatagtactttttgcaaatcaagatcattgtttgatgtttgtgcaaaagtgtaagcagcgttaaaaataaagaacaaacaaaaacttattgtaattaggaatcttcttgtcatatttaaaaacatttatttttaattaatttatttttatagcatcccaacaagctttagaatactgttctatttttatattatccaatttaacttgttcatattttagcattctaaccaaagccgttattggactatgtgttagggtaattaatgctaaattaggtaagggttttattgtttttttatttttagcatcttcaaaaaaacgttgtatgggtgctaaaaaaatattgctattttgatcgtatttacttgttatatagggcgaataggtaaactgagacaggaattctggttttctgggatctttaatgtaaaaatttaaaatggctgtccaaatatttataaaattttgataggtagaaattactgctgaaagatttttagaaataatatcatttatttctttgccaatttcttcatacaattctacaatcatttcttctttatttgtaaaataaatataaatagtaccagttgcaatcttagcttcatttgcaatcattttaatactggtaccgtgaaatccattagtggtaatagttgttaatgcagcatttaaaattacaacacgcttgtcctttacttttcctcgggttaccaacggactttttgattggtttttttccatacgcaaaagtaaaattattttcttaatgaacaaacgttcattaagaaaataaatattataaatgtattacaattaaactttaataaatattatagctaaaataaaaaaacagtttgaatttaaagtctaagttgataagttatatgtaagtgtattttaaattaaagcataaaagttacatataaaaaaagtcccaccgaagcaggacttaagactttcatctacgtcatatagccttattgtgataagattaaagattagaataattttttcactagtcaaatatatagaatattttcaataaaaacttacggaaaaccgtaattataaataaattaatgtcactatatttattttttttaaaaataagtagcattatcttatttgagatttataaaaattgctaaatacacgtaacagatgtcaaaaattttaggattagatttaggaaccaactctattggttgggcgattgttgaaaaagaagatgaacagtttactttaattgataaaggagttcggattttttcagaaggagtgaaaatagaaaaaggaattgaaagttcacgtgcagcagagcgaactggatatagaagtgcgaggaagattaaatatcgaagaaagttgagaaaatatgaaactttaaaagtactttctctaaatggaatgtgtcctttatcaatagaagaagtaaatagctggaagaaatcctgttttaaagaatatcccctaaatcctgaatttatagattggttacgaactagtgatgatgaaaatattaatccctatttttttagagataaggcaagtaaacgaaaagttactttatatgaacttggaagagctttgtaccatattgctcaaagacgaggttttttaagtaatagattagatcaatcagcggaaggtgtttatgaagagcataatcctcaaattcaaggattaattgaggatttggattcaacagatttaattttgagtgaattaaaggattattttattgatattgggattttagatgaatctgaaaaaagcggttttaaaaaagatctagatgaaggagagaaaaaactgaagacactttataattctttagttactataacaaaaaagaaagaaattgattttgtaaaatgtaaagaagaactaattactcgcttaaataaaaaagatgagttaggaaaagtaaaaggaggtataaaagatattagtcaagcaatgcttgatggtaattataaaactctaggacaatatttttttagtttatatgataaaggaaaaattagaagtcaatatacttctagagaagaacactatctagaggaatttataacaatatgtaaagttcaaggcattgatggtattgatgaaaatgaaaaattaccagaaaagaaatttacaggtttagctaaagaattgtataaagcaattttttttcaaagacctttaaagtcacaaaagggtttaatagggaagtgttcctttgaaaagaataagtcacgttgttcaatatctcatccaaattttgaggagtatagaatgtggacatacataaatacaataaaaattggaaaacagagtgataaaattcttcgttttcttacgcaagaggaaaaattaaaactagttccaaaattttttagaaagaatgattttaattttgaggttttagcaaaagaattaattgaaaaaggagcaagttttggtttttataaatcatcaaataaaaatgagtttcactatttattcaactataaaccatctgatactgttgccgcttgtcaagtttcagcctctttaaaaaatgctgttggtgaagactggaaaacaaaaatatttacatataaaacatttaattcaaaaggtgttgaagttacaagaacagttgattataacgacttatggcatttgctatcagtatcaacttcagatgtttatctgtatgagtatgccaaaattaaattagaattagatgataaaaatgcaaaatcattcagtaaaattaagttaaagaaagatttttcaagcttaagtttgagtgcaattactaagattcttccatatctaaaggaaggacttttgtattcacacgcagtttttatggcaaatattaaaaatattgttgatgataaaatttggaatgaccttgatcaaagaaactacattcaaactaaaatagcggaaattgtagaaaacaacacctttgataaaaatcaattagagataattaatggtttaattaaagattgcaaagttaatgatgaatattattctacagaagcagaaacaatttataagaatgatttattaaaaaagttagtttcattttttaaaaatcataaaattgaagatgagaatgaacaattgaaaattatcaataatttatttcaaatttttattggtcagctaaagttacatgaatacattaaaataaaacgattagacgaaaaagttttagaatttcttcaaggtaaaaatgaagatggagaggttttttgtagtaatccaaaacatttaaaaaaattatatcatccttcagatatagaagttttcaaaaagaaaatgataaaaaatgaattaggaaatgaaaaagttgttttaggaagtccattaacatcatctattaaaaacccaatggcaatgcgagcgttacatcaattaagaaaagtattaaatgctcttattttggaaggtcaaatagatgaaaaaactcgaattcatatagaaatggctagagagttaaacgatgccaacaaaagaaaaggaattcaggattatcaaaatgaaaataaaaagttcagagaagaagctattaaagagattaagaagttatattttgaagaatgtaaaaaagaagtagtacctaccgaagatgatattttaagatatcaactttggattgagcaaaataaatgtgagatttatgagcaaggtaaaaacataagtatttgtgatattattggtagtaatccagcttatgatattgagcatacaattccaagaagtatttcacaagacaattctcaaatgaataaaacactttgtagtcagcggtttaatagagaagtgaaaaaacaaaaaatgccaatagagttaaataatcatatagaaatagttccaagaattactcattggaaagtagcagctgataaattagaaagtgagattgattttttgactaggacaataaaatcggcagcaacaaaagaagcaaaagataaaaaaataagaagaagacattatttatcattaaaacgtgactatttgaaaggtaaatatgaaagatttatttgggaagaacccagagttggcttcaaaaatagtcaattacctgatactggaattatcacaaaatatgcacaggcttttttaaaatcgtattttaaaagagttgaaagtgtgaaaggcggaatggttgctgagtttagaaaacaatggggaattcaagaatcatatattgatgaaaacgggtttaaacattacaagaagaaagacagaagtaaccacacccatcatacaatagatgctattacaatcgcatgtatgaccaaagataaatatgatgttttagctcacgcttggaaattggaagatgaacagaacaaaaaagaggctagagcaataattgaacaagccaaaccttggaaaacttttaaagaagatttgttgaaaattgaagaagagattttggtttcacattatacaccagacaacgttaaaaaacagtctaaaaagattattagagtacgaggtaaaaagcaatttgtagcagaaatagtgcgtgatgttaatgggaaggctattcctcaaaaagatataaacgggaaaattatttataaactaaatgataaaggagaaaaaatcccaagatatcaagaaggtgataccatacgaggctcattgcatcaagacagtatttatggagcaattaaagaccctttaaatattaatgaaattcggtatgttattaggaaagatttagaaagtttaaaagcgaatgatattgaaagtattgttgatgaaattgttaagcaaaaagtaaaagaagcgattgagaataaggtgcttatactttctacaaatgcccaacaaaaaaataagtttgcagaaaacaaaaaagtatggatgaatgaaaataagcaagttccaataaacaaagttagaatttatgcgaattcagtaaaaaatccattagaaattaaagagcatagtgctttgtcaaaatcaaagcatgaacataagcaaatagtgtatgggcaaaatgatgagaattatgccatggcaatttatgaattagatggtaaaagagagtttgaattaattaataatttcaacttggcaaaacttataaaacaaggagaagggttttatcctttaactaaagagaaagaagttaaaggtaaaaaagctttatatccgattgcaaaaagtaataaaagagatttagtcttaaaaaggggccaacaagtgattttttatgataaatcaatcgaaaaaccaaaggatttaaatgaaataacagactattataacagaatttatataatcgaaggtttgtctattcaaagaattgttagaccgtcagggaaaatagatgagtatggggttattcaatttagaaactttaaagaagctagaaaagcagatgacattaaaaaagataaatttaagatagatggagtttttaaattgggagagaataaacctttacgaaaaatgaatcataatcaatttagtgcttttgttgaagggatcgattttaaagtgttggcatctggtaaaattgaaaaaataatttaaaattgtcatttcgaacgatagagagaaatcacataaagcagttaaagtaagttgctatgattgaatttaaagaaggctttcatacctattacgtttatattataaccaataaataccgttcaacatattatgttggtatgacaaatgatttaaaagttagactaaaacaacatatcgaaaatattaaaaacggaaacaaaacttttgcatcaaaatataatttacaatatttggtgtattatgaaaaattcacttgggtacaagaagctatcttaagagaaaaagaaataaaaagttggaggcgtgataaaaaattaagtttgatacgttcttataataatacattttcgttcttaaatgaaaaatttgatgtgattcctcctttgtcggaatgacaagaaagaatttaaggttattgtgattatttatttaaaaattaaaagtataatttgtcatttcgaacgatagagagaaatcacataaagcgcaatgtttgatgtgattcctccgttgtcggaatgacaagtattaataaagttctttgacataaaactaaattaatcaaccaaataaacaaaatcgagcgaagcgagattttgttgtggtttgattaaagattagaaaaaacgatattatgcaggatttcttgcagtaccaaaaatatgttgtggtttgattaaagattagaaaaaacgatatttttaaaaggaaaagaaaataaatgtattttgttgtggtttgattaaagattagaaaaaacgatattttgaatcaactgatgtttctgcaggattttgttgtggtttgattaaagattagaaaaaacgatattctttttatttttaaacggccagaactattgttgtggtttgattaaagattagaaaaaacgatatttgtaacaatggtaatcaatggggacgctatgttgtggtttgattaaagattagaaaaaacgatattagttgctttgttagcttctaataatcaaagaattgaaatgaaatatcgtaaataaaaatgctccttttttgtactgtttaggcaagattggggcattttttggtttctaagtggtttacaaacacaccttcattatttgattttgtgtgtttgtgaatcgaaaaaaagtaaaattatgtttaaaaaataagttcattcattttttttcgatgtgattaaagattagaaaaaacgatattagttgctttgttagcttctaataatcaaataattgaaatgaaatatcgtaaataaaaatgctccttttttgtactgtttaggcaagattggggcattttttggtttctaagtggtttacaaacacaccttcattatttgattttgtgtgtttgtgaatcgaaaaaaagtaaaattatgtttaaaaaataagttcattcattttttttcgatgtgattaaagattagaaaaaacgatattagttgctttgttagcttctaataatcaaataattgaaatgaaatatcgtaaataaaaatgctccttttttgtactgtttaggcaagattggggcattttttggtttctaagtggtttacaaacacaccttcattatttgattttgtgtgtttgtgaatcgaaaaaaagtaaaattatgtttaaaaaataagttcattcattttttttcgatgtgattaaagattagaaaaaacgatattagttgctttgttagcttctaataatcaaataattgaaatgaaatatcgtaaataaaaatgctccttttttgtactgtttaggcaagattggggcattttttggtttgtaaaatagtttaatgcacaccttcattatttgattttgtgtgtttgtgaatcgaaaaaaagtaaaattatgtttaaaaaataagttcattcattttttttcgatgtgattaaagattagaaaaaacgatattagttgctttgttagcttctaataatcaaataattgaaatgaaatatcgtaaataaaaatgctccttttttgtactgtttaggcaagattggggcattttttggtttctaagtggtttacaaacacaccttcattatttgattttgtgtgtttgtgaatcgaaaaaaagtaaaattatgtttaaaaaataagttcattcattttttttcgatgtgattaaagattagaaaaaacgatattagttgctttgttagcttctaataatcaaataattgaaatgaaatatcgtaaataaaaatgctccttttttgtactgtttaggcaagattggggcattttttggtttctaagtggtttacaaacacaccttcattatttgattttgtgtgtttgtgaatcgaaaaaaagtaaaattatgtttaaaaaataagttcattcattttttttcgatgtgattaaagattagaaaaaacgatattagttgctttgttagcttctaataatcaaataattgaaatgaaatatcgtaaataaaaatgctccttttttgtactgtttaggcaagattggggcattttttggtttctaagtggtttacaaacacaccttcattatttgattttgtgtgtttgtgaatcgaaaaaaagtaaaattatgtttaaaaaataagttcattcattttttttcgatgtgattgactacgtcgaatctttgatttcctcctttgtcggaatgacaataaagaatttaaggttattgtgattgttcgtttcgaaataaaataaaaagt

SEQ ID NO: 3127 - DNA, 16573 bp, synthetic construct
  source 1..16573: mol_type = other DNA
  misc_feature 1..16573: note = Synthetic
ttaatttttggggttggcaattaattattgtcgctgcagccatatcattgccattgggttatagttcttcaaaagaatatgccgaattagaatggccaatagatattgcaatagcattaatttgggttgtttttggtgtcaatatgattggaaccattttaaaacgtagagagcgccatttgtatgttgcgatttggttttacttggcaacattcgtaacagttgcggttttacatattttcaatagtttatcattgccggtttctggtatgaaaagttattctgtttatgcaggagttcaagacgctttagtacaatggtggtatggtcataatgcggttgcgtttttcttgacaacacctttcttaggattaatgtattactttgttccaaaagcggcgaatcgtccggtatattcttatagattatcaattgttcacttttggtcgttgatttttatttatatctgggctggaccgcaccatttattatattcagcattgcctaactgggcacaaaatttaggagttgctttttctattatgttgattgcgccatcttggggtggtatgataaacggacttttaacgttgagaggagtttgggataaagtacgtgtagagccagttttgaaattctttgttgtggcgattacaggttacggaatggctacttttgaaggcccgatgttatcgctgaaaaatgtgaatgctatagcgcattatacggactggattattgcccacgttcacgtaggtgcattagcctggaatggatttatggcttttggtatgatatattggttggttcctagaatgaccaaaagtagtttgtactcccttaagttagctaattttcacttttggattggtactttagggattatattatatacgattccaatgtatgttgcaggttttttgcaagcatctatgtggaaacagtttaacccagacggaactttaacctatggtaacttccttgaaacagtaactcaaatcatgccaatgtattggatgagagctattggtgggactctttacttaattgggatgttcactttagtttataatattattcaaacagtaagagcaggttctaaaattgaagacgaattagcagaagctccagaattattgaaaattagtgcaggaagagtaaaaggggaggaatttcacccttggttagaaagaaaaccgattcagttaaccattttagcaacagtcgctattttaattggtggggttatccaaattgtaccaacgattatggtaaaatcaaatatcccgacaattgcaagtgtaaaaccctattctccattagaattagaaggtcgcgatttatacattcgtgaaggttgtgtgggttgtcactcgcagtctgttcgtccttttcgtagtgaagtagaacgttatggaccacaatctaaagcaggggaattcgtgtatgatcatccattcctttggggttcaaaacgtacgggcccggatttattaagagttggagcaaaatacaatgacaattggcattttaaccacttttggaatcctcaaagtatatcagcaggttcaattatgccaggttacaaatggttgtttgccaataaaccaatggatatttctttaactcaaaagaaaatgcaagccatggtaacacttggtgttccttatacagaagctcaggttgcaagtggtttagatgatttaagaaaacaagctattgaaattgaagaaagcttgaaaaacgatcctgactttgtaaaaagctatgatgaaagcaagaaaaaagcggaagcaagaggagaaaaatttgttccaatgaacgaaagagaaattgtagcgatgattgcttatatgcaaagacttggaaccgatattaaagtaaaagatactgctaaaaaataaaagtcatgttcgaacaaataaaacacaatatggaaactattgaaggtgtggcgatatatcccatcttatcattattaatttttttcgtcttttttgtaggtctcggtttatgggtattctcctataagaaagaaacgattaatgaattgagtcaaattccattgagagacaattaaatagtataattttttaaaattcagaaaatgaaaaaattaattccagcatacgttagagtaccagttattttctttgctgtatttatggcaatggaatattttattgactcaggagatagacctgcttttataaagtttcctatggtttctatcttcttattcgtatttctttttttactgatagcgatagaaattacgttgagtgcagtcgatactattacatacagtttattgacagaagaacagaaattaaagttggattcagcaaatgagttaggcttcaaggaaagtgaatggtacaaaaatctgatgaaaagggtgactaaatccgagtcattagagcatgaagatcaattgttattggaacatgattatgacggcatcaaagagttagataataatttaccgacatggtgggtgtatttattttatgcttgtatcgtttttggggttgtttatatggtgcaatatgaagtattaggggctgataatcaggaaatggaacttaaaaaagaagttgctcaagccaaaattgatattgcggaatatatgaaaacggctccagatttaatggatgaaaaaacagttaccttgtcaatagaacctgcggatttagctgaagggaaagaaattttcacaacgaattgtgctgcctgtcacagagcagacggaggtgggcaaattggaccaaacttaacggacgatcaatggattttaggtggtggcataaaaaacatattccatactttggtaaatggcggtagggatggaaaaggaatgattgcttggaaaggaacgctgaaaccaaaagaaatgcaaaaagtggccagttacattatatcattgaagggaagtaatcctgtagatccaaaagcaccggaaggggaagtatgggtggatgaaaatgtaccggtagcggttaaataaaaagtaaaaacacgaattttatttagcttttaaattttttataaaaatgaataaaatttgtgtttaaaataaaaaaaatgtcaaaattaccagacgaagcttttagagataccatcggaacgattgatgaagaaggaaacagaaaatttatttttccaaaaaagccttcaggaaagtttcatgattatagaaaatgggtcagttattttttgttgattgttcttgttgctaatccctttataaagataaatggcaatcagtttatgatgttcaatatattggaaagaagatttaatattttcggatttccattttggccacaagatatttatcttttcgttctttttatgattattggcgtcgttttcgtcatcctttttacggtaatttttggacgtatattttgcggatggatttgtccgcagaccatctttttagaaatggttttccgaagaattgaatattggattgaaggcgatcgtggtgctcagatccgattggaaaaacaagaatgggatgcagagaaaatcaggaaaaaaggatttaagtggtctatatttctgatcatttctttttttattgccaatgtctttcttgcctatcttatcagtagcgataagttgtttttaatgattgaagaaggaccggaaaaccatgtaagcaccttggtttctttattgatttttacgggagttttctattttatttttgcatggtttagagaacaggtttgtattattgcctgcccttacggaagattgcaaggcgttttattagacgataaatcgataaatgtagcctatgattttgttcgaggtgaaaaagaagttggtagggctaaatttaataaacaggaggatagagccgcaacaggaaaaggagattgtattgattgtaaacaatgtgtgaacgtttgtccaaccggaattgatattcggaacgggacgcaaatggaatgtattaattgtaccgcttgtattgatgagtgcgatactattatggacaatgtgggattacctagaggactgattcgctatgcttcggaagatgaaattgagaaaaaagtcaagttcaaattcacgcccagaatgaaaggctattccgctgtattgtttattttgacaggaattttaattggattattgtttttacgttccgatgtcgaagccagtattttgaggttgccaggacaattgtttcaacacaaaggggataatatcagtaatgtttatacttttaaaattatcaataaaaccaatactgattttaatgatattaatttcaaattagtgggtataaaaggagctttaaaagtagttggtaaacaagctttaaaagtaccgaaacaagggatgaatggaggaacactgtttgttgaaatcaatcaaaatgtattggacagcgataaaacaaaattgaaaatcgaggtttataatggggataaaaaaattgaaaccagcacaacaagttttttaagccctcgaagttttgattaaatctcctaacccatgatgggggaactctaataggaaaggaaaatgggaatagaattttaatttgtacaaaacatggaaaataataatataaaagatttaaatactctaacagcagttcccccttcgggggccagggggattaattggggaacaggaatcgttattgcttttggtttgtttatgaccttcattttgtattttgtttttacagttcaatccgattcaaaatatgataatgagctggttgtagaagaatattacaagcatgatgctcattttggagatgaaatgggacggattcaaaacgtacaaaatttggctcaaaagccaaaaataacgactacttcagagggaattctaattgtatttccagatgtattcattccgaaaaacattaaaggaaaagtgtccctttacagaccgtctaacaaaaaattagattttgaaattccaatttcgttgtctaatcctactttgctcattcctaaaaaaagtttggcaggcggtcgttgggacattaatatggaatggcaatatgagggaaaatcctatttgtccaaagaaacgatatatatcaattagtcataaagtcaaaagtcataaagtccatcgtttgactttaagacttttgactttatgacattagactaaaaaaatgctttacactgcctttattttcggtttaataagtagttttcactgcattggtatgtgtggtcctattgctatgatgttacccgttgatagaaataaccagactaaaaaagtcacccaaattattacctatcatttaggaagattaacggcgtatgccaccattggatttgtttttgggctggttggaaaaggattttttatggctggtttacaacagaaattatccatattcattggcgtagccatgattattgtagttttaactccgaataaactttttgctaaatataatttttcaaaacctgtttttgaattgatatctaaaataaaaacagcattaggaagtcagtttaaaaacaagagttacaaatcattattcactattggtttactcaacggttttttaccttgtggaatggtttatgtcgccttgtttggggctattgccatgcagagtgaaagtctgggtgttttatatatgatattattcggattaggaaccgttcctatgatgagcagtgtcgtgtatattaattcatttttaacggtgcctgtccgaaatagaatccaaaaagcgattccttatgtggcggtatgcattggttgtttatttattttaagaggattgggattgggaattccttacatttctccatctaatatgagtttgtttattcaagccgatccgaattgtcactaatttttttatagtttagtatataaaaagcacgctattcagcgtgcttttttattttgtaagattagggattattagattgtcatcgaaaacaattcggtttccggtgcttttcttttcaaacgtaaatcgaatgccatacaaatattacgaacataaggtttccctttttctgtaacctcaatgttatagtctttaaggattactaatccatcgttttccatttctttcaactgaagtataacgtctggaatttcattgaaataaccctctttgtttttccaggaagtttcaaattggcacattaaattcagaatgtgttttctgatgatgaggtcttcattcgtcaataaatgccctctgaaaaccggtaatttattccattctaatacttgataataatcttccaagttttttacattctgcgcaaaactataccaactgtcactgatggaagaaacacctaaaccaatcattaattgtgtttttgaggaactgtagcccataaaattacgatgcaatttaccattttgaaaagcgtcatacaaactgtctgtttttaatgcaaaatgatccattcctatttcgcgatacccgttttcatacaataattttttacctgtttcatacaatattcgctttttctcatcctttggaatatcttcatcattaaatccgcgttgtccattccctttaatccaaggaacatgggcgtaactataaaatgccaatcggtcgggctgtaatgattttgttttctcaatagtatcgataatatcttcaatttcctgaaatggcaatccaaaaataatatcatgaccaatcgaagtataaccaatttctctggcccagaacgtaacttttgccacgttatgaaaaggctgttccctgtgaattgctttttgaactttttctgaatagtcctgaacgccaaaactcactcttctaaaacctaaatcgtagagcttttgcaaatgttcgtgtgaggtattgttagggtggccttcaaaactaaattcatagtctttggctttattggcatgggaaaaaataccgtttattaaatcctctaaatttttaggagagaaaaatgttggggtcccgccgcctaaatgaatttctttgatggttggtttttcaccaaggattttacaatagaaagtccattctttcaaaactgcatcaatataaggattttcaacggcatgattttttgtgatacgcttgttacagccacaaaaagtgcataagctttcgcaaaaaggcaaatgaatataaagactgatcccctctgaactattacttgctgcaaatgattttttcagcgtttcggtccaaattttatccgaaaaatcagtttcatcccaatatggaactgttggataactggtgtatctgggccctggaacattgtacttttgaattaaggaatttttcatggtaaagtcatttagcaataaccaaaagtaacattacggctaaatatttaaaatgataattatcatatcgttactttattttcataaaaaaacctcgaactatttaagaacgaggtttctaatttttaactattgttgaaaattattctattttcaaatttctcaattgttttagtttttctttccaaacatcaaggctttctttatggatagcgatgtttttacgaacttctaatacaatggaattttctttttttgcatttctggtgttggtaaaaaactgaatgttattttctaattggaaaatttcattctgcacttcatcaattttacgcattaagaatatcttctcgttatccagtttgcgagtatcattactttctgataaattgtccattctattggcaaaacgtatcatatcagtgtcttttttactcaaactcaatttttcaaaaagagcatccagaattttattgaattttccttcaatatgtcttcttgggaaaggaacttttccaaagtttttccaggtttcgatgtgtaattttatagcatcgagatctgtcttgtgatcaccagtcaattggtactctctcaacgtttctaagtaggtttttttattgtcaaaagcttctacttcttcactgttttcttcatttttttgctcttttaatttgtcaaaataatgattacaggcatctttaaactctttccagattttatctgagtattttctaggcacatgtcctatttgtttccactcatcctgaatttgtttcatgatgggagtagtcgcagcaaaatcagtactttcctgtaattctttggcttttgcaacaagggccgtttttttgcataagttgtcgttttgatctttcttaatgtctttgtaaaacgaatttttgaaagaattaaaatttctgacagcagttttgaaactagcccaagtttcctcatttacatccgatggtacttttccggcagagaagaaagcagtacgtaacgcttctactttttctatttgagtcagccattgcgaatgagcattcactttctcagttgctaaaacttcaattttagaaatgatttcttttttcttttctaaattttcaagttccgttcctctttgattttcgaataaaacttcgcgtttatcatgcatttgtttggtcaaatcactaaacttgttccaaatggcatcacgatgttctctagaaacaggcccaatgtcttctttccagattctatgtaaatcttgtaattctctgaacgctttgttgacatcggtttcttttaccaattcttcaacacgtgcgacaattttttgtttttgctctaaattatgtttgaaatccaagtctcttgcttctctgtcaagatgcaaatagtcatagaaattttctacatgaaaatggaaattattccaaacgtgattgtatttgtctttaggaattggtcctgcatttttccatcgctctcttaaatcattaaaatgttttaaggtgtccttgatgttttcctgcggattgattaactcttttagttcctcaacaatcaccaatcgattttctaaattggtttttagattcgtttgtaagcttttgaaatgtgtatttttagtatctctaaaaagagagtaatatttgtcaaattgtgtttttaatggagagtgatattgaaattcttcatttggatcttgattttctgcaagaaattcttcttttttctcttcaataagatgattgtatttggctaagaatgcttttttaatttcttcaatatgatcttttacagacatcactttttcactggaaactaaactcttcagttcctctaccagtgtttcaagagacagtgtgtcataatcctgcatcggaatgtcgtgacgctcttttagcgtttcatcttcactttcggcggcatttgtttcggcaattgcatcgagtgcagtttgattttcagtttctgcaataggtgcagtttctggcaattcttcattagaagggataacaacattttcttctgcaggcacatcaataggctcagacaatgctgttttttccaaaacttcagtgttggattgacttgattcaacggaattgttttctaaatttccatctgcttccagcaggttatcattcttttcttctaacattttttcaatgtgtaaggtttctatttttttatcgaacacgaaagatagtaaaggagcatgaaattacaaaataaatcctttatttatagtcgttttatgttaaaaaaaagttttttttgaagcaatttcctgctattcgatgtatcttttttgttcgccgaaaaggcgaataaaaaaggatgccgctgcaaatgaaattcactgaactcctatgaaaacaaatgtttagtgaagtaatcagggctagggttttgggatttaaattagacgtttgttgtttataatacgaattgaattagagtatattttcaatgatttttaatatacaatgttttttatataacttcattaaataaaaaaagtcccaccgaagcaggactaaagattttcatctacggcatatagccttattgtgataagattaaagattagaaattttaatcagttacaaatataaataaaaaataattaggtttgaatgaggaaaaccgtaaggaggctaattattttcgccgtagctttaaaaattcttacaaaatagagattgacatgacaaaaatattaggattagatttagggacgaactcgattggatgggcgattgtggataaagatagtaacgatttttctttagtagataaaggtgttagaatattttcggagggcgtaaaatcagaaaaaggtattgaaagttctcgtgctgccgaaagaacagcttttagaagtgcaagaaaattaaaataccgaagaaaattgcgaaagtatgaaacattaaaagttctttcaattaatggaatgtgcccattatcaattaaagaagtggaagaatggaaaaaatcgggtttcaaacaatatccattaaatcctgaatttttgaaatggctaagaactgatgaagaggagaatataaatccttatgtttttagagatagagcaagtaagcaaaaagtttcattatttgaatttggtagagctttatatcatattgcacaaagaagaggttttttaagtaatcgattggatcaatctgctgaaggaattttagaagaacattgtcctcaaattactttattaattgaggattcaatttctaatactgaaattctaatagaattaaaagattatttttttaatgttggaattcttgatgaaactaacaaagggggtttcaaaaaagagttagacgaaggtgaagccaaattacgaactttatataatgcccttttaggtatagttaaaaggaatgaaaataagtttattatagctaaagaagaaattattgcaagattaaataggaaagaagatttagggaaggtaaaaggcaaaattaaagacatttcccaagctatgattgatggagatttcaaaacattaggtcaatatttctttagtttatacaataaaagtaagattagaaaccaatatacttctagagaagaacattaccttgaagagtttaatataatttgtaagatacaaggaattggagaaatcatagctgacgagctgctgccagaaaaaaaatacaatggattagctaaagatttatataaagctatatttttccaacgaccattaaaatcccagaaaggattaattggcaaatgttcatttgaaaaaagtaaaactcgctgcgcaatttctcacccagattttgaagaatatagaatgtggacttatttaaacaccataaaaattggaacgcaatctgaaaaaacgttacgatttttatctctagaagaaaagcaaagtttaattccgaaatttttaagaaaaaaagacaattttaattttgaagatttagcgaaggaacttattccaaaaggagaaacatttaatttttataaatcatcaaaagccaacgaagttaattatttgtttaattacaaaccctatgatacggttgctgcaagtccagtttcggcatctttaaaaaatatttttggagacgattggaaaaccaaaataatttcatacaaatctaaaaatgctaaaggaattgaagttaatcgtactgtagattataaagatttatggcatttgctttctgtttcaacatcggatatttatttgtttcaatatgcaaagcagaaattaggattggacgataaaaatgcaaaagcatttagtaaaattcgattaaaaaaggattttgcaagtttgagtttaaatgcaattaccaagattttgccctatgtaaaagaaggattattatattctcacggagtttttatggcaaatattgaaagtattgttgatgaatctatatggaatgatggcaatcaaagaaaatttattcaagataaaatagccgaaataattgaaaatcatacttatgaaaacggacaattagaagtaattaatagtttgattaaagagtgtaaaactgtaggtgctttttattctaaagaagctgaaagtatctacaaatcagatttgaataaaaaattaattcctttttttaaattccataaaattgaattggacaaagaatcatttttaaatgaattatttcctattctaatcgagcaattaataaagtatgaatatgtaaaaatcagtcgtttagatgaaaaagttttagattttataaaaggtaagaacgacgatggcgaaatattttgtacaaatgaaaagcgaataaataagctatatcatccatcagatatagaggtttttaaaaagaaaatcataaaagacgaattcggaaatgaaaaagtagttttaggaagtccgcgaacttcatctataaaaaatccaatggcaatgcgggctttacatcaattgcgaaaagtattgaatactttgatttttgacggacaagttgatgaaaaaaccattattcatattgaaatggctcgtgaattgaatgatgctaataaacgaaaaggaattcaagattatcaaaacgaaaataaaaagaatcgagaagaattcgccaaagatataagaaagttatattttgaagagtgtaaaaaagagattgaaccaacagaagatgatttattgcgttatcagctttggttagagcaaaataaacaagaaatttatgaagatggaagaaatataagtatttgtgatataataggaactgacccaaaatatgattttgaacacactgttccaagaagtcgttcacaagataattctcaaatgaacaaaacactttgcagtcaaaagttcaatagaaatattaaagggaataaaatgccttttgaattgtcaaatcataaagaaattctattgcgagttgcacattggaaagaagaatcagataattttacaagagaaattgaaataatttctcgctctattaaagctgctgcaaccaaagaacttaaagataagaaaataagaagaagacattatttaactttaaaaagagattatttaaaaggaaaatttgatcgatttatttgggaagaaccaaaagttggtttcaaaaacagccaaataccagatacaggaatcattacaaaatattcgcaagcctatttgaaatcctattttaagagagttgaatctgtaaaaggaggaatggttgccgagtttagaaaaatttggggaattcaagagagttttcaagaaaatgataaaaaatattttcacgaaaaagatagaagcaaacatacgcaccacacaatcgatgcgattacaattgcttgtatgacaaaagagaaatatgatgctttagccaatgcttggacacaagaagataaaggacaacttgccgaagcacgaaagctattagcggattctaaaccttggaaaacctttaaagaagatttaaaaaagatagaagaagaaattttagtatctcattacacaccagataacgtcaaaaagcaatctaaaaaaattgtcagaattcgtggtaaaaagcaatatgtttcagaaaccattaaagatgtaaatggaaaagtaatagttcaaaaagatgctaacgaaaaaataattttcaagcttgataaagacggaaaacgaatttcgagattgcaacaaggtgatacaatccgaggttcattacatcaagatagtatttatggagcgattaaaaacccattaaataccgaagaaatacgttatgtaattcgtaaagatttagaaagtatcaaagcatctgatgttgagaatattgttgatgaaatggttaaagaaaaagtgaaagaagctatttcaaataaagtcttattaatttcatcaaatgcacaacaaaaaaataaacttgccgagaatcaaaaagtttggatgaatgaagaaaaaggaattccaataaacaaggttagattgtatgccaattcagtaaagaatccattagaaattaaagagcatagtgcattatcaaaatctcgacacgagcataagcaaaaagtctatggacagaatgacgagaattattgtatggctatttatgagttatatggtaaacgagattttgagttgattaataatttcaatttagcaaaactaattaaacaaggtcaaggaaattatccattaaataaagaaaagcaacttaaaggtaaaaaagtacaaattccgattgcaaaaagtaataatcgtgatgtagttttaaaaagagggcaacaggttattttttatgataaagaaatagaaaagccaaaagacattactgaaataattgattttaaaggaagaatttatattattgaaggtctttctatacaaagaataccaagtgtaagtgggagtgttaatgaatacggtgtaatcactttaagatattttaaagaagctagaaaatctgatgaaattaaaaaagataattttaaacctgatggaatttataagttaggagaaataaaaccaacaagaaaaatgaatcatagtcagttttcagcatttgttgaaggaattgattttaaggttttgccttcgggaaagtttcaaaaaatataatttttagtagttctttgacattcagtttttcattttcttaaacagccaaaccacaactgaaagttatggcatccgcccagcagggatgcagtaactttcagttgtggtttgattaaagattagaaaacacgatattttcatgcactatgtcggcaattctacgaatgttgtggtttgattaaagattagaaaacacgatattttctgcctgcgatatatagcgtaatgtttggttgtggtttgattaaagattagaaaacacgatattggataataacaaaatattaaactaaaaacggttgtggtttgattaaagattagaaaacacgatattccacgtcccgaaatggcttgtgataccgtagttgtggtttgattaaagattagaaaacacgatattcgaacttattgaagatactacggtattgacgttgtggtttgattaaagattagaaaacacgatatttcaatagcgtcaatagcttctctaagatcggttgtggtttgattaaagattagaaaacacgatattgccacatacggcaaacagatcaactacaacgttgtggtttgattaaagattagaaaacacgatattattggcggtttctcctaactaatggctaacgttgtggtttgattaaagattagaaaacacgatatttaggctagattggcgtctattatagttcctgttgtggtttgattaaagattagaaaacacgatatttaaaaataccactcttttgcattcaaccctgttgtggtttgattaaagattagaaaacacgatattccgagtatcatgacgaaaatggaaattaccgttgtggtttgattaaagattagaaaacacgatattttaccgtcaatttcaagcttgtaagccgtagttgtggtttgattaaagattagaaaacacgatatttttgtataattaaattgttatgcaaatatagttgtggtttgattaaagattagaaaacacgatattaagcgaacctagttcattcgtgacattgaagttgtggtttgattaaagattagaaaacacgatattagaatttcaataggtggaactcctttaacagttgtggtttgattaaagattagaaaacacgatattctttgcggtttctgatagagatagaatattgttgtggtttgattaaagattagaaaacacgatattcggtataaaattcactaatggtagttcctggttgtggtttgattaaagattagaaaacacgatatttaggattgatttatcaaaagctcacgtagggttgtggtttgattaaagattagaaaacacgatattaacagatgacggaactaagctacaagtgtcgttgtggtttgattaaagattagaaaacacgatatttggacttcttttaaaacaactattagattggttgtggtttgattaaagattagaaaacacgatatttaattgtaccacctgaacccgtagaacccggttgtggtttgattaaagattagaaaacacgatattgataacgaaacattaatgagttgtgaggagttgtggtttgattaaagattagaaaacacgatattttggtcttttaaatccgcaactgccttagcgttgtggtttgattaaagattagaaaacacgatattagttggcttgttaccttctaattatcaatagaataaggaaaaatatcgtataaaaaaatgctccttttttgccttgataaagcactattggagcatttttttgtttctagtgttttttgtatcgacaaaaaatcgatttgaaaaatttgtatatttgtaaaaacatttattatgggggtagttattgaggctgaagaacagtataaaaatatgctacttgaaatagcgcaagctatcaaggcaaaaattacgtttcaggaaaacgatttttgcgaggaactcccagaacatgtaaaggctggtattctttaaagtaaagagcaaataaaacaaggaaaattaacaaaattttctgttgttaaagagaatctattggctagaaatcacagaaaataaatgttagaaattgatttaaccgataatgcaaaatttactttgcaaaatatttttgatagtatagaatataaatttgttgaggtcggtatctaaccacatattatttctctatggcaaatattatctgcctttaccatccttttgattaaattg

SEQ ID NO: 3128 - DNA, 16353 bp, synthetic construct
  misc_feature 1..16353: note = Synthetic
  source 1..16353: mol_type = other DNA
gaaggacaaaaatcctgaatttagggcatataatacttaaaataacaataatgattttaccaattgtaggatatggccatcctgttttaagaaaagtaggagagaatatttcacaggaacatcctgacttgaaagaaacgattgctaatatgtatgacaccatgtataatgcatgtggagtcggtcttgccgcgccacaggtaggaaaagcacttcgtttgttcatcatagatacgacaccttttagcgaagacgaagatttagagtcagcagaacaaatagaattgaaagggtttaaaagaacttttatcaacgcaaaaatgttgaaagaagagggtgaagaatggtgttttaatgaaggatgcttaagtattccagatgttcgtgaggatgtttacagaaacgaaagaataactattgagtactgtgaagaggattttgtggtgaagacagaagtttttgaggggttaatagcgagagtgattcaacatgaatatgatcacatagaaggaattttatttactgataaaatttcatcacttaaaaaacgtttgattcaaaaaaaactgaaaaatattactgaaggaaagacatttcaagactatagaatgaggtttattgctagaaagggcagataattaaattttaaatactctgtttagtgatggtctttggaatttaataaagaatacatacaaatcgaattcttaataataattataacaatatgaatttagaaaaaatacttgcgatttctggaaaaccaggtttatttgtacttaaagtgcaaacacgtactggttttgttgcagaatcattatcggatggaaagaaaattacggtaaatttaaaaagtaatgtaagcttattatctgaaatttcagtttacacttatgaaggtgaaaaaccattggcagaaataatgagcaagattgctgtcaaggaaagcaatggtccttctatttcacataaagaagacaatgctacattagcagcttactttaaagaaattttaccagattacgatgaggaaagagtatatccgtcagatattaaaaaaataataaactggtacaacatgctccaggttaaaggtttggttgtagatgaagaacctgcagttgcagaagaaactcctaatggagaggatgttgaagctgttgcagaaaaaccaaaaaagaaaaaaaaattaaggaataatacattctgaattttataaaaaatcctgtcttctctaattttagaagacaggatttcttatttttacgcacccgagtggccaaggatcgaacccaccaagaaaaaccatatgctatgaatacaagagaaactcaattgaaggcctttgatagactgttaactataatggaggagttgcgagagcaatgcccgtgggacaaaaagcaaactcttcaaactttacggcatcttaccatagaagaaacgtatgaattgggggatgccattctggataatgatctgactgaggtgaagaaggaattgggagacttactactgcatattgttttttatgctaagataggaagcgaaaccaatgattttgatattgaagatgtttgcaatgaaatttgtgagaagttaattcaccgtcatccgcatatatatggagatactgtggttaaggacgaagaagaagtcaaacaaaactgggaaaaactaaaactgaaagaaggaaggaaatcggttctggagggtgttcccaaaagtttacccgcattggtgaaagccagcagaatacaagataaagttaaaggggttgggtttgactgggaagagccgcatcaagtttgggataaagtaaaagaggaattacaggaattacaagtagaggtggaagccggaaatcaagataatatcgaagccgagtttggtgacgttttattctcaatgattaattatgcccgatttttaaatgtaaatcccgaagatgccttagaacgcaccaataaaaaatttatcaaacgctttcaatatctggagagcaaagcgggcgaattgggcaaaccattgatggacatgactcttgctgaaatggatgttttttgggaagaggcaaagcttctagcaaaaaagcaggaataagaaaatttcgaattttcaaatatccaaatttgggaagaggcaaagcttctagcaaaaaagcaggaataagaaaatttcgaattttcaaatatccaaatttgggaagaggcaaagcttctagcaaaaaagcaggaataagaaaatttcgaattttcaaatatccaaatttgggaagaggcaaagtttctagcaaaaaagcaggaataagaaaatttcgaattttcaattttgtaaaaaagcaaaaagtgttttaccatcttttatctttaaaagtcaattaaattatatatgtcggaaaataaaatagggttaaaacgttctttggggttaattgatgctacaagtttagtagctggttcgatgattggttctggtatttttatcgttactgccgctatggctcgtgatattggttctgcagcctggcttttaataatttggttagtgaccggcttgattaccgttgctgccgcattaagttatggtgaattagcgggcatgatgcctaaggcgggcgggcaatttgtttatattcagcgtgcctatggtagattaatttcgtttctgtacggttggactgtttttaccgtcattcagactggagtaattgctgcaattgcagttacgtttgcaagctattctgctatattttttccagttttggacaatacgctttttaccctaggagacagttttgttttcccaactagtaaactattggctatcgcaagtattattatactcacgttcatcaatactaaaggagtagaaagcggaaaattgattcagttaatcttaacatcggctaagttaattgcactttttgcgttaattatttttggtttgtatgttggttttcacacagacgttctttcgaataattttgctaatatgtgggaagccagtagcactgttttaaatggtgatggctcaattactgttacaaagttaactggaatggcagttctgggtgctgcaggggctacaataataaattctttgttttcaagcgatgcatggaacaacgttacttttattgcaggagagattaaggaaccaaagaagaatataccacgaagtttatttctgggtactttgattgttaccgttatttatattctggcaaatttggcttatttggccctgttgcccatgcatggcactccggatgcaactggaatcgcgggtaatggaatcatgtttgcaagtaatgatcgagtgggtgccgcagctgcgggtatgattatgggcaatagcagtgttttcattatggctgccttaattatggtttctacttttggatgcaatagtggtttaattctgtcgggtgggcgattattttatgcgatggctaaagatggattgttctttaaacaagctaagattttgaataaaaatcaagttccagcgaaggctttatgggtacaatgtgcttgggcttgtgtgctatgtgtttcaggtaagtttggagacttgctaacttatgcaacttttgcgtcgttactgttttacattttaacaatctttggtgtgtttatattaagaaaaagggaacctaatgctgaaaggccgtatcgggcttttggttatccggttgtgcccgcactatacataattgtcactactgcaatttgtataacattactggtatatgacactttaaacaccggtttgggattgggaattgtagctttgggcgtaccagtttattatttcctgatggatcataaaaaagaatagggagctactacgtagtcatcttttttaatttactggtgtctttaatagttatctttgtaccaactagttctactaatcttaatttttgaaatcatacagtattcggatccatctttcgtttgctgtccctatcatactggctaattcatcccttgatagttgaattttcagtgagtcatcttcgtttttttcgaagatgtcatgtaaataaagtaatatttccgctaatttttctttcaccgttttttgagccatattgactaaatgactatcagcttcttttagatcaccgcagattgttttcatcacattcatggaaaactgattgtttttatcaaagaatcccataacttcagtttgggggataaaacacacttccatatcttcaagggcgacagcgcttcaattaacaggtttctcgctaatcatggaacgttgacccaataactatcctcttgtaactaattttactatttgatcttttctattgggaatcagtttagtaagtttacaaaccctatcctttatgcagaatattccatttacactttctcccttttcaaaaatcacttctccttttttgataatgcgtgatgttttacatctagcaagtttagcaagttcgtctttattgagcgctttcagtgagctgaactgtctaacaatacattgttcgcattttgacataatgaaggaggctgtacttatgcaagtttacgcattaataagacaaatatcatattttcgttaagaattgtttaagagccttacatcaggtaaaatgagcaaaattatggatacataacactgcttctattgtggtttagacaatattaaagtagagaaaattacttttgacaataaaaatttttgttgcaacggttgtaaaacagtgtacgaaatttttagtgtcaatgatttgacgtactattatgattttgaaaaatcccctggagcaacgccgcttgatattaatggtaagtatgattttttagaaaacgaaagtatagtctccaaattattggaattccaagagaattaaaccgctattatttcacttaatattcctcatattcattgcagctcctgtatttggattttagaaaatttacagcgccttcaaaaggggataagttcttctcagattaattttcctgaaaagaaggttcgaatcacttataatcctcttgccgtttcttttgctaaaattgtttatttactaagtgccattggctacgagccttatattagtttagagaactatgaagctgggaaaaagaatgtcgatagaagtctgacctataagttaggaattgcttttttttgtttcggtaatattatgttgctttcctttccagaatattttgaagtgaacgattatcggctagacacttataaaccgttttttcgatgtcttatccttacggcatttttgtattcaacctccgattactatgtttcggcttataaaagtatccgacctaaaatgctaaatatcgatattccaattgctttagggattatcgtgatgtttgtgcgaagtactactgatattgcatttgattatggatctggttttttgatagtttaactggcttgattttctttatgctgttaggtaagatgttccaaattaaaacctatcgctttttaagttttgaaagggattttaaatcttattttcccattgccataacccgcataaaaagcgatgcttctgaacaaagtgtctctgtttatgatattgtaaagggagatcgactgcttatcagaaatcaggagttaattcctgttgacgagatattgattagcgaaaaagctactatcgattatagttttgtaaccggtgaagtcgtacctattagaaataattcaggggataaagtatttgctggtggaaaacaaatcgggaaacttattgaaatggaagtgctttattctgtttctcaaagttatctcacccaattatggagcaatgacgtttttcagaaaactataaaccaaagatataagagcattactgatagtataagtaggtatttcattcctgtcctattgttgattgctttcgctgcatttggctattggattttattcgacacgaacactgcttttaacgtttttactgcaatcctaattgtagcgtgtctttttgctctggcattgactgctccatttacaatggggaatgtattacgaatcattggtaaacagaaatttcactgaaaaaatgcactggttattgaacaattagctaaagtggatactatcgtttttgataaaacgggaactattactaccaataaaaaggcgaaaatttatcatgaaggacagtcgctttccaatgaggatctaatcaatattaaaacggtacttcgtgggtctaaccatccgttaagtaggatgttgtatgattatctcccagagctaaaaagtgtatgtcttactggttttgaggaaattgctggtaaagggaccagggctacgattcagggaagacaagtggtagtggtttcaagcggcatttggaggaagtccagaggggaagacgacgctgcaaatggcagttcatgtgagcattaatgatgcgtattgtgggaaatatttttcaacaatcaatatagagaaggattagaaggtctttttaaaagtttaaagaataattatcagattaaagttttggtcggagacaacgaggtggaaaaatcttctttagaaatgctgttgctctcttaaaaatgtaaatgctgtcgcgcactacacagattggattattgcacacgtgcaagcaggtccgttggcgtagaacggatttatgactttcggtatgatttattggttgataccaagaatgactaaaagtaaattatattctactacgctagctaatttttacttttggattggaactttagggactatactgtattcctatgtgtgtagtgggttttctacaagcttctatgtggaagcagtttaatccggatggaactttaacgtacggtaacttcctttaaaccgttacgcaaatcatgctaatgtatttgatgagtactattagtggtacgctttatctatcaggaatgttagtattagtgtataatattgttgatactttaagaaatggtgctagccttaaagatgaattagcttaagctcctactttagttaaaatcaataatggaagaattaaggagggaaaatttcacccgtggttataaagaaaacctagtcagctaaccattttagcaacaattgcgatattaattggtgttgttcttcaaaccgtatcaacaattgtggtaaaatcgaatattccaactatagcgagcgtaaaatcgtgtacgccactagaattggaaggacgtgttttatagattcggaaagattgtgtgggttgtcactctcaatctgttcgtcctgtccgtaggttggtagaacgttatggaacgcaagcgaaagcaggtgagtttgtttatgatcatccattgcagtaagtaactttggggtaactggtgtatcgtggaatggcaacattatttttgaattagaccatttttcaggagatatcaattttcattaatcaaaagtagtttgattttatgaaagttaaaatgataattatcatactcagagtactgtaacaaaaaagcctctttctttttttagaatgaggcttgtatttaaccggtggtattgttttactcttgctttagatttcttaactgttttagtttttctttccagacgtctaagccttccttgtgaatagctatgttttttctaacctctaaaacaattgaattttctttttttgcatttctggtgttcgcaaaaaactgaatgttgttttccaattggaaaatttcatttttaacttcatcaatcttgcgcatcaagaaaatcttttcattttctatttttcgggtatcattattttctgataaatgatccattcgattggcaaaacgcaacaggtctgtatcttttttgctcaagctcaatttatcaaaaagagcatctagaattttattaaatttcccttcaatatgtcttctaggataaggtacttttccaaaatttttccaagtttcgatatgtagttttatggcatctaaatctgttttatggtccccagttaattggtattcccgtaaggtttccaaataagatttcttcttgtcaaaagcttctatttcttcaacgctatgttcgtctttttgctcttttaatttgttgaaataatgattgcaggcatccttgaattctttccagattttatctgaatgttttcttgggacatggcctatttgtttccactcgtcttgaattttcttcatgattggagtagtggtagcaaagtcagtgctctcctgtaattcctgcgctttggcgacgagcgcatttttcttagctaaattctcgttttggtcttttttaatttctttgtaaaacgaatttttaaacgaattgaaatttctgacctctaatttaaatgcagcccaagtttcttcatttacttctgaaggcacttttccagcagcgaaaaaagcagttcttaacgtttctactttttcaatttgtgcaagccattgcgaatgagcatttacttttacagttgccaaaaccgcaattgcagtaataatttcttttttcttttctaagttttcgagttcggcacctcttagtttttcaaataaaacctcacgcttgtcgtgcattttttttgtcaaatcactaaaatggttccagataacatcacggtgttctttagaaacaggacctatgtcttctttccagattttatgcaagtcttgtaattctctgaaagctttatttacatctgcttccttcactaattcctcaacgcgcgcaactattttttgtttttgctctaaattatgtttaaagtctaggtctctagcttcacggtcaagatgcaagtagtcatagaaattttctacatgaaaatgataattattccagacgtggttgtatttatcttttggtattgatcccgcatttttccatcgatctcttaattcattaaaatgttttaaggtgtctttgatgttttcctgcggattgattagctcttttaattcctctacgatggctaatctattttctagatttgatttcaagttcgtttgcaaactcttgaaatggatatttttattgtctctgtaaatcgagtaggactgatcaaactttacttttaaagggaaatggtattgaaaatcttctgtagtatcaggattttcagcttggtattcctcttttttttcttcgataaaatgactgtattttgctaaaaatgcttttttgatttcttcaacatgatctttcactgacatcaccttgtcgttttcaaccaggatttgtagttcgtccacaagttgttccatcgacaaagtatcataatcttgcatcggaatatgatgacgctcttttaaggtttcgtcctcgctttcctctgcattggaatcctctattgagcttaacgctttttgatttacgttttcagtcacgggatctgtggtcgccacttcttcttcagcgggtgctacacttttgtcttctacaggttccgttatttcattttccggagtatcggaaatcgcttcggtttctgtgattacagtcttcacttgaacagattcatttgaatcatttgctacatttccatctgcttgttgcaggttgtcattcttttcttctaacattttttcaatgtttaaggttcctattttatcgaaaacgaaagatagtaaaggaatattgaaatacaaaataattaccttatttatagtcgttttatggtgtggttttgacttttttgaagcaatttcctgctattcgctatatcttttttatctcaaaaaaggagacgaaaaaggatgctgctgctatcagggctaggacgtagttgtttaattatgagtaggttaattaataggaataaaaaagtcccaccgaagcaggactaaagattttcatctacggcatatagccttattgtgataagattaaagattagaaattttaatcagttgtaaatgtaaaacaaaaatagttagcttgcaatgaggaaaaccgtaaatatcttaattaatttcttactatttttagaaactattaaaaaagacaattccggatggcaaaaatattaggtttagatttaggaacaaactctattggttgggcgattgtggataaagacggaaacgatttttctcttgtatgcaaaggagttcggatattttctgaaggggtgaaatctgaaaaaggaattgaaagttcgcgcgcagccgaaagaactggttatagaagtgcgcgaaaaattaagtttcgtagaaagttaaggaaatacgaatctttaaaagtcctatctctaaacggaatgtgtccgttgtcaattgaggaagttgaagattggaaaaaatctggatttaaagaatacccacttaatcctgaatttttaaaatggttaagaacaagtgatgacgaaaatataaatccttactcttgtagagatagagcaagtaaacaaaaagtttctttgtttgaattaggtcgcgctctttatcatattacacaaagaagaggttttttgagtaatcgtttagatcaatcagctgaaggagtttttgaagaacattgtcctcagattcaatctgtaattgaagatgtaaatactacagatgaaattttaattgaattgaaagactattttcttaatacaggaatacttgatgaatctataaaaggaggttttaaaaaggatctagatgaaggagaaaaaaaactaaaaacgctttataattctttggttgcgataacaaagaaaaatgaaagtgaaatagaaaaatgtaaggaagaactatttgctcgattaaataaaaaggaagatttaggtaaagttaaaggcaaaatcagtgagatttcgcaagcaatgaaagacggaagttttgaaaccttaggacaatattttaatagcttgtatagtaaaggcaaaatcagaaaccaatatacagctagagaagaacattatttagcagaatttgagattatttgcaaaacgcaaactattgaaagtattattgacaatgagcagttaccagaaaaaagatacagaggtttagctaaggaattatatagagcgattttttttcaacgtccgttaaaatctcaaaaaggattaataggtaaatgttcttttgaaaaaagtaaatcgcgatgcgctatttcgcatcctcactttgaagaatacagaatgtggacgtatttgaatacaataaaaataggaactcaatctgagaagattttacgttttcttactcaagaagaaaaattaagtttgattccaaaatttttaagaaaaaaagacaatttcaattttgaagatttagccaaagatttaatcgaaaaaggggcaagttttggattttataaatcttcaaaaagagatagttttcattattggtttaattacaaacctactgatacagtttcaggtagccctgtttccacttcttttaaaaatgtaattggagaagattggagaataaaaacatttacttatccaactttaaattcaaaaggaattgaagttaacagaacagtagattataaagatttatggcatttactatcagtctctacttctgatgtttacttatatgaatatgcaaaagataaattaaaattagaagataaaaatgctaagtctttcagtaagattagattaaaaaaggatttcggaagtttgagcttgaatgcaatcaacaaaattttaccgtatgtaaaggaagggttgttgtattcacatgctgtttttatggcaaatatagaaggtatagttgatcaagctatttggaatgacttagcacaaagaaaatatatacaagataagattgctgaaataatatccaataatactttcgataatgggcttttagaagttgtaaacggattaataaaggaatgtaaagttgaaggtgcttattattctaaagaagcagaacctacttatagaaaagatttaagtaaaaagttagtttcgttttttaagtatcatgagattaatgatgttttgaagcaagaaaaaatcttaaaggaagtgtttcctgtttttatagagcaattaaaagcttatgagttcataacagtaaaacgtttggacgaaaaagttttagaatttctaaaaggagaaaatgaagatggtgaagttttttgtggcaatccgaagcagttaaataaattatatcatccttcagatattgatgttttcaaaaagcaaaaagtgagagatgagaacggaaaagaaactggtcagttaattttaggaagtccattaacctcttcgattaaaaatccaatggcaatgcgtgctttgcatcaactccgcaaagtattaaatgccttaatagtagaagggcaagttgatgaaagaacaagaattcatatcgaaatggctcgggaattaaatgacgccaataaacgaaaaggaattcaggattatcaaaatgaaaataagaaagaacgtgaaaaatacaaagaagaaataaagaagctctatttagctgaatgtgggaaagaaatagaaccaacggttgacgatttattgcgttatcaattgtggattgaacaagataggaaagagatttatgagaacggtaatagtattagtatctgtgacataattggagacaatccaaaatacgatatagaacatacggttccaagaagtatttcacaagataactctcaaatgaataaaacgctttgtagtcaaaagtttaatagagatattaaaaagcaaaaaatgccaattgagttagtaaatcatttagaaattttacccagaattgcgcattggaaaaaagaagcagaaaattatacgagagaaattgaaataattattcgctccactaaaactgctgcaaccaaagaagccaaagacaagaaaataagaagaagacactatttgactttaaaaagagattacttacaaggtaaatataatcgttttgtttggacagagcctaaagtaggatttaaaaatagccaaattccagatacaggaattattacgagatacgcacaggcctatttgaaatcctattttaaaagagtggaaagtgtaaaaggtggaatggttgcggagttcagaaagatttggggcattcaagaaagttatcaaaaagatggcaaaaaatactttatagaaaaggatagaagcaaacatacccatcacacaatagatgcaattacaattgcttgtatgaccaaagataaatatgatgttttggctcatgcgtggactttggaagataaagaacaagtaaccgatgctagaaaactattagctgattcaaaaccgtggaaaaccttcaaagaagatttaaaaaagattgaagaagaaattttagtttcacattacacaccagataatgttaaaaaacaatctaaaaagattgtaaggatacgcgggaaaaagcaatttagagatgaattgttattagatttaagcggaaataaaattccaatttttggaaaaagaatgaataatgatgaaattaagtctaaagttataggaaaagattattttgaaattgtatcaaataatgaaaagagtttttatgaatttttaaaagacaaaaatggtgatatagtttataaaaaaacaccattatttcaacaaggcgatactattcgaggttctttgcattcagcgggaaattatggagcgataaaaatgcctcaacgaaatgagaaaaacgagccgatcaaaaatgaaaagggcgcttttattttggaaaaagataaaaaagataaagatgtaattcattttgttgagagaaaggctttaacaaaattatcagaaaatgacattaataatattgtagatccaattgttgctcaaaaaatccaaaaggcagtgagagacggctttattacatttaagatggttcaagggaaaaaagtagcggtaataaaagatgatgttataatatggatgaatgaagaaaagaaaattccaattctaaaagtgagggtttttgctacaacagttaaaaatccattagaaataaaaaaacatagtagtttgtctgaatcgcgacataaacataaacaaatgatatatgctcaaaatgatgagaactattgtatggctatttatgagttagaagggaaaagagattttgagttgattaattattttaatttagctaaacttcaaaaacaaagacaaggttattatctagtaaataaggaaaaagaagttaatggaaaaatagttcatataccaattgcaaaaagaaatggtagagatttagttttaaaaagaggaaaacaagttattttttatgataaagaagttgaaaacccagataatatttttgatttagaggatttaaaaagcagaatttatattattgaaggattgtcaattcaaagaattgtaagaccttcagggaaaattgatgaatatggtgttattatgtttcgttattttaaagaagcaaggaaagcagatgatattaaaaaagataattttaagccagatggtggttttaaattaggagaaataaaaccaacaagaaaaatgaatcataatcaatttaatgcttttgtagagggaattgattttaaagttttgtcaacgggtaaatttgaaaaaatataattatggatgaatcgaaactaacaaaagaacaaatagaaaaaatccaagctaaattggataaggcatcaaaaagtgggtttagtacgaaaacaaaggaagaattattagctgaaatcaagaaaaaatttaatgtttagttttgtcattccgacgaaggaggaatcacacatcaaaagccttacgtaaatataaaccaaaagtgtagttatgaacaacaatatgatagagtacaacgaagggtatcatacatattatgtttatataatcaccaatacacaccgttcctcatattatataggaatgaccaataatttgggagagcggttggttcaacataaagaaaatatagaaaaaggaataaaaacttttgcatccaaatacaatattgaatttttggtgtattatgaaaaatttacttgggttcaaaaagctattgaaagagaaaaagaattaaaaggatggagaagagataagaagttagcattaattctatcctttaatccccaatttgaatttttgaacgaacggtttattagttctgaccgttctaatagattataggtttgtcattccgacgaaggaggaatcgcataacgagagcaactaatgtgattcctccttcgtcggaatgacaaaacaacaaatgttctttgacatacagtttttcaaactcttaaacatctcaaaccacaactgaaagttatggcgtctgcccagcagggacgcgagaactttcagttgtggtttgattaaagattagaaaacacgatattatcgtcatagcatccactagaacactctagttgtggtttgattaaagattagaaaacacgatatttctgtttcgtggtagcttgaagcgtgattgttgtggtttgattaaagattagaaaacacgatattttaaaagtaaacaaagtagctggggaaagagttgtggtttgattaaagattagaaaacacgatattcaaagcagatgttacttatgtagatgatcagttgtggtttgattaaagattagaaaacacgatatttcaataaattaatcacaagttaacgactagttgtggtttgattaaagattagaaaacacgatatttgtattgtcatgattttataattttactaagttgtggtttgattaaagattagaaaacacgatattactaagattaagtgcgtaatatagtagtgagttgtggtttgattaaagattagaaaacacgatattgttgttaatattagcctttccgcttaatccgttgtggtttgattaaagattagaaaacacgatattcatgttgtgttgatgctgttgctttgtcaggttgtggtttgattaaagattagaaaacacgatatttgatgccgttaccgtgactataaaattggggttgtggtttgattaaagattagaaaacacgatattctttgggtttttttatgtttaaaagttaaagttgtggtttgattaaagattagaaaacacgatattccactgtaccaaacattatactcactgaaggttgtggtttgattaaagattagaaaacacgatatttacaagcattacgagtactatcttaagagggttgtggtttgattaaagattagaaaacacgatattgaacaagcaatatataaaaaacgagcgcctgttgtggtttgattaaagattagaaaacacgatatttttggttaacctataatataccgtgtctaagttgtggtttgattaaagattagaaaacacgatatttttgaattgtcttttaattttgaaggattggttgtggtttgattaaagattagaaaa

SEQ ID NO: 3129 - DNA, 15066 bp, synthetic construct
  source 1..15066: mol_type = other DNA
  misc_feature 1..15066: note = Synthetic
aattgtaccataacgcaacgaatgataggaatggcaattgaggtacattagtctgtattgtttgattttggaatgattgattgacttctgggattagaaatgatgttacctgctttggaggtaatgtttcttccgccacaacgggtcactgcatcatagccaaatcggtttttgattttatccatcgcttggtataaggcgatcatttcttcggtatcttcaaacatgtcgatttgataggttccacgcactaaaccggcaaaggaaacgccaaccaatcggattcgcatacgacgattgtacagcttgttgaataactcaatggctatcttgcttaaaacatggtcacaagacgtgtaggcaattttacgttgtacattttccgtatcaaaattggcatagcgaattttgactactaccgttgaaactaaccattgctctgctcgggcttggtaggctagtttttctaccattcctaaaattaaggattgtacttttttaatatcaattatatcttgcaaataggtgtgctcggtggaaagtgattttctttctcggtacggttccaccggtgcattgtcaatgccgttggcttttttccagatttccaatccgtttttgccgatcatactttgcagtacttccgcaggtgtttcggctaatttttcaatgttgcgaatgccaagtcgggaaagtaaattaaaagtcacttcgcccaacatgggtatttttcgtatggataacggatttagaaacggctttaccatactttccgaaatttccaaattgccgttgggtttgccttcacctgtggcaattttagaaacggttttgtttacggataacgcaaaactgataggtaatccggtttctttggtgatggtttgggttaattcattcgtccatttgtaacagccgtaaaatttatccattcccgtaatgtcgaggtaaaattcatctatgcttgccttttcgaccagtggtgaattttcttcaatgatttgggtaacttcatgtgatttttttgaaaacaattccatgtcgccttttacgattttggcttgtggacatagttgcattgccattcggattggcatggcagagcgtactccaaaataacgagcttcatacgaacaagaagccacgactcctctttcgccaccgcctacaattagtggaatcccatttaattgtgggctttctaatcggatgcaagagacgaaaaaagtgtctaaatccatgtgaacgatggcacgtgacatagtgttttgaatttttgaagttgaaattattttacaaaattaggacgtttaatccctaaaataattatctttgtagtgacttaaaatccctttaacatatgttgtatatttccgacaatttaaaatggttgcgaagtaagcagaacttgtcgcaacaggaagctgcggacggaatgaagttgcctttggatcgttataagaaatacgaatacggtaagaacacaccaccggcagaaacgttgctaattatttcgaggtattaccacattagtattgatttgcttttaacggtggatttacgaaaaacctccattgacgatttagttcggttagaagacaaccgtatagtgttgcctattacggtgaatagtgacggacaaaatttggttgaaataattactcacaaagccaaagccggttatgccgcaggcggttatgctgattttacgtttatgtcgcaactcgaacacatttcacttccttggctcaataaaaacgaaaaataccgcacgtttcctgttgatggtgattctatgccaccacacaacagtaagtcgtttatcattgcaaaatatgttgaaaagttgggtgatgtagtagatggaaaaacgtatatcgtgattactactaataatgaaatggtttacaagcgattgaataagaatgggaaaaatatctttacattaaattccgataatactttttataaaccgtatgatgtgaaattttcggagattgctgagatctgggaatatgtgggtagtattgaacgggagaattttaaaccggagaattatacttccgaaaatttagaaagaataattagaaaacttcaaaatgatgtaatggaaattaaagataggatttcataatcataaaattttcaatatcttattacttctagtaatttgagacggaaatctttttcgtataatacaatttacttaataaaagtctgcatttcattctcgatattcacacgaagttgcttcaattttaacgcatacgcctccaattgcttttcatgatcggtttttggaacccatttttttaccggtaatggttttccatcgctgtcaactgatacaaaaacaatcacacaatgtgtttttttggtaaatgattcttcgttgagttttcgcgagtacacatcaatagcgatatgaatactcgtttttccggtcaatataatgtatgcatcaatttttaccaaatcaccaatgttaatgggcttgtagaaacggattccgcccacataaactgtcacacaataggtttcagaccatgttcttgcacaggtatacgctgtttggtcgatccatttcatcaccgaaccgccatgcactttaccgccaaaattcacgtcggtaggttcgctaataaactggaaggttattttgtgtgtttctttcatgactttcggatttattaaattagtagaactatcgtaaagataagcaattaaactttttcactttcaaaggattttgcttcgacaatgcattacctgtttgaatatagcggatagccattctacgacaaaaaagaagagaaaattataaaccctataaagtcaaattttccagaatttcacaaatatggaaatgtgttggtagtttgtaaagattaaatttaaaaacccacaaattatacttcggagagtttagaaggaataatcagaaaacttcaaaataatgtgatggaaattagggtgaggatttcgtaatgacacacaattaaaaaaaaatatcttcctcagtactatagtttttaaagaattcagaacgagagattgcattcttacaataacagataaatatacagtagatcatttcatcaccatgcctttgtttcgaatgatttaatatgaaatctagtaccagttgataaaaactctaacactaccaaaggcgataagctgccaataatggaaacgcttttcattgacttttttaaaattcaaaaacagctttcgtaatcataagccattatgttctttggaattgaaattttattaattctaatttttaccattagctttacctagaatatctaatccagttaataaacttatcatatcccaactataccgttttccaaaatataatagtaattaaaacttctatatcacttcaaaattgcttgctgaattgcttgatatttaacaaacaaataagtttctgaaaataaaattgttactattttttccgctccacataatttgaaataatatatgcactaacctttttcaattgcccgccagtctcaggatgaaaaccatcccctagcgaattaaaaaattccggcttaccgtttactttacaataccaatacaaaggctttccctgtttattaaaaaaagttgttgtgtcattcacttctatttttctaaaattcaataaacttttatccaatggaataacgggattttttgaggaatttttattatgacccatacattctactacttcataatgatccacttgccattgcatgcattgcttatcagtgaacacaaatttggataacgaaaatccgcccaaaagcgaagcgataattagaaaaatggtgatgaatttattttttcctatccaaaaaatgaaacctctcttcttgtaactcccattttccttctttccgccattctcaggcacagttggtttatcaggctccattaaatcaccttctaaaaatttataactttcgcttgttgaaaatactttataaggcctttcaataaaactgacaagtatggccgctatttcaatccgagtaggattatccatatctttttctccttttaaaaaagaaattatcgtcttaaacttatcaatatttattctattaatcgctcttttcaacgcttcattttcattctgttcaaagaaaattcgaaatacttcttcatcacttttatttaaacctttatcacttagtaacaaacacaatgtacgcaactgagcaggtgtaggatttgccaaaataccactgacatcatccattttacaaagaccatactgttcttttatggctaatttgtaatccttaaaagtattttttctcataaaaaaggaaattgaatttcggatttttttagatttttccggaactatcggaattcatcggaattatcggaattccttatcaacactaccacaaaaaccacattcctttgcttcagaatttgtttttgttctaacctgcaattggaacaaatgtacaaaacagattcaaaaaaagtgtcgctcaacagaactgaaattgtatcagggaagtataccaagacggttttgttgtagcacactttacttcccaacaattcattgagtactcatttcttatcggataaaatccgaaacgctcatttggtttaaaaaaccgaacagcaaaatccatgttcaattttaaatttcagtatcatgaaaaaaatactttttatatcactattttgtacagcattgggtctttttacttcttgctcggcagacgatgtagaagaacaaagcatgtctgtagcggcagatgacaccggaggtcagagtggttttggtcaaattaaaccaccaccacctccaccaccgggagttggaggttaatttctagacaatcttattttgtaaatagaaatttgtaaattcgggaaatgaaaagaaaactatctttttgtttcccgattttatttgcagtcttgtttgtttttaacggctgcgaaaaaactgcaatgaataaaaccgaaaagaaccattctgaaaagggttatcaaaacagaaaaaaagcagaaactttcctggaaaagcaaatgcaagacagtgctttttattatttcaacctttccaaagaagattttttacaaaagcaagacagcctaaatgttgcgtacaatttactcatgatggctcaactgcaaaaaatctccggcgactataatggatgtgaagcaactaccaccgaagccctgccgtttttaaaagctgatgacacaacttatcttccggaagcttacaatttaattggaatgtgtcatcaagaacttttcaattatgcaaaagccattgaattcttcagcaaagccattcttttgtcaaacgacaaactcaaccagtccatctataaaaataatcgggcggtagtgtacaatttgatgaatgaacatacgattgcgaaaagtgaatttgaagcactcatgagtctcgatgctgtaaaacaaaatcaggaaacaaaagctcgggtgatagataattatggcttcacattatggcaaatgaaaaaccttaatgcgatcgattttttaaatcaggggttttcaattcgcacctccattcaagaccacaatggattagtgaccagcaactataatttaggagaattttacgcccaaagagacaaaaataaagctatttcatttttggtaactgccctaaaggaagctaaaaaaatcaacaatcccgatgaccaattggttgtattaaaacttttgtatcaaattgaaaacgataaatcacatttagaaaactatgtacaattatcggatagcattagtaaagtgagacaacttgcaaaaaaccaatttgcctcaattaaatatgatttctttcgtaaaaatcaagccctattaaagcttgaaaaagcgaatagtgaaaaagaattattactggaaaaaaccagaaacagaaacttgttgatgtggtttgtgttttcgtttgcagtactaagtgcaacctattatatttatgcactcaatcaaaaaagaaagcgacaaatccaagagcaatcctaccgcaccgaaacccgaatttccaaacgcatccacgacgaattagccaacgatgtttttactgcgatgacctttacacaaacccaaaacttggaaaatccgatttcaaaagaggcacttctagacaatcttgaacacatttaccaacgtactcgtgatatttcaaaagaaaacagcgacatccgaaccgatgaaaattatgaacccgatttatttggaatgattgacggatatggcgatactaatttaaatgtaatccgaaaagtaaacgagccaatccattggcaaaaaataacccccgagaaaaagatcaccttgcaacgagtgctacaggaatttttaatcaacaccaaaaaacatagtgaagcaaccgttgtgattattgacttttcggaggataggaaaaacatatcggtaacctacaccgacaatggaattggactaaaaaacacgcaacaacgcaagtcaggtttacaaaatgcggaaaaccgtattttagccgttaaaggaaatattacttttgacaatactattcaaaaaggatttaaagtaacagtagtcattcctaaataattgcgtatgttcaaaaagattttaatagccgaagatctcgattcaattagcctagcggtacaacatgtgttgaacgaacttcatctcaacttatatttacacgacaaatattgcgaaggagcattcttaaaaatcaaaaaaggattggttgataacgagccattcgacctattgattaccgatttatctttcaaagaagatggtcgggaaagcaaattggcttcgggagaacagttgattgctgccgttaaagccattcaacctaacattaaagtgattgtgtattctgtagaagaaaaagaataccgtattaaatcattatttgaaaaattaaccattgatggatttgtactcaaaggcagagaaagtttataccaactcaaaacagccattaaaacggtagcccaaaacaaaacctatatttcaccggaagtgcatcatgttttacaaaacaaaaccggttcgcaaattgacgaatttgacattaatcttcttaagtacctttcttatggaatcgctcaagaggaaatggaaaacgtgtttaaagaaaaaggcatcaaaccctgtagcaaaagcactattgaaaaacgattaggaaaactaaaaatccttttcaaagcgaataatcctgtgcacttggtagcgattgctaaggatttggggattatttgatttggttttctgttgtctgttcctgattacttcgactgacaacttactctcaatggaacacggatttagcggattagctaaagctaaacgcaggttttcacagattttgatagcttcgctatattggattaaaagggattgttcggaggacattttcatttgaataactttttttgctaaactgagactgaaaactgagactgcgactgaacactaactggtatgggaacacggatcgaacggattagctaaagctaaacgcagatttttacagattttgattgcttagctataatggattaaaagtgattcgttcggaaaacattttcatctgaacaacttttaattaaactttgactgaaaaactgtgactgcgacttttatggttctcttagaaaacacagaaattaataatttttctatataaaattgagattttaaacttcaaattctagctatcgaataacagataaccaacaacctacagagacaaaaaaatcttcaattacggattcccgtaaaacacctctttcttttcggcttatttttggagaaatttaacccaaaccccaacaaatgccacactttattattcaacaaaacgagtccggaatatggttttatgaactggtatctgaagaaggaagcgtattgctcacgggtactaaacacgattttaaacaaagttgccttggagaaattctatctgtacgaatgaatggcgtgtatgcagaaagttatgaacttcgtgtttcgccaagcaaagactatttttttatccttcgttcgatgggaagtgaaaaagtaattggcgtgagcgaaatgtacagccatcctgaaggttgcgaaaaagccattactcaaattaaaaagtacgttgaaaaagcgaaagtgaaataaattgagctgttttacgggaatccgtaaaatagtgattttgaatgtgtttaagtttggctaattaatctttaaaaattatcaaatgaaatcaaaattattacttattgtattaagctcattcgctattgtttcttgtaaaacaattaaatcaggcacatcaaaatcaattgatatttccggcgttggcgtaattcacaaacccgttatcgctgatttagaaattgctccgcagaaatcaaccaaaacgatggtgattaaaaacatggagttgttgtctaatgccaaaaatgaaattatccgaattttattaaatgaaaacaacgccgatttattggtggaacccaaatttgactcaaccaccaaaaacggtaaaaccgaattaaccgtaacaggttggttagcttattacaaaaacttccgcaccatcgaagaaaaagatttgaaattaattgaaatcagacccgcagtgattagacaagtggagacgaaccaatcgagtattttggagaataaaaaataagatgatgatggaaatacaaccacaactcaaagctttagccgaaaaaatcaatctgctaaaagacaaaattgatacggaagaatcgaccaaacacgcttttgtattgccttttattaatattttagggtatgattcattcaatccgaccgaagttgttcctgaatttactgccgatttaggtttaaaaaaaggcgagaaagtagattatgctatttttcagaatggcgacccgattttgattatcgaatgtaaaaattggaaagaaaaactaacggtgcacaactcgcaattgtttcgctattttcatgtcaccaaaacacgattctcgttattaacaaacggcattcactatcaattttttaccgatttagagcacacaaacaaaatggatgaaaagccatttttagaatttgaaatcaccaatttaaaagacaatgtagtgagcgaaatcgccaagtttcacaaaatgacttttgatgtgaacaagattgtaaacaacgcaagttcgctcaaatataccaaagaaatcaaaaagcaaatagacaacgaacttgaaaatccgtctgcggagtttgtcaaattgtttgctaacaaagtctattccggaaggctgactgaaaaagtagtagaagaatttaaagaattggttcaaaaaggttttaaccaatttatcagtgaaaagatcaatgaccgattgaatgccgctcttaacaaagaagctcaaaaacaaaaagaagagcaaattgaggtagctcttgaagatgaaaaccgtatcaccaccacagaggaagagttggatgctttccgcattgtgattgccattttacgccgaaaactttctgtagaacgcattgttcaccgcgacacgcaatcctattttggtattctgttagacgacaataaccgcaaacctttatgccgtttacacctcaacggaagcaaaaaatacataggcctgtttcatgaaaacaaaaccgaaaccaaacaaccgttgcaaagcattgatgatatttatttgtttgagaaggagttgttggagacggttgggatttatgaaggggagtaatagtaaaaaaaacatccataatgggtgttttttttatgcaaaaaaagtcccaccgaagcaggactaaagattttcatctacggcatatagccttattgtgataagattaaagattagaataaaattatctattgcaaatataacaataactttttttagttggattacggatttccgtaaaattgttaattttctttttattacttttagaaattgtataaaaacaggttattatggcaagaattttaggattggatttggggactaatagtattgggtgggctattgtggatagagaaggtgttgatttttctcttgttgagaaaggtgtaaggatattttctgagggagtaaagtctgaaaagggtattgaaagttctcgtgcagctgagcgaaccggctatagaagtgcaagaaaaattaagtatcgcagaaagttaagaaaatatgaaaccttgaaagttctttcagcaaacggaatgtgtccattatcgattgaagaagttgaagaatggaaaaaatctagttttaaaaattatccgctaaaacctgaatttataaaatggctgcgaactagtgaagatgaaaatattaatccttattttttcagagataaagcaagtaaacaaaaagttgcattgtatgaacttggaagagctttgtatcatattgctcaacgaagaggttttttgagcaatcgtttagatcaaacagccgaaggagtttttgaagagcataatcctcaaatacaaattttaattgaggatttagataattcaagttcaattttaaatgatttaaaggattactttattaatcttggaattattgatgaaacagaaaaaggaggttttaaaaaagagttggatgaaggcgagaaaaagctgaaatctctttataattctttggtagcaattgctaaaaagaatgaaagtgacattgtgaattgtaaagaagaacttattaccagattaaataagaaagaagatttaggaaaagtgaaaggtgaaattaaagatatttcacaagctatgcttgatggaaactttaaaactttaggtcagtatttttttagtctgtacaacaaaggaaaaattagaaatcaatatacttcaagagaagaacattatttgagtgaatttatagcaatttgtaaagttcaaggaattcaaagaattgatgaaaatgaaaaacttccagaaaagaaatttactggtttagcaaaagacttgtacagagctattttttttcaaagaccattgaaatctcaaaaaggattgattggaaaatgttcctttgaaacaagtaaatctcgttgtgcaatttcacatcctgattttgaagaatacagaatgtggacctatttgaatacgattaaaattggaactcaaagcgaaaaaacattgcgttttcttacacaagaagaaaaattaaaattagttccgaaattttacagaaaaaatgatttcaattttgaagttttagctaaagaattaattgaaaaaggtgcgagttttggattttataaatcttctaaaaagagcgattatttttattggttcaattacaaaccaactgatacagtttctgcttgtcaagtttctgcatcattaaaaaatgtgaccggagaagattggaaaacaaaaacattcacttacaaaactttaaatgctaaaaaagaagagataataaaatcagttgattacaaagatttgtggcatttactatcagtagcaacttcggatgattatttatatgaatatgcaaaaggcaaactaggttttgatgataaaaacgcaaaagctttcagcaaaatcaaattgaaaaaagattttgcaagtttaagtttgtctgcaattaataaaattcttccttacatcaaagaaggattgttgtattctcacgctgtttttatggcaaacatcgaaaacattgttgacgaggatatttggaatgataaacttcaacgaaaatacattcaaactcaaattgctgaaatagttgaaaattatacgtttgaaaaaagtcaattagaaataattaatggacttattaaagattgtaaactaaaagaagaatattactccaaagaagcagaatccatttataagagtgatttagccagcaaattagttttattttataaaaatcaaaccattgaaaacgaatctgaacaaaaagctattcttgatgaggtatttccaatttttattgagcaattaaaaaagcaggaattcataaaagtaaaacgattggatgaaaaagttttggaatttctttcaggagaaaatcaagacggtgaagttttttgtagtaatccaaaaagactgaaaaagctttatcatccttcagatattgaagtctttaaaaggaaaattattaaagatgaatttggaaatgaaaaagtggttttaggaagtccattgacaaattcaattaaaaacccaatggcaatgcgagctttgcaccagttgagaaaagtgctgaacacgctcatatttgatggtcatgttgatgaaaatacacgaattcatatagaaatggcccgtgagttaaacgatgccaacaaaagaaaaggaattcaggattatcaaaatgaaaataaaaaattcagagaagaagccattaaagaaattaagaaactatatttcgaagaatgtaaaaaagaagttgaaccaactgaagatgatattttaagatatcaattgtggattgaacaagggaaatgtgaaatttatgaacaaggaaaaaacattagtatttgtgatattataggaagtaatcctgcttatgacattgaacacactattccaagaagtatttctcaagataattcacaaatgaacaaaacgctttgtagtccgcattttaatagggagattaaaaaacaaaaaatgcctattgaattatcaaaccattctgaaatattacaaagagttaagcattgggaaaatcaagcaaaagaaatagacaatcttatagagggtttgtctcgctctataaagtccgcatcaaccaaagaagacaaagacagaaaaattagaaaaagacattttttatcattaaaacgagattatcttcaaggaaagtacgaccgttttatttggacagaaccaaaagtaggctttaagaacagccaaattccagatactgggattataacgaaatattcgcaagcttatttgaaatcctatttcaaaagagtagaaagtgtaaaaggtggaatggtagcagaatttagaaaaatatggggaatacaagaaagctatcaggatgaaaacggattcaaacattataaaaataaagacagaagcaaacacacacatcatactattgatgcgattactattgcctgtatgaccaaagacaaatatgatgttttggctcacgcttggacattagaagataaagagcaaattcctgaggctaaaaaaatacttgctgcatcaaaaccttggaaaacctttaaagaagatttagaaaaaatagaagaagaaattttggtttcacattatacgcccgataatgttaaaaagcaatccaaaaagatacttagagttcgtgggaaaaaacaatatgtagcagaaatagaaagagatgaaaaaggaaaggcaataccaaaaaaagatgctaatggaaaagtgatctataagttaaacgaaaaaggagaaaaaattccaagatttcaacaaggcgacactattagaggttctttgcatcaagatagtatttatggtgcaatcaaaaacccattaaatacagaagaaattcgttatgttattcgtaaagatttagaaagtttaaaagccaatgatattgaaagtattgttgatgaaaccgttaaagaaaaagtaaaagaagcagttgcgaataaagtgctgttgctttcctcaaatgcacaacaaaaaaataaaattgatggaatagtttggatgaacgaagagaaacaagttccaatcaataaagttagaatttatgctaattctgtaaaaaatcctttagaaataaaagagcatagtttattatcaaaatctcgacacgagcataagcaaaaaatatatggccaaaatgacggaaactattgtatggcattatacgagggaaatgattcaaaaggtaaagtcaagagaagtcatttattaataaatatgatgggggctgctgattacttcaaattgagtaattcggataaagatatgtatccaatagcaccagaaaaagacaataaaaatttacctttaaaatatattttaacaaagggtaaaatggttttgatttataataaatcaaaagatgaattgatagatatgtcatcaaaaatgttgttagagagattatttcaaattacccaaattgatgtagaaaaatctgcggaaataaaattattacatcacattgaagcaagagaaaagaaggaaattacagaagctatgggattaaaaacaggaatgaaaggtggaaaaaatattgggaatcataaagaatatccttggattaaggttggagtaaattcgtttgattgtttagttcaagattatgattttacaatttcagcttcaggcaaaataattttgaaataacttattcattgttctttgacataaagattttgtaacgttaaacagccaaatcacaactgaagagaacggatagaatcagcagagaagcaggggctttattctgtagtttaattaaaaattatagggtaagatattttcatttgcgttgttgtttcgtttttgtgagttgtggtttgattaaagattagaaaacacgatattacattaatcgatttaggtacaattactacgttgtggtttgattaaagattagaaaacacgatattttgtaagcacagcagaatcaaacggtcaagttgtggtttgattaaagattagaaaacacgatattagctagacaagttgcaggtatattaggaatgttgtggtttgattaaagattagaaaacacgatattacggtacttttgaattgaacaaaccttacagttgtggtttgattaaagattagaaaacacgatattgacaccgattcaacttgacaaaataaacaagttgtggtttgattaaagattagaaaacacgatattgagagcaagtttagaaacttacgattctaagttgtggtttgattaaagattagaaaacacgatatttgcatgatgaacaatttacaagtgcctaaggttgtggtttgattaaagattagaaaacacgatattgatttatatggttatttctgggtagtaacgttgtggtttgattaaagattagaaaaca

SEQ ID NO: 3130 - DNA, 14864 bp, synthetic construct
  misc_feature 1..14864: note = Synthetic
  source 1..14864: mol_type = other DNA
ccgaagccgctctaattttttctatgatagcttataatttaatgtctttatttagaatttttgtattacaagaaaaactcaaaaaacgttgtccacactaagatatagaacttttgctgtaggagcttattttgaaaaagttggagatactataaaactaaaaatagcactaacaaaaaaacgcagaaaatggttcgaaagcatttgggatggtcctattgacttaacaaaggaaattcctaatgcgtaatctggattaaagatttataatctatataaaaaataaatcccacggagtacgcgggattttagatttctctacggcatatagccttattgtgataagattaaagattagaataattttatctgatacaaacttaaataaaaaaaaattataaagtatatggttttccgtattttataaaaaaatgttttttttatatttaaaaccttataaacaacttgaaaaactatgacaaaaatactagggttggacttgggaactaacagcattggttgggcaattagagaggatgaaaatgaaggaataaaacaaattattgataaaggtgttcggatattctcggaaggagtaaaaactgaaaaaggaatagaaagttcaagagctgccgaaagaacagggtatagaagtgcacgaaaaataaaataccgtagaaagttaagaaaatacgaaacgttaaaagtattagccataaatggaatgtgtccactttctgttgaggaagtagataactggaaaaaatcaggttttaaagagtaccccttaaaccctgaattccttaattggttacgaaccagtgaaaacgaaaataaaaatccttattattttagagatgtagcgagtaaacaaaaagtgactttatacgaactaggtagggccttatatcatatagcgcaacgaagaggttttttgagtaatcgattagatacatctgccgaaggcgtttatgaagaacataatccacaaattcaaaatttaatagaggatcttgatacccctactgctattcttgatgaattaaagaattattataacaatcttggaattatagacgaaacggaaaaaggtggttttaaaaaggagctagatgaaggagagaaaaaattaaagactttatataattcgttagttaccataacaaaaaagaatgaagctgatattacaaagtgtaaagaagaacttattgcccgactcaataaaaaagaagatttaggaaaagtaaaaggtgccataaaggatctatcacttgctatggaacaaggcaattttaaaaccttgggacaatattttttcagcttatataacaaaggaaaaattagaaatcaatacacgtctcgtgaggaacattatctagaagaatttataactatttgtcaagttcaaggcattcaaggcatagacaacgatcaaaaaatacctgaaaaaaagtttacaggtttagcaaaagatttatatcgcgctattttctttcaaagacctttaaaatcacaaaaaggattaattgggaaatgttcttttgaaaaaacaaagtcacgctgtgctatttcgcaccctgattatgaagaatatagaatgtgggcttatttgaatactataaagataggcacgcaaagtgaaaagacaatgcgttttttaacccaagaagagaaattaaaattagttccaaaattttacagaaaaaacgattttaattttgaagttttagccaaagaattaatagaaaaaggagcttctgcgggctactataaatcctcaaaaaaagacgaattcttttattggtttaattataagttaacagatacggtcccagcttgtcaagtagcaacagctataaaaaatgcgatgggtgaagactggaaaacaaaaaccattacttataccacattcaatgctaaaaaagaagaagttactaaaaatataaactataaagatctttggcatttactagccgtttcaacctctgatacttatctatatgattttgccatagataaattaaaattagacagcaaaaatgccaaagcttttagtaaaacaaaactaaaaaaagattttgctagtttaagcttagcagctataactaaaatcttaccttatttagaacaaggattgctttattcgcatgcggtgtttatggcaaatattgagaatattgtagatcaagaaatctggaaagacatagaacaacgcaactctattcaaacaaaaataatcgagttagtagatgattatacatcagaaaaaaacagattagaaatagtaaacggtttattaaaagaatatagtaaagaggatgaacaaggtaaaaaagtatattattcccttgaagcagaacctagttttgcaaccgatttaagaaaaaaattggtccgtttctataaagcaaatgaaattgaaaatgaagaacaacaaaaccaaattttcaaggatttatttactttactaatcgaacaattaaaacaacaaaaattcatcaaaatagaacgattagatgaaaaagtagtagcgtttctaaaaggcgaaaatcaagaaggacaaatattttgtagccatcctgaaaaattaaaaaaattgtaccacccatccgatattgaagtttttaaaaagaaaataataaaagatgaaaatggtaatgataaaatagttttaggaagtcctttaacaaattctataaagaaccctatggcaatgcgtgctttacatcaattacgcaaggtattaaatactttaattatcgatgagcaaattgatgaaaatactcgtatccatatcgaaatggcacgtgaattaaacgatgctaacaaacgaaaaggcattcaggattttcaaaatgaaaataaaaaatttaaagaggaagctataaaggaaattaagaaattatattttgaacagtgtcataaagaggtaaaccctacagaagaagatattttacgataccaactatggttagagcaaaataaatgtgaaatatatgagacaggtagcaatataagtatatgcgatataataggtagtaatcctgcttatgatatagaacatactatcccaagaagtatatcgcaagacaattctcaaatgaacaaaacactttgtagtcaacgatttaatagggaaataaaaaaacaaaaaatgcctatagaattagcaaactacaatgaaattttaccaagaattgcacattggaaaaaacaagcagatgaattatctaggcaaattgatgctatttctaaatctatcaaatcggcctcaacaaaagaagcaaaagataaaagcataagaagaagacattaccttactttaaaacgagattatattcaaggaaaatacgatcgttttatttgggaagaacctaaagtaggctttaaaaatagccaaatccctgatacaggcattataacgaaatatgcacaagcgtatttaaagtcgtattttaaaagagtagaaagtgtaaaaggaggagcagtagccgaatttaggaagctttggggtattcaagaaagctataaagatgaaaatggatttaagcaatacaaagaaaaagacagaagcaaacatactcatcatactatagatgccataactattgcttgcatgcctaaagacaaatacgatctactagcacatgcttggcgactggaagaagagcaagataaaaaagccgcaaaagccattattgaacaggccaaaccttggaaaacttttaaagaagatattgcaaaacttgaagaagaaattttagtgtctcattatacacctgataatgtaaaaaaacaagctaaaaagattcttcgcataagaggtaaaaaacaatatatagccgagattgaaaaagatataaacggtaaactaacccctaaaaaagatgcaaatggcaaacttatttataaacttgatgaaaaaggcaataaaatacctcgactacaacaaggcgatactattagaggttcgttgcatctagatactatatatggagcaatagaaagaaaaaaagaaaacggagaaaaagaaataagatatgttgtaagaaagccaattacaaaagatttttctgaagcagatattagtaaaatagtagatgaaggcattcaggaaagaatcagaagaaatggtttaaaaaatgtagtaacaaaagaagggattatcgttcttccagaagaaaaaattacaaatggcaatactgaaaagtatttaaaagaaatgataatcaaaaaaattagactctatcaagataatgttaaaaaacctttacatataaaaaaacatagtgctttgtcaaaatcaaaacaggaacacaaacaaaaagtctatggacaaaacgatgaaaattatgctatggctatttatgaaggagtagataaaaaaggaaatgtgaaacgaggatttgaaatgcttaattatatggatgcaggaaattattttaaaaaaagtaatgatttaaaaaatgaaaatccaatagtgccaaacttacattttaaatctcaattacctttaaaatatataattaaaaaaggagatttagttctgttttataaagaaaataaagatgaaatattagaaataaaagataaagaattagttaatagactctataaagtgattgcatttgaaagtgatggaagaattcaatttaggcatcacaaaacagctttgcaacaaagtagtacaaataaagaagagctaactatagtaaaatttatggcagataatgggttaaaaaattctcaaattgattttacaaatccattgccttggttaagattaacaatgtctaattttaactttttgttgaataaaaaagagtttgaaattaactcaataggaaagatttcattttattaatagaaataaataccaataagtaattttaaaatacatcatgtttttaaaacttataaagcttagaagttcattgacattttagtttttatatatttttaggagtcaaaatattaatatttaatgatataacaatttactgtttttgatttgagttttattattggatcggtgttgtggtttacaaacacctagttactatttgttagaggtgtgtttgtgaatctcccgttggtcgatttgattaaagattagaaaacacgatattgaatggtagcaattccccatttataaaaacgttgtggtttgattaaagattagaaaacacgatattaacttttctccacatttcatctttaatcagttgtggtttgattaaagattagaaaacacgatattattttcaaaaacgagtttatagaatattggttgtggtttgattaaagattagaaaacacgatattcaaaagacgattagatgattacggtttgccgttgtggtttgattaaagattagaaaacacgatattcttcctgggtgcaccagtaaacaaaagccagttgtggtttgattaaagattagaaaacacgatatttcattgggtattgtttatttcgataaacttgttgtggtttgattaaagattagaaaacacgatattgtgcctatgggaaagacaccgtatggagccgttgtggtttgattaaagattagaaaacacgatatttagcgatttattttataaaattgtttgtccgttgtggtttgattaaagattagaaaacacgatatttctgccaataacataatctatgtcttggtagttgtggtttgattaaagattagaaaacacgatattcgatatagtcaccgatgatatcagtacgttgttgtggtttgattaaagattagaaaacacgatattttttttacttacttcctcccgtaagtttagttgtggtttgattaaagattagaaaacacgatattcgatatagtcaccgatgatatcagtacgttgttgtggtttgattaaagattagaaaacacgatattaaaataacacctggaactaatgagcaatatgttgtggtttgattaaagattagaaaacacgatattttgaaatctgaccagttgtaagtggtagcgttgtggtttgattaaagattagaaaacacgatattactttccgccatggcaaaagcaatgctatcgttgtggtttgattaaagattagaaaacacgatatttctccaggagtggttgcgcctatcggcacagttgtggtttgattaaagattagaaaacacgatatttgatttatgggaaaaatctttatatggtgggttgtggtttgattaaagattagaaaacacgatattcactctgcatttaggaaatgaaatgttatagttgtggtttgattaaagattagaaaacacgatatttttcagcgcatcggggagtttgtcagagtagttgtggtttgattaaagattagaaaacacgatattcaaatacatattgttcataatgggcgttgtgttgtggtttgattaaagattagaaaacacgatattttttttctgcaaagtccaagctcaattcagttgtggtttgattaaagattagaaaacacgatatttgtacacctacgaagaaatacgctttatatgttgtggtttgattaaagattagaaaacacgatattaaaaacgttgtgcgccctgccggcggggcggttgtggtttgattaaagattagaaaacacgatatttccaataatctattgaatttatcagaataggttgtggtttgattaaagattagaaaacacgatattcaaaaagtaatcattcaagattacacccagttgtggtttgattaaagattagaaaacacgatatttatgcgggggtgaaattgcaagtcatcaagttgtggtttgattaaagattagaaaacacgatattatacatttaaaacatctaaataatccctcagttgtggtttgattaaagattagaaaacacgatattccaaagcatctaaacacttcatctttgcagttgtggtttgattaaagattagaaaacacgatattaagttctaaatcgccaaccataactacacagttgtggtttgattaaagattagaaaacacgatatttgacgcttgggtctgatggcgtagccgcaagttgtggtttgattaaagattagaaaacacgatatttcatttgacggaaagccaagagggcttggggttgtggtttgattaaagattagaaaacacgatattttagaccagtcgaatcgagcaatgaaatatgttgtggtttgattaaagattagaaaacacgatattagttgaggtgtaatcttctgatattaaaagaattagtttaaaatatcgttttaaaaaatgcttcttttttgccttgattaagcaagattgaagcatttttttgtttctaaaataattctaattgagagggttgtggtgcggtaggaacctctgttttgccccaaaagttttgaatgttaccaaattgcttgtccgtaatccgtaaaatactcactttgcctaatggaggcaaaagtttataaatgcgtttttcgtgtacgtcagcactttcactactagcgcaatgccgtatgtatactgagtactgcatcatattaaatccatctttaagtaaattgtttctaaatgaagaagcatttttgcgatccttctgggtatccgttggtaaatcaaaaaagacaaataaccacataattcgataaccatttagttccataatttaggatattttattttcttccgctctccaataaaacaaccttgtagggaataggctgttttttgtaatcctactattaaaggacttttctcttctttaaaataaaccgttctggttaaaatttgaagaatttcagatttaattgccgtcgttagttcttgatcaggatagttttgtataatttcaaaaactttttcatcaacaataggtctaaaaggttccataatatcatctgctagcgcaaacgcattgtatttgcttttgtgatgaatgcctaaagtatttaataatccgcttccagaaagcgcacgagccgtagcggcccttaaaatagcataaccatagtttaagaaatgattcggataatcaccaaaacgttctcgtttaaaatcaaaatcaaaaaacgctttccaatattggctagctgctacagcctccatattagtgctatcaccactcattactttggatgctaaaaatccaaatgaattttttttacccgttattttttcaagtaataatccttgatgggttattttttcaataattgtttttttaatgggatactagcctctatttgtgctttaaaaatctcttgctggatatgatgactgtttaaatttaaaaaaagaccgttaggtaaatgatttttatgacaaacaataaccgcagagttgttctcaattaataaatttagagcaggaatgcttaggtaaatttctgggtgatctactactatacagccaatatcttctataggaatagtactttcacgttccgctgttttaatgtgtaactgattgttttttgttaacacagtacatttgttttcgattaaaatagatctttttaacatagttttttaatttgtttaaataaaaatactaaagtctgtttgggaagaaaaatcaaatcgtttaagtgctttttttaccttattacggacatttgaatattttattctaaagaaaataaaggaatccttaacaatcttttttatatttgaatcatgattttagttacaggtgcaacaggattagtaggttcacatttaattttaaacctgatgaattcagggaaaaaagtaaaagccttgtttcgtacagaaaaaaacaaggaacgagttaaaaaagtatttgaatatcataacaaaaaatctcagtttgatcaaatagattgggtcttaggcgatgtattagatcttcctgctttagaaaaagcttttcaaaacgtaactcaagtttatcattgcgctgctttagtttcttttgacccaaaacaagaagaaaatttgagaagaataaatgttgaaggcacggctaatatagttaaccttagtattgattttgcagtacaaaaactatgttatgtaagttctattgcagcattaggtgatttaaaagaatatgaaagagtaataacagaaaaaacagagtggaacccagaattgtcacatagtgattatgctatttctaaatatggggcagaaatagaggtatggcgtgcttatcaagaaggattgcctgtagttgtcataaatccaggggttattttaggtccttttttttggagagaaggaagtggagatatttatactaaagtagcttctcaaattcctttttatacgaaaggaggtactggttttgtatcagtaaacgatgtagttcatatcatgatgaaactaatggaaagcactattgtaggagaacgttttatagcggtatctgaaactttgtcgtaccaagaaataacaaacttaatagcggatagattaaaggttaaaaaaccaactattttagttgaaaagaatgctctaagattagcttatatttttgattggattttaggcgtatttggaaaaacgagggttttctctaaagatttaattcgtactttgcaaacgacagattattatgatcattctaaaactaaagaaacattgggttttgagtttacaagaattcaggattacttaaaacataattcatcttgttttaaatgattttaattaagagaattatgttttttagcttgaggtcttttttaacttttccttttttaattttgcttgatatagtttttctattttaagcctctccgtttttatttttcctatagcattgtcatacatttttttataagtaggaatatcagaagaataatatttattgctatttactagttgtaaactatcaatacgatactttttatatacatattttaaaggatcaatttgattttttggaagcaatttggcatcatgtccttttatagcttggattaatgccaaatcgtatattattttttccatagttgcttcatctattaaattgtcaggctttttaatggtagaattctgacaagaaataaaaaagataattaagaaaaagcaagctattttattcattttataagtgtattttagttatctatcggttaaattctaatcgttttcctttttgaaggtcttttacttgattgttttcataaactaaatgaccatttacaaaagtatgtgttattttggatttaaaagtgtaattttcaaaaggagaccaagcacattggtataaaatattgtctttagaaacagtccaaggagcatttgtatttacaatagctaaatctgcgtaatatcctttttttataaaaccacgacggtctatttgaaataatttagcaggattgtgtgccattttttgaacaatacgttctactgaaatttttccttcgtgaaaagcttcaaacagagcaaccacagcatgttgtacaagaggaccaccagaaggagcacttgtgtaagagttttgtttttcttctgcagtgtgaggagcatgatctgtagcaattacatcaatgcggtcatcaagtaaggctttccataatgcgtctttatctgctgctgtttttacggcaggattccatttaataagagtccctttttcagcgtaatctttattagtaaaccataaatgatgaacacaaacttctgcagttatttttttctcttctaaaggaatagaattgtcaaaaagttccatttctcttgcagtagaaagatggaatatgtgtaaacgagcacctgtttttttagctaactcaatggcttttgaagaagaaatataacaagcttcttcgcttctgattaaatgatgacagtccatagggatgttgtcaccatatttttctttataagtagccaagttgttttggatagttgtttcatcttcacaatgaacacaaatgatcatgttcgtattactaaatattttttcaagtacttcttcacgatccactagcatattaccagtagaagaacctaagaaaattttgatagcagctacattacgtggattcgtttttaaaacttcttctagattatcattagtagctcccatcataaaggagtagttagcgtaagaagtttgagaagctattacgtatttttgttctaataattcttgtgttacagcattaggtaccgtattaggttgttccataaagcttgttataccccctgctactgctgctctagattcagaagctatagtgcctttgtgggttaatccaggttctctaaaatgaacttgatcatctatagcaccaggaattaaataattgttttgggcatcaataacttgaaagtgttcttgaggaataatgttttcagcaatgtctataataaactcgttttcaattaaaacatctcctttaaaaatttgaccttcatttactatttgagcgtttttaattaaaatagtgttcattgtgtattgtttttttatagtagattaaacatttttcgtagtcgtaacatgataacgccaaaaatagcttcacgtataatagcaccactcattttagattcgcctttagtacgatcagtaaaaataatagggacttctatgattttaaaatgattggcaaaagttctgtatttcatttctatttgaaacgcataacctgtaaattttaatttgtccagatttattttttctaaaacttgacgttgatagcatataaaaccagcagtggcatcttgaatctgcataccagtaatcattcgaacataaacagaagcaaaataagaaagtaaaacacgatttaaaggccagtttacaacatttacacccgtaatgtatcgagaaccaatagacatgcccgcattttgtgacttgcaggcttcataaagtttttcaaggtcgttaggattgtgagaaaagtcagcatccatttcaaaaatataatcataatgatgctggatagcccatttaaaaccatgtacataagcagttcctaatcctgcttttccttttcttttttcaagatgtaatgcttcaggatattctttttgtaacttaattacatgatcagcagtaccgtctggagagttatcgtctacgattagtacatcaaatttttttggtagagcaaaaacagctcgaataatggcatcaatgttttctatttcgttgtaagtagggatgataacgatggagtcctgcataagtgtattgaattgtgctgcaaaaataatctttttaaattatgtgcgtcctaaattgtttataattcgataaagggaatgaaaattttgtaattttgtgctatgaatgactatgagttaattcctcgaattgtagagaataaaaattggattactatagtttttattgtagctataggggttgtaacgattactaaggcggtttttgaaaaacgctttactgattttgttaggttattatttaataataagtatataaaaatatataaggatccgagtaacttaatgacttggttcacgattttattgttttttgtacaattaatttcgttttccttctttattcagttagtgctgtcttattatggatatacaaccaagactaattggataagttttattcagattgttacttttttgacgtttttcgttttgtcaaaatatttaatagaaaaaattattgctacttcatttgatacagagctttttattgaacagtttaatctctttaaagtaagttatagaacctatttaggtatgttgttgctacctgttgatatggtgttatattatactaatttaatgaatcagtatgttattctcggagttttggctataattttaataataaatgcagtaacttatcttgtgtcattgcgaaattatcaaaatttacttttaaggaagttgttttattttattttgtatatttgcgccctggaaattgcaccgtatttttttatgtattattacattgtaaataggtaaagcataattgtacaaaacaacattttttgactatgaaagtgaaaacgattttagtatcgcaacctgagccaaaagttgagaactcgccttattttgatttacaaaataagcataaaataaaagttgattttagaccctttattcatgtagaaggagtgcctgctaaggaggttcgcgctcaaaaaattgatttgaataattatacagcgattatcttgactagtaagaattctgttgaccatttttttagagtagcagaagagatgcgttataaggttcctgaagatttacgttatttttgccagtctgaagcagtagcttattatctgcagaagtatgtagtttatagaaaaagaaaaatttatgtaggacaaaaagattttgccgatatgtcttctttttttaagaaatacaaagatgaaaaatttttgttacctgcatctgataaattaaatgcagatgtacctcagactttaaataatttaaaattagattggactccaggtactttttatagaactgtaatgagtgatttatcagacttaaaagatgtatattatgatgtattagcattttttagtccaacaggtattcagtcattgtttaaaaattttcctgattttaaacaaaatgatacacgtattgcagtatttgggagtacaactcaaaaggaagctattgatcacggtttgcgtatagatattatggcaccagctccaggagtaccctctatgactatggctcttgaaaaatatgtagctgaggtaaacaaaggaaaataattttataaatatttttttaaatcccgattttttcgggatttttttttaagatttagcttaaaagcatttttaaagctttatacttatttagataacgaaaattgattgataatctgcaaaatttaaaatcatgaaaggaacgattagtactattataaagaataaaattgcaacgattactttttcgcaccctgctagtaattcatttccaagtgaacaattaaaatcattaacagaagaaattaatgcggttggtaaaaatgaagatgttgcagttgttgttttacaaagccaaggaataggggctttttgtgcaggagcctcttttgatgaattattggaagtaaatgatctagaaacaggaaaagttttttttagtggatttgctaatgttattaatgccatgagaaaatgtcaaaaaataataataggtagaattcaaggaaaagcagttggtggaggagttggcctagtatcagcttgtgattatacttttgctactaataatgcagctataaaattgtctgaaatagctatagggataggaccttttgtaatagaacccgctgtttcaagaaaaataggtaaatcagctatggcagaaatgacactttcacctgctgaatggaaaagcgcagaatgggccgtgcaacataaattgtattctaaactgtttgaaaatttagaaactatggatcaagaattggataaattcgttatgcaattagcaagttataatccagaagctttattagaatttaagagagttttatgggaaggaactgatcattgggatgaattgttatatgatcgtgcagctatttctgggaaattagttttgtctgattttactaaaaatgcgttgaacgccttcaaaaaataaatggaataaaggttgttggttaaaaaaaatagaataatttatattgttaacccctttataagactagataaatattagatacccttgttatagggtatctaatatcttttttaaatccatattaatgttccggttgatgtgctggttttaaaaggtcattaatggttttaacaggattaaaagtttcaagaggaacttctacgaaaagagtaatccagtttgccatactgccattccataatcctggtaatt

SEQ ID NO: 3131 - DNA, 14846 bp, synthetic construct
  misc_feature 1..14846: note = Synthetic
  source 1..14846: mol_type = other DNA
ttcgacagtcaacacaatggaaatgtctggtcagaattatggaggtctttttgctaatgatactttgaaagtgaattttgaaataaaagaggaggtacaaaacctgcagcttttatataccactacaggtcatggcggatgggaaaaaggggatgagtttgtaccaagaatgaataaaatatttgttgatggtcaggaagtttttaaaagtattccatggcgaacagattgtggtacatatcgattatctaatcctgcttcgggtaattttgccgatggtttatcttccagtgatttaagccggtcaaattggtgtcccggaaccttaactattccttatattatttcactaaataaattaccaaaaggtaatcatgtaatcgaggtagtcatagaacaaggtcccaatgaaggtcccagtacaaaccattggaatgtttcaggagttctggtagggcaattgactaatttgaatgttgaataaaaatatttttataatatgactttgaactcatagctggaggaattctgcagattcacaaaaaagtaaaatttaaagtgctatattaggtcattattaatgtaaaatcgaaaaatatttagtcttttagatgtatggattcgaattctgttatcaatttaataaatagcagggctttataatgtatatcacttaaaaagtagggattttaatagtaaaataaagggttctgagtaaaattttacccaacaccttttgaaagatgttatttgtcgaaataatcatttagttaacaaaaccgattcttaaatttaacatgttattaactcaaaaacaattaaactatgaatcaaaacgtactaaaattactgttcttgtttttcctgtttggttttcagaatcttcaggctcaaacagtgacagtaaaaggaacaatcacagacgcaggcggaatgccaataccaggagcaaatgtgaatgttaaaggaaccagaactagtacatcatcagattttgatgggaaatacagtattagtgttcctaatcaatcagcaattttggtatttacgtatgtaggtagtgctactaaagaaatttcagtttcaggatcaactacaattaatgtaactttaagtgcgaataaccagcaattagcagaggtggttgtaactgctttaggtataaagaaagaaaggaaggctttaacgtattctgcacagacaatttctacaaaagaactttcagaggccagatcacttaacgttgccaattcactttcaggtaaagtagcaggtcttaatttctctactactggtactggtgttggaagttcttctaggattacacttagaggtaacagatcgcttacaggaaataaccagccgctatttgtaattgatggtattcctatggataatacggtttcttctccttctactgatattggggggacaaccagttttgatggtatttcaaatattaatccggaggatattgaatctatgaccgtattgaaaggaccgtctgctgctgcattatacggttcacgtgcaagcaatggtgttattgttattactactaaaaaaggatctaccaatggaaaagctcgtatttctgtatcttcaaactttatggcttcttctgcctataatttattaaaccagcaaaatgtatatggtcaaggaagtgcaggtgtttataatgcagcttctgtaaccagctgggggcctaaaatggaaggtcagcaagttgcggcatggcagcttgtggctaatcctgattatgccggacctgctacttatgcatttacaccacagcaaaataatgctacagatttttttaagacaggttacagtttatcaaaaaaccttacagcatcaatggggaatgaaaaaactcagggttatttttcttatacaaatactaatgcaaaaggaatcatagtaggaaatgatttaaatagacataatttcaatttacgtttaacgagtgctttgactgataagtttaaattagatgccaaagtaaattatattaatcaaaaaattgaaaatgctgtaggtgcaggtgaaggatcaattggcgaagcactttatactatgccaagaaatttaccttacaatcaatataaagatttcgaatatattgatgatgcaggtcaaatacaatataattatataaatggagatgtattaagtacacttggatccaatccgttctggcttgctaaaagaaatttaagagcagacgagagaaacaggattattgcttttacgtcattgacttatgatcttactagtgatttaagtttaatggtaagaactggtattgatcaggctacaaataaagctaaagttgcccgttatgcagcagtttcaatacttaatcaggattttggtagctattctgaatcaatttcggaaaatatagaattaaactctgacttccttttgtcttataaaaaacaatttggagattttagactaaatgttaatgcgggaggtaatgctttagttcaaaaacgagatggattaagcagtggaggcactttgagcagaagaaactattttgcattaacaaaccttcagactactactgttacacctgattatagtgaaaagaaaatcaattcattatatggttcatctcaactttcttataaagattatttatatttagatgttactgcgcgtaatgactggtcatctgctttgcctgcaaataacaggtctttcttttatccttctgtaggtttaacaggtattctttctgatatttttgatattaaatctgatgtgctttccttcttaaaagtaagaggatcttatgcacaggtaggaaatgatacaaacccatatcttttagctaatcagcttacttattatggttttaacggtggggtagtacaatcttctacgttacttaacaatcctaatcttaaaccagaaatttcttcttcacaggaatttggtttgaatacacgtcttttcaataataaaattggttttgattttacctggtttcaaacaaatactaaagaccagatatttactataaatgttcctgaatcatcaggttattctaagcaagtagttaatggtggagaaattcaaaacagaggttttgagatggttttgaatgcaaatatttttgatgatagtaacttttcatgggatgcaactgctaactttgccacttacagaactaaggttttaagtatttttgaaggtcgtaatgagctaaatcttgctacaggctatgaaagattagcacaaaccattgttaaaaaaggaggggattatggtgacttgtatattcgtggtttccaacgtaatgataatgggcaagttattgtgaatgctacaacaggtttgccgttgtttacttcaggatttagtgttcttgctggtaattttaatccagactggactgcaggtttacaaaataaatttaaatacaaagattttagtctaagttttcttgtagattttcgcattggtggtaatgtaatttcatattctcaggcaagaatggctggtgctggtgtaagtgatattacactaaacggaagagatggttttgtagttaatggagttgttgataacggtaatggtacttattcgccaaatacaacatcaattactgctgaaaattattggtcacaagtagcaagcagagatccacaatcagctgaggactttgtttatgatgccacaaatatcagattaagagaagtagttttgggatactcactaccaagtaaattattaacaaattctccttttaccagtgttgatttgtctattgttgggcgaaacctgtttttctttgtgaataaagcgaaatactttgatcctgaacaaggtgtaagtgttggaaaccttcaagggatcgaatcttacaatattccaactaccagagattttggatttaatgcgaaactcaacttttaaaaaaataaaacatgaaaaataatataatcaaattttttgcaatcgtttttctgtttcaagtaacaggatgtacttcggattttgatgaaaccaatacaaatccaaatacacttacatctgatcagttagatgcaacattggcaggacctgcttttgctaatgccttatataaaggtacaggtaatgcttcatggagtcttccagatgatgattatgggacatatggactcgcaactgcattacattctatgacatttgcccactatatgtcgcctggatgggcagcagctactgatgccaacgggattaatgatggatggagaagtagaggctggttgagattttatactcttgcagttccttctttattaaatagttataaagcttctgaaggtaatgcagaggcaaaggctattttggatatttggaaagtatatatgtttcatagatttacagacgaatggggacctgttccttactctcaggctggtcttggaggagcatctgtagcttatgattctcaggaagcaatgtatactgattttttcaagcttttagaagctgccaatacaactttaagtagtacatctcaatctactgttggtatatttaaagattatgacgctatatatagtggtaatgttgataaatggagaaaatttggtaattcattgagattacgtttagccttaaggatttcagatagagacgcttcaaaggcaaaaacacaggcagaggctgctgtagctgcgggtgttatgcagtcaaatgatgatagtgcagtttacaaagtaactaaagatacttacaataattttgtagatattatgaaatattgggggttttatatgactgctgatatggaaagtattcttaaagggtataatgatccgaggatgaaaatttggtttgctcccgttagtgatgcaacttcggcttataaagatcaatatgttggtttaccaaacggtattggatcagcaattacatggcaaggcaaagattttagtggtacaaatcaaaccactacattttcagataacgttacaaaaaatatagaagtgatggtagcttcagaatctaattttaaccgttctgaaggagtgttattaggctggaatatgtctggaacagcccaagctctttatgaagacggtattcgtttgtctttgcaacaatggggtgttactgataatacagcaattaatgattatatagctggtgctacaacaggtgccgtacctgtatttggaagtttatatgcagatcctacacctcctgttaatgtaccggtagcatgggcaggaactgtaactgcacaaaaaaagcaaattgcgattcaaaaatatctaggtctttttccggaatcatgggaggcatggtctgatttacgcagaacagatgcaaatatattatacccattacttactactttagatgcaacaattggttacggagtaatgaaacgaataacctatttacctaatgagtatagtaccaatttagatgcagttaatagtgcagtaacagcgcttggtggccctgataaagggaatactcctctttggtgggatactaaataaaaatgtaacaagtaagataaagagattcgttacttattgaatgacaaaaggagaggtaactctccttttgttttataccacgtttttaacagccaattcaaataataaaagtaaaatacggttctaagtttttaatacagaatattttataattaatatttacaatgcacaatgatcttaaaattgaaatatccaatatcttttttattagttgcagcttttttttcctgctcgtcattaaaaaagcatcctgaggcgataaatagcactcaggaatatgttgctgcaaatcccgtaacaaatgcaagccacgcctcaacattggttgaaattagcccaaatcaattaatggctgcctggtttggaggaaaatatgaaggagccaaagatgtcggtatttatatttcatcttataaagaaaataaatggtctggtcctaaaaagctcattgaaccgctgattaaagaaggcgataccctgccttgctggaatccggttttatttaaaagtaaggctcaaaatttatacttgttttataaagttggcaaaaatccgagagaatggtttggtgccatgatggtttctaaagatgacggaaagagctggagtgaagccaaatatcttccaaaagggattttgggacccattagaaacaaacctgttgaaataactccagggactattttgtgcggtagcagtaccgaaagtactgatgataataaatggagggtttttatagaaacttatacagaagctaatgacagctggacgattacaaatatcaacgacaagaaaaattttgatataatccagcctgcatttttagtgcattctgatcaaaaaatccagattctgtgcagaagccgacataacaaattgatttcatcctggtctgaagacagcggaaaaagctggcagaaaacagatagcataaatgttgtaaattccaactcaggagtagatgcagtgaccttgtctgacgattcttttttattggtaaacaatcctttgaaaatgggaaaagactggtttaatggaagaaatatacttgatgtagaatattcaacagatggtgtaaactggaaaaaaatatttgatctggaaaaccagccaaaaggcgaattcagttatccggcaattatccagactacagacaaaaaaattcacattttgtacacctacgaccgaaaatttatcaaacatactatatttgagttaaacaaataactaaaaaattatgcaaagatactgcctcgctttagatttaaataatgatcctgatctgatcgctgaatacattcagtttcataaaaatgtctggccagaaattcaggaaagcataaaggaatcgggcataaaaaatcttgaaatttatactattggcgatcgtttatttatgattatagaggctgataccgatttttcttttgaaaaaaaagcaagattagatgccgcaaatttaagagtacaggagtgggaaaccttgatgtggaaatttcaaaaagcactaccgggttcaaaaccgggcgaaaagtggaggttaatggataagatttttgaacttaagtaatattgaaatttacctaaaaaaaggaatgatgatgtttttaagaaacttaaaatgtaaactctttttcattagtgtattgttttatactattgctattaatgcccagagcggtattaatgccaatacattttacaaacatgataaatacctttctgctgataagatggaaggtcgttttccgggtacaaaaggaaataatgacgcagcagcttatattaaaagacattttaaaaaatatggacttaagaaattcggcaaaagctactatcagtcttttactttattggtaaaagaaggcataaataaagtgaagtcagatagtgttgcaacacaaaatgtggtaggttatatagaaggatcagatgaaaaacttaaaaaagagtttattgtaataggggctcattatgaccattggggatggggaggaaaaggctcaggtagtaaaaaaaaggaagtagaggcaattcataacggagcagatgataatgcctccggcgtatccgcactgctttgcatacttgaagaattatcaaaaatgtctctgaaacccaaacgaagtatcatttttatttctttcagcggggaagaggagggactgttaggctcaaaatattttgtgtcacacttaccggttgaaaaagatgctgtaaaagtaatgttaaacatggatatggtgggaagactaaatcaggagaagcagctttatatgggaggcgcaggaacttttccaaatggagtagcattaatgaaaaaattaggagaaggcagtgatctcaatcctgttgtgcatgccggagaagttggaggatctgatcatgtttcattttataaatcgtctatagctgcagtaggatttcatacaggaggacaccctgaatatcatactcctgaagacgatagtgatttaataaacacacagggaggtgctttggtagctcaatatatttacaatgttttaatagcaattgccaataatccgcagcaactgaattttattattcaggattaactaatttttagtggaggctcgatggtatgattttgaaagtcgttctccaagacatatatccaaatacatcatacaaaaagtttaagatgattgggatctctttttatccaatttattatctgtctggttatctggagagtttccaatagaataccccaaactgacgaaaattattgtccaaaacgaattacacccaaatcgttacagattattaagaatctttttgctttacaaaccatcttctgggcgcatcactttcatgaagtacaatttcagaatggagaaactgtgcagcctctgcggaatcttgtacttttgttgcgcttcgttctaacatttcggcttcaaaccctgtcaggacactttttcttattcctgcttttctccagttagacaaaggcttacatcctttaaaaatcgcccgggcaagagcaagtgcatcgagcagtgcctgatttgcaccttgtcctttaaacgggctcattgggtgtgctgcatctcctatcagggtcattttttcagatctttcaaataattcaggtgtgagtaatgcacgatcataaacaggataaccagaaatccggtcttcctgtgttgccattaaaatctgcggaatgggatggtgccattgggttctgcggcaagcctcatctttgagagcctgagctcctttcgagcttaatgctttggcttctttttcaggcattggaaagctaagctgccacatcactgcatctgaggcataaggcataacgtagattcgctcgttgccattggcggtttgaaacacagtagccgagtccagtaaaggactattaagatcatgcagggaactgagtggacaaatacctaatattactatacagcccagatattgtaaagggctattcccttcaccaatgagcagtcttcgtaccgcactgcgaattccgtcagctccaaccacaaggtcagccttggttttctttatcttcccatttacctgaaagtgcagcgcaacttcaccttcatcttctttaaaatcgatcaactgatgtccccatcgtacattattatttcctccgagctgttccagcaacgctaaacgcaaagattgtcttgcaatatgcacattagagcgtttgggcgacgtttttatatccgtcttcatccactttcgggttccccattccccaattactgtcccttccggactatgtacgaggtgtcttgttgaaattaccccttctattaaagagaaaatccctaatccctgaattgctttactggcttgctgcaaagtgagtccgtaaccctgagaccgggcattgaagtcctgatccctttcgtagagtgtaaaaggaatcccgcggtgcagacaggcgaccgcaagagccattccgcctataccgcctccaataatagcaacgtgcggataattttcattgtctgcctcgggagggttgggagcaggcagtaaccctgatccgttacagttggggcatacgtacaggtttgccctaggacgaaggggagctgtaccttcgccctgcattttttcaaattcttctaatgcgatctggtattgaaaccgtacctttttgcttattcttcggctttttttaccacgtccctgacattcctgacagatagcccagcttgcgggtttgttttccacttttttagttctgctatttggctgcttattgcaggcctgcaaagttaagataaaaaaaaagtcccaccgaagcaggactaaagattttacatctacggcatatagccttattgtgataagattaaagattagaaattttaatcaggacaaatgtaaataaaaaatagtttggtttgaataaggaaaaccgtaaagaggttaaatttttttttcttagatttaaaaattcttacaaaatatagattgaaatggcaaaaatattaggattagatttagggactaactcgattggatgggcgatagtggataaagatggaacagatttttctcttatagacaaaggagtcagaatattttcagaaggagtaaaatctgaaaaaggaatagaaagttcccgtgctgctgaacgaacaggatacagaagcgcaagaaaaattaaataccggagaaaattaagaaaatacgaaactctaaaagttctttccttaaatggaatgtgtccactttcaattgaagaagtggaagaatggaaaaaatccggttttaaaaaatatcctcttaatcctgaatttttaaaatggttacgtactgatgaagcagaaaacatcaatccttatttttttagagataaagctagcaaacaaaaagtttctttgtttgaattaggtcgcggattctatcatattgcgcaacgaagaggttttttgagcaatcgtttagatcaatctgctgaaggtgtttttgaagagcataatcctcaaatccaaagtttgattgaagatttagatgattcgaagctaattcttaatgagttaaaaagttattatgttgataaagggataattgaagaagctgaaaaaggagtttttaaaaaagatttagatgaaggtgaaaaaaaactaaaaacactttataattccttggttgccataacgaagaaaaatgaaaacaatgtagagaaatgtaaagaagaacttattgcaaggctaaataaaaaagaagatttaggaaaagtaaaagggaaaataaaagatatttctcaagcaatgcttgatggtaattttaaaactttaggtcaatactttttcagtttatataacaaagaaaaaattagaaatcaatacacttcaagagaagaacattatcttgaagaattcataatgatttgtaaagttcagggaatagatttcattagtgataaagagcaattgcctgagaagaaatttgatggtttagccaaagatttatacaaagccattttttttcaaagacctttaaaatctcaaaaaggattaattggaaagtgctcttttgaaaccagtaaatcccgctgtgctatttcgcatccggattttgaggaatatagaatgtggacttatttgaataccataaaaattggaacccaaagcgaaaaaacattgcgttttttgacacaagaggaaaaattgaaattggttccgaaattctacagaaaaaacgattttaattttgaagttttagccaaagagcttattgaaaaaggagcaagttttggcttctataaatcctcaaagaagaacgagtatttttattggtttaactacaaatcaactgatactgtttctgcttgccaggtttcagcttcgttgaaaaatactgtcggggacgattggaaaacaaaaacattcacgtatcaaacactaaatgctaaaaaagaagaagtaactaaaacggttaattacagggatttgtggcatttgctttctatctcaacttcggatatttatttgtatgaatatgcaaaagagaaattgaaactggatgataaaaatgcaaaagtattcagtaaaatcaaattaaaaaaggattttgccagtttgagtttgtcagcaattactaaaatccttccttacattaaagaaggacttttgtattctcatgctgtttttatggcaaatatcgaaaacgttattgatgatgaaatttggaaagatgaaaaagaaaaatacattgtaaaaaatggaatttttaatattatcaaaaatgatgtttttgaaagagaaatattgaatgttgctaatggcttaattaaaaacagtaaatctgaaggagaaatttattcagaagagtcaaaaagtatttttaaatcagattttgataaagcaattgaaaacttaattaaaaaaagggaagacttagaaataaatgaattatttattgaggaagtttatttggattatattgaggaaattaaaaagtatgataaggaaagaaagtttttgcctattccaagattagatgaaaaagtaattcaatttttacttggaaacaataatgatgcagtggtttactgttctgatgaaaaaaagattaaaaaattatatcatccatcagatatcgaggttttcaaaaagaaaattatcaaagatgagtttggaaatgaaaaagtagttttaggaagtcctttgacttcatccattaaaaatcctatggcaatgcgagctttgcatcaattgcgaaaagttttgaatacgcttattcttgaaggtgaagttgacgaaaacacaaaaattcacattgagatggctcgtgaattgaatgatgccaatcgaagaaagggaattcaggattatcaaaaggagaataaagatttcagagacaatgccataaaagaaatcaagaaattgtatttggatgaatgtggtaaagaagtagaaccaacggaagacgatattctaagatatcagctttggattgagcaagataaatgtgagatatacgaacaaggcaaaaatatacggatatgtgatataatagggagtaatcctgcttatgatatagagcataccattccaagaagtatttcacaggataattctcaaatgaataaaacgctttgtagtcagaggtttaacagagaaataaaaaagcaaaaaatgccaattgagttaagtaatcatttggaaattttaccaagaattgcgcattggaaagaagaagcagataatttatcaagagaaatcgagataattagccgttccataaaagcagcatcaacaaaagaaataaaagacaaaaaaatacgaagaaggcattacctgactttgaaacgagattatcttcaaggaaaatatgatagatttatttggaaagaaccaaaggttggattcaaaaacagccaaatcccggatacaggaattattaccaaatatgcgcaagcttatttaaaatcgtattttaaaagagtggaaagtgtaaaaggtggaatggtcgccgaatttagaaaacaatggggaattcaggaaagttatattgatgaaaacggattcaagcaatacaaagaaaaagaccgaagcaaacatacacaccatacaattgatgccataacgattgcctgtatgaccaaagacaaatacgatgttttggctcacgcatggaaattggaagacgagcaaaacaaaaaagaggcaaaagctataatagaacaagcaaaaccctggaagaccttcaaagaagatttgctgaaaattgaggatgaaattttggtttcccatttcacacccgataatgttaaaaagcagtctaaaaagattgttagagttcgtgggaaaaagcaatatgtagctgaaatagagcgtgatgcaaaaggaaaagcaataccaaaaaaagatgctaatggaaaaataatctataaggtaaatgataaaggagaaaaaatcccaagattgcatcaaggtgacacagtaagaggttctttgcatcaggatagtatttatggagcaattaaaaatccattaaaaactgatgaaattcgttatgttatccgtaaagatttagaaagtttaaaagccaacgatattgaaaacattgttgatgaaactgtaaaagagaaagtaaaaaaagccattgcaaataaagttttgttactttcttccaatgcgcaacagaaaaataaaattgccgagaatgaaaaggtttggatgaacgaagaaaaacaaatttccattaacaaagttagaatttacgctaattcagttaaaaatcctttagaaattaaggagcatagtttattgtcaaaatcacgtcacgaacacaaacaaatggtttatggattaaatgaggaaaattttgcaatggcaatttatgaagggttagataaaaaaggaaatacggaaagggcttttgaattaattaattatatggatgctggttattattataaattaaaaaataaaaatgaaagaagaaaaaatattatttctttaattcctgaaaagcatttagaaacagggtttgatttgttaaaatccaataataaacctataattttaaaaaagggtttaaatgtaattttatacaaaaacgaaaaggaagaaatcaactttaataatcctaatagcataattaaaaggctgtacaagatttcaggattagataaagatggaataaaattaacttattgtgtttctgctaaaggctcaacagaaaatatagcttatatgaatgatatcataaatgaacaaaaattatttcaaataagaagtgaaattgaaaatttaggtttgtgggataatattttttcagattttaaaaatgataatataaaaaagtctattttttttaaaaatctgaatgatttacttaataaacattatttagaaaataatatttacgattcaaaaggcttaattaaaaaagtaaaattcaaagaaagtggattgactactccaaaaggaggagatgttattgatagttttaaagattttccatatattaagtttaaagcaagtaattttaatgctttaattgaaggaattgattttaagattttaccatcaggaagagttgttgaaatttaataagttattatggatcattcaaaattaacaaaagagcaatcaaaaagattcaatcaaaaattgataaaactgaaaaaagtggattcactactaaaacaaaagaagaacttttaattgaaataaaaaagaattgagttagtcatttagtttctgtatctttatgcctttaaaatcatacgttatggaagtgtttgaaggacaaagcatactaaactttataaaagaattgccaaatgatgaagcatgcaaagcttat

SEQ ID NO: 3132 - DNA, 14792 bp, synthetic construct
  misc_feature 1..14792: note = Synthetic
  source 1..14792: mol_type = other DNA
gattgataaaggaatggataatgctaagcaagttttaaaaggattaatcaacaaagcggataagagaattgctgaaattaaatcaggagaaaaacctgctttaactccagatgcaaatgctaaatactatgcagaagttgttattgacctagatgttattgctgagccaatgattgctgatccagatgttaataatgctgacgtttctaaacgttatactcacgataccattagaccactttctttttatggaggagtgaaaaaagttgatcttggttttgttggatcatgtatggtacacaaaggcgatatgaaaattctagcgcaaatgcttaaaaatgtagaagcgcaatatggtaaagttgaatttaaagcacctcttgtagttgctccaccaacttataacattgttgacgaattgaaagctgaaggagattgggaagttttacaaaaatactctggattcgaatttgatgataatgctccaaaaggggttgcgcgtacaggatatgaaaacatcttatatctagaacgtccaggttgtaatttatgtatgggtaaccaagaaaaagcagccaaaggagatactgttatggctacttcaacgcgtcttttccaaggaagagttgtggaagacgcagaaggtaaaaagggtgaatcattactttcttctactcctgttgttgtattgtctactattttaggaagaactcctactatcgaagaatatacagctgcagtgaaagggattaatctaacacagtttgcaccatctcataaattattagtaaacaattagcatattgcttttagctatgatttaaaagcctgattctatggattcgggctttttttatgcttgattttttgtaacttgcagggataataaattagtattaattttatttaaatcttatggcattcgatattgaaatgattgagaaagtatataaaaatataccttctcgtgtagatagagctcgtgaacttgttggacgtccacttacactaacagaaaagattttgtacgctcatttatgggaaaaaatcccgacagaacactttaaaagaggtgttgattatgttgatttcgctccagatagagtagcgtgtcaagatgcaacagcacaaatggctttgttgcaatttatgcatgctggcaagaagacagtcgcagtacctacaacggtgcactgtgatcacttaattcaagcaaaatctggcgcaacagaagatttagcctttgctaacaaacaatccaaagaagtttttgattttctttcatctgtttcaaataaatatggtattgggttttggaaaccaggttcgggtattattcatcaaattgtactagaaaactatgcttttccaggcggaatgatgattggaacagattctcatacggtcaacgcagggggattaggaatgttagccataggtgtaggtggagcagatgctgtagatgtgatgtcaggaatgtcttgggaattaaagttccctaagttaattggagttaaattgacgggaaaacttaacggttggactgctccaaaagatgtgatattaaaagtagctgatattcttacagtaaaaggaggaactggggcagttgttgaatattttggtgaaggtgctctaaatatgtcttgtacaggaaaaggaactatatgtaatatgggtgcagaaattggcgcaactacttctacgtttggttatgatgattctatgcgcaggtatttagctgcaacagggagacaacaagttgttgatgcagccgataaaattgctccttatttaactggagatccagaagtttatgctaatccagagcagtattttgatcaattgatagaaattaatttatcagaattagagccgcagattaatggtcctttcactcctgatagaggaactccagtttcgaaaatgaaggaagaagcagcggcgaatggttggcctattaaagtagaatggggacttattggttcttgtaccaattcatcttatgaagatatggctcgagcagcttctattgtaaatcaagcagtagaacacggaatctcaccaaaggctgaatttggaataaatcctggttctgaacaaattcgatataccatcgagagagacggtattatagcaactttcgaaaaaatgggaacgaaagtatttaccaatgcttgcgggccgtgtataggacaatgggacagggcaggggctgataaaggggagaaaaatacaatcgtgcattccttcaatcgaaatttttctaaacgagctgatggaaatccaaatacacacgcttttgtaacttctccagaaatggtggcggctcttgcaatttcaggaagattagattttaatccattaacggataccttgctgaatgataatggagaagaagtgaaattgaaagctccttttggagacgaattgcccagtagaggatttgatgttgaagatgcaggttttcaagctccagccgaagatggctcaaatgttcaaatcgtagtcagtcctacttcagaccgtttgcaattattggcaccatttgaggcttgggatggaaaaaacattactggcgctaaactcttgattaaagcatttggtaaatgtaccacagaccatatatcaatggcgggtccatggttgcgttttcgaggacatttggataatatatctaacaatatgctaattggtgcaatcaatgcttttaatcaaaaagcaaacgaagtaaaaaatcagttaacgggaaactatgaagctgtgccaacggttcaaagagcttataaggcagctggaattccatcgatagtagtaggtgatcataattacggagaaggttcttcgcgcgagcatgctgcaatggagcctcgtttcttaggagttaaagcggttttggtaaaatcatttgcccgaattcatgaaacgaatttgaaaaaacaaggaatgttggccataacatttgctaacgagttggactacgataaaattcaagaagatgatacttttaatttcttagatttaacagaatttgcacctggtaaacctttaactattgagctagtacatgccaatggaacttcagaaattattcttgggaatcatacgtataacgctagtcaaataggttggtttgtggccggttccgcattaaacttaatcgcttcagtaggacaatagtacaataaaatacacgttcgtaaagaaagctccttaggtaactttggagcttttttgtttttcattatagtactataagtagattttataatagttttaacatttttaatttattaaaaaaagtatatttgtaaaacttgataaaaatgtgatttttagattaaaaatgcccttttttttaatctaatttctgtgaaataagcttttagataaaaataataccacaatttgtaaaaaataaggatgaagtactttggaatactattttggcttttggtttgtaccacgacaactgttttttcacaagaaaaatttgttaaacacaaaatttctcagggcgaaaccatttcttcaattgcagaaaaatacaatgttagtcaaaaagtaatttttaatttaaatccaaaagcttcagggattttaaaattgaattcggtattaaaaattccaaataagaattataaaaaagaggttgccaaaaaagagttagcagctaaaaagaaaaacactaaagagattgattatcttgttttacccaaagaaactttgtttggtatcgctaagaaattcaatgttagagtcgaagaaattaaaaaaaataatccttcaatagaaaaatcaggattacaaattggagagaaaataaaagtaattgttcctgaaaacttcgagttgaaagaagagccaacggttgctatctcaaacgattctgagcaaaaaaatacaactatcccttcaaatacttccgctattagtgagtttgttgctccaaatacttcaactgaaggacagcaaatacatgaagtaatagcaagtgaaacaaagtatggtatctcaaaacgctatggtatttcggttgaagaacttgaaaaattgaaccccaacattgtatctaaaagccttgaaataggtcagaaattaaatgtgcctttgcaaaataaagcaacagaagtgattcaaactgttgaggtttcgagtccatctccagttaaagaagtaacttcagttgaagtaaacaaagagcaagtggtagctgaaacatcggtttcaaatacggttgcctctcctgagactactactatcgttcatgaagttttacctaaagaaactaagtttggtattgccaaaaagtacggaattactgttgcggaattggacaaactaaatccttcgattcataaaaaattgagagttggggcaatcttaaaaattaaagagggaaccactgcagtagtagctgtgaatgaaacggaaaccaaggtggattcaacagttgtggagtccagttctgagaagttctttggggattattccattgcagatgatttaattgccaaagcatctgataatttagggattcggtacaggtctggaggtacgacaagagcaggttttgactgttctggtttaatgtgttctacattcagtgctttagatattaaacttccaaggtcttccaatgaaatgtccaatattgggataagagttacacctacagaagccaaaaaaggagacttgattttctttaaaaccagaggcagcggacgcatcaaccatgtaggaatggtagtagatgtagtaggagatgagattaagtttattcattcttctaccaatagtggtgtaatcatttcttcaacaaaagaaggatattaccatcgaaattttgcccaagttaatcgtgttttaaagtaagttactcttccttttctttaaacaattcgatgttgtttttcgaaattcttttttttagccacgtcttaagtttgtcttcatcgctagtacttaatgtttttgtgctgttataaattgctacagttttagtaattgtactatctgtattttcattaaaagtatgattcgccaaggaaatgtttttgatttgaggaaacaaaataatgatttcttctcttaatgctctgttgttgtaagtgttctgttttagcttattttctaaattgagtatcattaagtctttttcattttctttcgctttttcagaagcattgttttccaaaatgaatttcttaatatctgtggtgtcttgttttattaccaattgagtgttttcgatattgtattttttcaatgcactacttaagttttgtatctcttgtttgtttatttttttgtttaaaaaagccaattcaatactttttgggtttttgttgtaattgattttttggtacaaaatggcaaaccctttttcattcaattcatcatttaaaaacaattccactttttgtttgtatttcttttcttgggctaacaaataagcaaaataaacactaggaacaattagcaaaacaataattgttgaaatggtatattttatttgttttcggtattttgggtctacatgagtgacttcaggatactgtaaatactttacgataagaaaggtagaaatacagataaacacacaattgatagtgtataaaaatagagcgccgagaaagtatttccaatttccaatagccagtccgtatcctgctgtacacaaaggaggcatcaaggctgtcgcaatcgcaacacctggaataggatttcctttttcgactctagtaattgcaattactcccacaagaccaccaaaaaaagctatcaatatatcgtatatgttgggtgaggtacgagccaataattcggattgtgtttccttaaaaggactcagcataaaataaatagtagacacaaacaaactgactaatgtagctatgagaaggtttttggctgctttttttaataattcaaaatcataaatacctaagctaaaacctgctccaacgataggtcccattaaaggagaaataagcatagcgccaataatcacagcagttgagttgacgttgagtccaacagaagcgactacaatagcacaagccaaaatccaaacggtagcccctcgaaaggaaatattcgccttaacattttctaaaactttttgtttgttttcttctccagtatgtaagtcaaggaatttttgtaatcgattcatagtattctgaattaaaaaagttgttcagtaaagttaagcaattaaaaattggcataaaaaaaacgttgaaattagttcaacgtcctagagttgttatagaaattggattttagttcttggtaaaggtcaaataatcagttccaccattgccaccgcttacgtcttttagtttaattactgttgaagttctttcgataatttcccagtcatctgttagttcaagaaaagtagcaggagaagtgaaagcgatattgaaatccaagtcacttatgctattgtcatcatcgctattgctatcagtgacagaccaagtccccgtttgtgttaatgtgccgttagtagcagttagaacaccattgctgccaaacgtaaagttataaccagaaaaattacttgtttcttctttgtcagtatcaaagtaataagtgattttccacgttccagatcctactacagaagtaacgctgcttattgagtttgttccagtagaactactgtcgtcggaactgcaagaaagaaaaaagacagtaaccaaaagcagtacaatcctttgtttgttgataaaatggattcttttcatataatgcggtatttaagatttaaatagtagcgaaaaacaatctgatatattgtatgttcttaaaaatcaatcgtttattttaaaattgcagtttttaaatgtatggatacctgcttagaaattttagcggctactatggttggtatttcgatattgaagtcgtctgtgtttacgacaaaggtagattggatttcaattcccttggttatttttctaagccaagctttgctaatgatgggtttggattttccgtgtattttgagaattccttttatttggtactctgtaggggtttgggatacaaatttgtaatcgaatttgtcaattctaccaataaaagttgctttggggtaacggtcgctctctaaatagttttcattaaaatgagtgcgcatcaaatctcttttgaacttaaaatttttgataaaaacggtacagctaatttcgccagtttttatttcaacagagaaaatgacctcctcattaatggctttcacttcctcaaaaaaaggtaccgaagcttcaaatgaaattaccccttttgagtcagataattgttcttgagcttgaatgaagagtgtaaacgacaagaaaaaaagagaaactatttttttcataagtcaagagatattgtatctcttaaagttacacattttaattattataaacgattgtttagtaggtttttattgaagttgcagctgaatgttgtacttggtgatattggctaagttttctgcagaacaataatcaaattcttcttcgtgctcttcgtgttcttttttgagttctatttgttttaaacaattgctaaagcgtcgcacatcatttagggtttttaattgtaagcccggaacggcaacactttttccgttagcatctttggcaaccatcgtaaaataagaggaattacaatgttttatggctccagtttgaatgttttctgcttctactcgaatgccaacaatcattgaacttcttcccacataatttacagaagctttcatggtaaccaattcgcccacttcaataggctgtaaaaagtttacagtatcaacagaagcggttacgcaatagtttccagaaaacttagaagcacttgcaaaggcaatttggtcgagtaaggataagatataaccgccatgaattttaccactaaaattagtgtgtgacggcagcattagttcagaaatggtaacatgcgatgcggaaacaggtttgaatacgttggtcataatttatctgttattaaacggggaggcttctttttgaacggaggttataaaaaaacgagtttcgccccaccacataaaagtgcgttttttttcttcataggttaagcgaacataatgaccttgtagaatttttaaactatcgataactgctttgtctttgtctaaaactgaaaagcgaaaaatttgtgctcccgaaattccttggctcaattcaccttcccaagttttgatgagcacacctttatggcttaaacggattaactccccagagcgaacaccatcactaacaggaatgtaataaataaacgccatataaatagaaacgattagtactccagcgagtagcaataaagcagcaatttttttcatttgttttagtttataaggttgtttgtatcattttcagctctttttagaacattttcaggtagtgcttttttggctttggcccccattttttttaatttttctacactaacaattaggttgcctttgccatccactagcttattcatagcagctccatattcaactttgctttcgtcaattttctttcctattttaattaaatcggccacaaaaccttcaaatttatcataaagtgccccagcttgtcgtgcaatttcaaaggcattttcttgttgtttttggttggtccacatactgtcaatagtgcgtaaagtagccaaaagagtagaaggcgtcacgattacgatatttttctcaaaggctttgttgtacaaggtagtgtcgtcatttaatgctaaagcaaaagcaggctccataggaatgaaaagcaacacaaaatcgggactttctatttggtacaaatcatgataatttttatcccccaattgctctacgtggcgctttatggattgaatgtgttcttttaaaaatccagcttttaaattgtcgtcttcttcattaatgtatttttcgtaggcagtcaaagacactttagagtcgacaatcatttttttgccatcgggtaaattgataacgacatcgggaaatactctgcttccttcagaagtagtatgcgattgttgtacaaaatattcgcggtctttttccaatccagatttttctaaaaccctttccaaaataagttcaccccaatttccttgcattttactatctccttttaatgctttggtaaggtttaaggtttctttactcatttgaagattcatctgttgcaaacccacaatttgctgacgtaacgccgcgtgataatcaatactttctttatgggtatcttctacttttttctcgaataactgaatcttatcttgaagcggactcaagatattcttcatgttttccttgttctgttccgtgaatttattcgatttttcgtcaagaattttattagctaagttttcgaattctttggtgaatttttcctgaagttgttccacttcatttttttgttctttatgtcgttctagtaaattatcaaaatctacttcttttttagaaagctgaatggccaaactatctttttcatttcggatggcttctttttcttgaaggctattttgtaattgtttttcaaaagcagttttatcgattgtagcttgttctttttgttgttgtagcaaatgttgagcagcattgattttctcttccaagcttattttttgtgactcaaaacgagctgaaaacaacagttttccaataaaaagaccaaggacaagcgcaacgataaaaaccaataaaaaagaaaataattcagacatggatgatagttttttgaaaagtaaaagtaagaatttttaattcagtttcaagttgacttaacgatataaaaaaagtcccaccgaagcaggactaaaggttttcacctacggcatatagccttattgtgataagattaaagattagaagttttaatctgttgtaaatgtaggaaaaaaaatctttaattataatgaggaaaaccgtaatgtacctaatttattttttcatagatttaagatttcttacaaaacagattgtattatggcaaaaatattgggattggatttgggaacgaactcgattgggtgggcgattgtggataaagaaggcaatgagttttcattggtggacaaaggagttaggatattttccgagggagtgaaatccgaaaaaggaattgaaagttctagagcagctgaaaggacaggttatagaagtgcacgcaaaattaaatttagaagaaaacttcgtaagtatgaaactttaaaagttttgtcaaaaaatgggatgtgtccgttatctcttgatgaagtagaggcttggcgtaaatcagggtttaagcaatatccattaaatccagagttcttgaagtggttgcgtactgatgacgacaataatattaacccctatgtgtttagagataaagcgagtaaagataaggttacactttatgaattaggaagagctttttatcatttggcacaaagaagagggttcttaagtaatcgtttagatcaatccgctgagggtgttattgagttgcatgctccaaacattgaaagcagaatagaagaaacaaccaccattaacgacttaaaaattgaaattcaggaatattttgatggcttggatattttagataaaaatgcgaaggagttagatgagggtgaaaagaagcttaaatctttatacaatgctttagataaaataattaaagcaaatgaatttgaaaaagctaaaacagaaatcatagctagattaaatagaaaagaagaccaaggcgcagtaaaacaggaaattggagagatttcgcaagctataaaggatggtggctttgaaactttaggacaatacttttttagtttatacaacaaaggcaaaatacgaaatcattacacagctcgcgaatctcattatttgaatgaatttgaaaaaatttgcgaagtgcaaaatttaagttcaattaacaaaaatgagaatataccggaaaaaagatattctggtttggctaaagagttataccgagccatattttttcaacgacctttaaaatcacaaaaaggattaattggaaaatgttctttggataaaacgaaatctcgatgcgcaatttctcatcctgattttgaagcctatcgtatgtggtcttatcttaatactattaaaattaaaacaccacaagacgaacaaatgcgttttttaactatagaagaaaagcaacaattaattccaaagttttttagaaaaaaagacaactttaatttcgaagacctatccaaagaacttactccaaaaggatatactcctgatttttataagtcatcaagtgcaaaagcttcctcgtatatttttaattacaaagcaaaagatagtgttgctggttgtgtagtttcagcctctttaaaaaatgtatttggagaagaatggaatacaaaaacttggacatatgaaaccaaaaatagtaaaggtaaatttgtaaaacgagaggtagactacaaagatttatggcatttgttgacggtttctacctcagatgcttatttggaagaatatgcgatggagaaattaggtttggatgaaaaaagagccaaatcgtattctaaaataagattgaagaaagattttgcgagtttgagtttaagtgcaattaataaaatacttccttatctcaaacaaggtttgctctattcgcatgcggtatttatggctaatattgaaaagattgtagacgaaaacatttggaaaaatccagaagaaagactttacatccaaaatagaattgctgaaattattgaaaacaatagttttgagaacagtaaactagaaatagtaaacgggttaattaaagattgtaaagtaaacaattgttattattcaatagaagcagaatcgtcttataaagcagatttagttaaaaaagtgagttcgttttttaaagaaatcgagaatcaaaaagaaattgtagaggatttattcccagtttttatagaacaattaaagaaatacgaatacatttctgttaagcgcttagacgaaaaagtattggaatttttaaaaggtgaaaatgaagatggtgaaatctattgcagtaatcctaataagttgaataaactttttcatccttcggatattgatgttttcaaaaagaaagtaattgaagatgaatttggtaataaaaaagttgttttaggtagtccattaatttcatcgattaaaaatccaatggcaatgcgggctttgcatcagttacgtaaagttttaaacactttgattattgaaggtttagtagatgaaaaaacaagagtgcatatcgaattggctcgtgagttaaacgatgctaataaacggaaagcgattcaagattttcaaaaagaaaatcaaagtaaaagagcggaaattgcattaaaaattaaagaggattataaggctgcaacccaaaaagatattgaaccaactggagatgatattttaagataccaattatgggaagaacaaaatggtatggagatttatgaagcatcaataaataatggtataagtaaaaaaattggaattcaccaaattataggagaaaatccagattatgatattgagcatactgttccaagaagcatttctcaagataactcattaatgaataagacactttgcagtaagaaatttaatcgagatattaagaaaaaacaaatgccaacagaattaaataactatgaattaattctaccctatattgatcattggcgatttgaagccgacaaactatcgtgggaaattgaacagctttctagaggtataaaagctgctgcaaccaaagatgctaaagataagaaaattcgaagaagacattttttaacattgaaaagagattatcttaaaggtaaatatgatcgatttgtttggaaagaaccaaaaataggttttaaaaacagtcaaatccccgacactggaattattaccaagtattctcgtgcgtatttaaactcttatttcaccagagtggaaagtgtaaaagggggaatggttgccgaatttagaaaaatatggggtattcaggaaagttatagtaaagacggtaaaaaatattatgtagaaaaagaccgtagtaagcatacgcatcatactatagatgccataactattgcttgtatgaccaaagacaagtacgatgtattagcaaaagcttggacggatgaagataatgaaaacttaccattggctagaaaattattagccgattctaaaccttggtcgactttcacagaagatattaagaaaatagaggaagaaatattggtttcgcatcacacgcctgataatgtaaaaaaacagtcgaagaaaattattcgtgttcgtggtaaaaaacagtatttagctgaaatgaccaaagatgaaaacggtaaaacagtgcctcaaaaagatgaaaatggtaaaataatttataagttaaattctgaaggaaagagaatcccaagagtgcaacaaggcgataccgttcgtggatctttgcatcaagatagtatttacggagccattaagaatcctttgaatcaagaagaaatccgttatgtaatccgtaaagatatagaaagtattaaggccactgatgtagaaaatattgtagatgaagtagtaaaagaaaaagtaaaagaagccattgctaataaagttttgctcatttcttccaatcctcaacaaaaaaataaaattgccgataatcaaaaagtttggatgaatgaagaaaaaggaattccaattcagaaagttcgtttgtatgccaactcagtaaaaaatcctctgcatataaaagagcacagtgccttatcaaaatcccgacacgaacataaacaaaaagtgtatggtcagaatgacgagaattatgctatggcaatttatgaattggatggaaaacgagaatttgaattaattaacaattttaatgtagccaaattgcaaaaaacaggagaaggtttttatcctttattcaaagaaaaagaagttaaaggtaaaaaaacacaaattccgattgctaaaagtaataatagaaatttggtactaaagcgagggcagcaagtagtgttttatgataaagaaacagaacaattaaatgacattactgatgtaattgatttttcaggccgaatttatattgttgaaggattgtcaattcaaagaataaaatcaggtggaaatcagtttgattatggagtaattatgtttagatattataaagaagcaagaaaagctgatgaaattaaaaatgataaatacaaaccagacggtgtatttaggttgggagaaaataaacctacacgaaaaatgaatcataatcagtttaatgcatttgttgaggggattgattttaaagtattgccttcgggtaaaatacaaaagttgtaaaatcaatttgtttggtgtaaatttacatcacttaaactagaaatcatgacacgtcaaagtattacactagccaatcagaatgatgaatggttaaaaaaacaggtaaaagatcaggaatttaccagcaagagcgaagctgttaattatttaattacgcaagcgcggaggcaagaggattatgttgatttcgttcgaatgaagttggatattgctgaaaaaagcggttttgcaaaaaagcaaacgagagaagaaatgttagcagaattcaaaaggaaattaaatgtataattacgatttaaacgaaaaagctaaagaagatttgttaagaatatacgagtatggtattgcaaagtttggtttaaatcaagcagataaataccgcatgtattaagttctgggtaatcggggttcttgtccagaaattcctctgagatgg

SEQ ID NO: 3133 - DNA, 8049 bp, synthetic construct
  source 1..8049: mol_type = other DNA
  misc_feature 1..8049: note = Synthetic
ggggtcagctactccaggacaaccggattcactcattaatccaatgttttcacctcttaataaaggttggatgaattcattgtgttcagcaaaatcggtatgtttatttaaaactgaaatctttaaatcgggttgttttttctcgggatgaatgcttttgatgaattttcgagcagttttctcgttttcaacaatataataatctacgaaatcaatggttctctttatagtttgaggcaaaacatcttcaggaactaccgtagtttctccaggattggaaagtgtaataggaattaaatacagtttgcctaaagtgttcgatttcataaataaattatttgacacaaaaataataaaaaaaaagtcccaccgaagcaggactaaaggttttcacctacggcatatagccttattgtgataagattaaagatttgaaagtttaatctgtaacaaatatagtattttttttatttagttgtatttattttttgttttgtagtaattttctttttcctatatttaggaaatcattttaaagcgatacaaaaaatggcaaagattttaggattagatttaggtacaaatagtattgggtgggcaattgtagataaagaaggaaatgatttttctcttgtagataaaggtgttagaatattttcggaaggagttaaatctgaaaaaggtatagaaagttctcgtgctgctgaacgaacgggttatagaagcgcacgaaaaattaaatttagaagaaagctccgcaaatatgaaactttgaaggtgctctctcaaaatggtatgtgtcctttatcagttgaagaagtaattgaatggcttaaatcgggctttaaaacatatcctttaaatccagagtttttaaaatggttacgaactgatgataaccaaaacatcaatccttatatttttagagacagagctagtaaacaaaaagtttcgctctatgaacttggtagagctttgtatcatattgcacaacgaagaggctttttaagtaatagattagaccaatcggctgatggaattatcgagcaacatgcacctaatattgagagtagaattgaagaaactaaaagtattaacgatttaatggttgagattgcagattattttgacggattagatatacttgaaaagaattctaaagatttagatgaaggagaaaagaaactcaaatccttatacaatactcttgaaaagataattaagtctaatgattttgaaaaagcaaagttagaagttattgcaaggctcaatagaaaagaagatcaaggggcagtaaaacaagagattggggaattatcgaaagccatgaaagatggtaattttgttaccgtaggtcaatacttttatagtatatacagtaaaggtaaaatacgaaatcattacactgcacgggaagaacattatttggctgaatttgaaataatttgtaaaaaacaaggaataacaggaattaatgaaaatgaaaaattgcctgaaaaaagatataccggtttagtaaaagatttgtatcgagctatattttttcaacgtcctttgaaatcacaaaaaggattaataggtaaatgctctttagaaaaaaataaaacacgttgtgctatttcacatcctgattttgaggaatacagaatgtggagctatttaaacacaataaaaattaaaacaccagaagacgaaaaacttcgttttttaactttagaagaaaaagaaagcttaatttctaaatttttaagaaagaaagacaattttaatttcgaagatttagcaaaagaactcattattaaaggagcaacatttgaattttacaaatcgtctaatgcaaaatctgctcattatttatttaactacaaaccaaaagataccgtttcaggtagtattgtttcggcttctctaaaaaatatttttggtgatgattggaatacaaaacattggaactatcaaactcaaaattcaaaaggagaaacagttacaataactgttgattacaaagatatttggcatttgttgtctgtttcaacttcagatatttatttggaggaatatgccaaaaataaacttggtttggacgaaaaacgcgctaaatcatttagtaaaatcaaattgaaaaaagattttgctagtttgagtttgaacgcaattagtaaaataacaccttatttaaaacaagggttattgtattctcacgctgtatttatggctaatattgaaaatattgtagatgaacatatttggaacaatcctcaggagcgtttgtatattcaaaataaaattgccgaaataattgacaacaatacttttgaaaataataaattagaaataataaatggtttaataaaagaatgtaaaactgataattgttattattctaaagaagcagaacattcttataaaaaagatttacaaaaaaaagttgctattacctttagaaacaatgaagaccaagaagctattgttgaggaattatttccgattttcatttcgcaattacaaaaatatgaatttatcactattaagcgattagatgaaaaagtgattgaatttttaaaaggagaaaatgaagatggagaaatctattgtagcaatcaaaatcgattacataaactatatcacccatcagacattgaagttttcaaaaagaaaagcattaaagatgaatttggaaatgaaaaagtagttttagggagccctttgatttcatctattaaaaatcctatggcaatgcgtgctttacatcaattgcgaaaagtattgaatacattaatattggaaggtttagttgatgagaaaactaaagtgcatattgaattagctcgagagctaaacgatgccaacaaacgaaaagcaattcaggatttccaaaaagaaaatcaaagtaaaagacttgatcttgctaaacaaataaaagaagattataaatctcaaacaggtaaagatatagaaccgacggatgatgatattttaagataccaattatgggttgagcaaaatggtatggaaatatatgaaccaacattaaatggtggggtaagtaaaaaaattggaattcatcaaattattggcgaaaaccctgattatgatattgaacataccataccgagaagtatttcgcaagataattctttgatgaataaaacactttgtagtaaacaatttaatagagaaattaagaaaaccaaaatgcctattgagttgaataattatgaattgttactaccttatattgatcattggcgtaaagaagctgacaaactaacttgggagatagaacaaattttaaaatctactaaagcagctgctactaaggactctaaagatagaaaaataagaagaaggcattacttaacattaaagcgtgattatttaaaaggtaaatatgagcgttttatttggaaagaaccaaaagttggatttaaaaatagtcaaattccagataccggaattattacgaaatattctcgtgcctatttaaattcttatttcaatagagtagaaagtgttaaaggtggaatggttgctgaatttagaaaaatttggggaatacaaccaagctttatcaaagatggtaaaaaatattatcaagaaaaagatagaagtaagcacacccatcatactattgatgcgataacgatagcttgtatgactaaggataaatatgatgtgttagcaaatgcttggacaaaagaagacaatgaaaacagtaatgaagcgagaaaacttttatctgaatcgaagccatggccaacctttacagaagatttacaaagaatagaagaagaaattttagtttctcatcatacaccagatgttgtgaaaaaacaatctaaaaagattgttagagatagaggaaaaaaacaatttagaaatgaattaatgctgcataaagttaccaacaagccaattcctgttttgggtaaaagattaaaagaaaacgaacttgttggaaaagctgaagggaaagattactttataatatccaaaaataaagctttattttattacgaatatttgtatgacaataagggtaatattatttataaaaaagttccaatatatcaacaaggtgacactgttcgtggttccttacatcaagatagcatttatggggctattaaaaacccattaaatactgaagaaatacgctatgtaattcgcaaagatttagaaagtttaaaagctaacgatattgaaaatattgtggatgaagttgtaaaagaaaaagtaagagaagcaattgataataaagttttattactttcctctaatgcacaacaaaaaaataaaatgaatggaattgtttggatgaacgaagaaaaacaagttcatatcaacaaagttagaatttatgctaattctgtaaagaatcctttagaaataaaagagcatagtttgctttcaaaatctaagcacgaacataaacaaaaagtgtatggggttaatggcgaaaattatgctatggccatttatgaggggcaggataaaaaaggcaatttaaaaagaggttttgaattgttgaattatatggatgcgggtaactattttaaattaagtaatgattctaaatatcataatacaattgtgccaagtattcatttaaagtcagatttaccattaaaatacataataaagaagggagatttagttctgttttataaagaaagtagagaagaattaagtgaagtaggagaaaaagaatttgtgaaaagattatataaagtaattggatttgaaggagatggaagaattcaatttagacatcataaaatagcaatgcaacaaagtagtgcgaataaagaggaactcactattgtgaaatttatggctgataataatttgaaaaattctcaagtagattttgatgttccagtaccatggttaagattgagggtgtcaaattgtgattttttattgaatgataaagaattcaagattaacccgttaggtaaagttgagattttataatataactttaaagttcattgacataaagtttcaaattcttaaacagctcaaaccacaacggagtttctacgaagtcactccgttgtggtttgattaaagatttgaaaacacgatatttgctttttaattaaatcctcatcagcacccgttgtggtttgattaaagatttgaaaacacgatattttgaaatcgtgtgtaaattgttctgtatgggttgtggtttgattaaagatttgaaaacacgatattctcatttagttgccaaagggcatatcgttggttgtggtttgattaaagatttgaaaacacgatattgcgcaatacattcaagctttaaaagatgaggttgtggtttgattaaagatttgaaaacacgatatttgtatgctacggccaccgcacctgggatgggttgtggtttgattaaagatttgaaaacacgatattgcgtaggaataccaaccatcatcataataagttgtggtttgattaaagatttgaaaacacgatattagtatgccacattccgtctgtatcttgtgggttgtggtttgattaaagatttgaaaacacgatattttttatttttaaatgttatgggaaaatctagttgtggtttgattaaagatttgaaaacacgatattagctaagactgacttcagtcaatcattcacgttgtggtttgattaaagatttgaaaacacgatattcgaagtttcaattgggaatagattttctttgttgtggtttgattaaagatttgaaaacacgatatttaaacctacatcattacttgtaagattaatgttgtggtttgattaaagatttgaaaacacgatattaacaccattttcaaaaccttgaatagtgttgttgtggtttgattaaagatttgaaaacacgatattgttaaaataattgaagataactctttaccgttgtggtttgattaaagatttgaaaacacgatattatatatatattagggtcgtaagactcataagttgtggtttgattaaagatttgaaaacacgatattagttggcttgttaccttctaataatcaagaaattaaaatttaatatcgtataaaaaaatgcttcttttttgcagtgataaggcaagattgaggcattttttattttctagtatcaaattttagttttttttaaaatcttacaatctttcaatcctaaaatctaagaattaatatctaaaacaattccaattgagttggttgcggagcttttggcacttcggctttgccccagaaattcaaaatattaccaaattgtttatcggtaattcgcaacacacttactttgcctaatggtggcaataaattgtgaattcgtttttcgtgcacatcggcactttcgctactggcacaatggcgtacataaaccgaaaattgcatcatgctaaaaccatctttcaacaagctgtttctaaatcccgaagcgtttcttcggtcttttttggtttcggtcggtaagtcaaaaaatacaaatagccacataattcggtatccgtttagttccatagttttggatatttgattttttttctatcgccagtataacattgctgtaacgaactcgctgttttttgcaaggcaaccatcaacggacttttttcgtctttaaaataaacggttcgggttagaatttgcaaaagctctgatttcaaaacggtattcaattcttgttcatcataattttgtatcagttcaaaaactttttcatctacaattggtctaaaaggttccataatatcatctgccaaggcaaaagcattgtatttacttttatgatgaatgcctaatgtgttcaataatccgcttcccgataatgctcttgctgttgcagcacgtaaaatggcatagccataattcaaaaaattgtttggataatcgccaaatcgttcgcgtttaaacttttgctcaaaaaaagatttccaataaaagcttgcagcaactccttccatattagaactatcaccacttagtacttttgttgctaaaaaatcaaaattatttgtttttgcagtaattttttccaataaaataccttgattggtaattttctcaacaatagtttgttgccacaattgtttttttaaaggaacgcttgcattgatttgatttttaaaaatttcttgttgaatgtgatgactgttgaggtttaaaaacattccgtttggaagatgatttgtgttacaaataatcaccgatgtgttgttttctatgagtaaattcatggcatgaatactcaaataaatctcaggatgatcaataacaataaatccaatatcttcaataggaatggtgctttctcgaatttctgattttataactaattgaagatttttagcagttaatgaagctttgttttcaaggagaattgatttttttagcataaattttatcgtttttaagttaagttattaaaaacgagttatttatgtttatttattctacgaaatgcaaaaaaatgggataaaagtttattttaagagttttcttgcgatttcctcacaagcttggtctaacatatcaaaaaagttttcaaatccgtcttgaccgccataatacgggtcgggaacatcgacgttttcatttggaaaaatttcatttagaatcagcttgacttttgattttgcttcctcatttggagctaaagccaaaacatctttgtaattggaattatccataacaaaaatataatcaaaagtatcaaaatcactttttttgaattgtcttgctctttgattggtaatatctaaacctctattttttgcagtagaaattgaacgtttgtcaggtagttcgcctgcgtgccaagcgcctgttcctgctgaatccataataaaatcttcggaaagtttagagcgcataataccttctgccaaaggagaacggcaaatatttcctaagcaaaccattaagatttttgtagccatgaattatagcgataacttcttgttgatatcgtcaacgaatttacggaattgtttgtcagtagtcactaggttatcaactgttttacaagcatgaagaaccgttgcgtggt

SEQ ID NO: 3134 - DNA, 23141 bp, synthetic construct
  misc_feature 1..23141: note = Synthetic
  source 1..23141: mol_type = other DNA
cgatgtcgggcctgcgcgaactttccaccatccagaccccgccggtcgaccgcctcgcggtgcgcacctatgtcatggagtgggacgacatggtgatgcgcgaggccctgctccgcgaacatcaccgcggcgggcagagcttcatcgtcgtgccgcgcatttcggatatggccgatgtcgaggactggctgcgcaagaacgtgcccgaggtgaaggcagtcaccgctcacggccagatgagcccgggcgaggtcgaggagcggatgggcgccttctacgaccgcaattacgatgtgctgctctcgaccacgatcgtcgagagcgggctcgacatcccgagcgccaacacgatcatcatccaccgcgccgaccgtttcggccttgcccagctctaccagctgcgcgggcgcgtggggcgggcgaagctgcgcgcctatgcctatctgacccacgaggccggcgtggccctgtcggagatcgcgcagaagcgcctgaaggtgctcggcgatctcgattcgctcggcgcgggtttccagctcgccagccacgatctcgacatccgcggcgctggcaacctgctcggcgacgagcagtcgggtcatatccgcgaggtcggattcgagctttaccaagccatgctcgaggaggcgatcctcgcagccaaggcgggcgagatgggcctcgaaaaaccgcgcgacaagatcaccccgcagatcacggtcgacgccccgatcatgatcccggaagactatgtccccgacctcgcggtgcgcatggcgctctaccgccgcctcaaccaggccgaggggcagaacgagatcgagagccttgccgccgagatgatcgaccgcttcggcgatctgccgcagccgaccaagaacctgatccgcctgatcgaggtcaagcatcaggcgatcgcggcctgcatcgccaagatcgacgtcggcgcgcggggcacgctcgttaccttccacaatgacgatttccccgatccggcaggcctcatcgcctatgtcgagcggctgaacgcgagcgcgccggaaacggccaagctgcgccccgacatgaagctggtgatcaaccgcgcctggggcgatccgctgagccgcctcaacgggttattccagctgaccaagggcctgagcggcatcgtcaagaaggctgcgaaagcgaaaaaggcggcgtgaccggagcaattgccgagcggaccatctgacgcccgcccttttgccctactcccggcgaattcggcaggtttctccaggagtcgtaaatggccggcgagggctgacgacaccgctatcgtcggctgccccgcgctctacccgtgccccatcccccgcgcggtgcgggccagcgccagcacactctcgctcggcatcggctgggcgcgcaggaagccctgccagcaatcgcagccttcagcggtaatcgcggagcgctggatctcggtctcgatcccctcggcgtagatcgcgaggccaagcgccttgccgagctgcacgatcgcgcggaacaccgccagcgcggtgggatcgccgggcaccccttcgaccatcaccttgtcgagcttcagcacatcgagaggcagctcgcgcagatagcggaaattgcagaaccccgcgccgaaatcgtcgagcgcggtgcggaagccgaggccgcgcagcgccttcagcgcgctcgccgcctgggcgaggttgcgcagcagcaggtcctcggtgatctcgagcatcagccgctggggggtgatgtccgactggccgatgagcgcggcgaaatcggcggcgaagcgcgggtcgcccagttcctcgggcgtgatgttcaatgacagggtcagcccctcgggccaggtgccggcatcttccagcgcacgggcgacgacgtggcgcgacaggggggcgaccagcgccgcgcgttcggccacggcgaacaggtcgcgcgccccgatcggccccagcgtcgggtgccgccagcgggccagcgcctctgcccccgtcaccgcgcccgtgacgcaggagaactgcggctggaacagcacctcgatctcgcgccggtcgagcgcgcgcagcagatcggcctcgagcacgcccggtcgcacgccgggcaggtgcccgcgcgttgccggtgcgcgcaaggatgtccgaccctgttccatcacgctcctctttgccccgccctcccttaacccttgatcgcgcgcctgcctcgcatcaattgcaatccgagccgatatggcacatcagggcaaccgcctggcacggcgtcggggataacccaattcgcgccgcttttctgccggagggggacgaatggcgagcaacggcatgacctatcagcggctggcgctgctcgcgtcggacaccccgcgcgcggccgaggcctacgacgcgctgctcgcccagggcgaatgggtgccgctcgacgaggccgatgccgtggtggtgctcggcggcgacggcttcatgctccagacgctccacgccatgctcgatgcggggcgggtgatcccggcttacgggatgaacctcggcaccgtgggattcctgatgaaccgctacgaccggcgcgccgcaatcgccgccaaggtcaacaaggcacgccactggacgatctcgccgctcagggtcgaggcggtgacgcaggacggcgagacccacgtgatgagcgcgatcaacgagatctcgctgctgcgcgagacccgccagaccgccaagatcgaggtcaccgtgggcgaccgcgtgcgcatccgcgagctggtgtgcgacggggtgctggtggcgacgcccgccggatcgaccgcctacaacctctcggcacaggggccgatcctgccgctcgacagcaagatgctcgccctcaccccgatcagccctttccgcccgcgccgctggaggggggcgatcctgcccgaccggatgaagatcatcctcaaggtgctcgaccccgccaagcgccccgtcgcggcggtggccgaccagaaggaactgcgcgacatcgccgaggtgcggctcgagatcgcgcgcgactgcgacctcaccctgctgttcgaccccggccagagcctcgaggagcggatcgtggcggaacagttcgtgacggcctgaggatcatccaaggaccggccaaaagcctcttgcaatcccgttttacgccacatataggcgcgcctctgccagcggtttcggctgctggttgctccccgatagctcagcggtagagccctcgactgttaatcgagttgtcgtaggttcgaatcctactcggggagccatttttctttattttacatttgggaatcaaagctttacctttttaagctgcaacctttccccacaattccccccacattgcgcactcggtctagtctcacggtgagtgggcgatggttacgtcacggcgaatgcatgacagcttttcggcgattggctgaaccattgcgaaggccgacgttgctgggatctttgagatttcaaaaccaaaaagaccgcagtgtttctcgagcggcgctccagatcaaaccaccaagatgattaagcgtaagaaactgttacgctctgctgccgctttgcgaagcgaatcgcaccaccggtgaaacccaaaccaattatcatcatcagccaagttccgggctcaggaactgcggggacttcgcttacattaagcgtaaagcctcggccatccacgcttgtcaaactgaacgtcccagcggcaaatctgggcgcggatgttgggccggagaatagctggatgccgctgtattctgcaatccggtttccattaagtaaaatgaaaccgcccccgtttacgtcttcgttctgaatccaaaagtgaagatcgaaaacttggtttgcctgattaatcgttccgcttactcccctgatgacagtcctattgtttgtaaaaactgaaggcgtttgattctcatttagaaaccatgaggcgcttgtcgggccacttaattcaaacaacaactccgctgcgctagcattcgcaggcgacacaaaggccgctagacttgcggctgctgtcaagaacggatacgccttcattgaaccacccccaatatgaagccagaaagacagaggaaaaagttaacacagctagctgacacggcaactcatttttgggaccaatcgagttgcattgatgtccttcgtcaatgttgaccccgttcctgggtttcctgcagccatagcaaaagtccgcaggttggtcttcgtgcctccttcgcggcacaagcacgccgggcgtgacgctctagttttgcagaaacgccagcgcgcttgctcccgcgtttagtgccacagggattagcgcggcatgacaaacaagcgcgcagccaagatgacgcaaacgcagcttattgaccgttctgcggtctctcacagaaggacagcttgttgttgagatagatgccttgctaccgctccagccatagtgggtctcgaaaattagacctcacgatctcgcgccagcatccgaatcaagtcctgacatcgccgcgcctcatccgatcgcccaccgtgcttgaaggcgttacggttgcccctcggcgcgccgctgcccttgcccccgtgcatgcggcatcgggctttgcctttcaccgctggggattggcactccgttcccttgcgggtccgcgccaagcagcgcggggctttcgccaacggttccggttgcatggggttgttcgtttgattttccattttcgctgccccccgtgtgctggtggaattgatcggcgacaatcgcttgccccccctcgtttacgtgaacgtgcttcacggtctgcacccgcccgcttgaaagccgctccagcgcttcgattgtcgctcggcattgcgattgtgccttgagcccgagccgcatgtaggtttcggtcgctccgagatattcgcccatattgagggcagcccgtcgcgccatttccgtgaaaatcgaattgagcgcatccgcttgcgcagccagcatcattttctgatgcgacaggtcgcagccagcggctttcgccaccttgtccctgtgagactcgaatagcgctgttgtgtccaaatcgccaaagctgccccgagcgaacatgcgggttgccgccatgccgtgcgcagccgggtctagtgcaacatcagcacggcagcgttcagcacttttgccgggctcggcggccactgaaagctggtccttgcctgcctgcccagcggcctttgtcttgcttgccttcgctgtcattccatcatcacctttcgatcaagtcgccccttgcgacactcgcgacaattgcgacaaaccatcggctcggctggcccatgtcgcgaaagtcgcaggtgtcgcagggggtccgggttcatcagccagcgccgcccgatcggatcacgcgccaagcttctttgcggctggagccgcgcactacggttcccgcgtccagtcggacaagccagccatgctgttccagcagcaacagggccgcccgagccttggggctatctcgcaaggcgttaggccccctgttcaccacatcgcgcaccagcacctcgggctcgggccagcgttccagcagccagccgcgtaattgttcggcgcggtcaatatctgccgacacgttcgcgacctcggcgagccgcgcagccttcagcagataaaagcgggctagttcgatcgcgcttgccatgtcagcagccgcaacctccagcgcctccagatcgcgccagagtgtcagcaccccagcgagacgcgccgcttgctctgcggacttggaagcggtgcccgtgaggttcgccatatcgcccccgagtgcctgcgagcgctccacgctgtcatgatagtgcgctagcatttcccgcgcctcgccagagagtggcaggcagcgcagctggagcccccctgtgtcggcatcgatcggcataggggttgcgagaatatctcccagccgcctttcgaagctggccagtgctgaggggctttccttggcattggcatgcaagcgggtgccgatagtgctcggcggctcgcacatcaggaaacggggcagaaaacccgtatcagccgccagcggatcggccatgaaagcccgcgcgacactcggctgcaccataaggtgaatggcgagccgccgcccataaagcgactggtgcccgtcgcccgcgcgggtccgcttgatcgcatggccatcccaaagggcattgaaggcagcgagggtcttttgccggttctcgctgttcatggcatgcccgccgaggaattgtccgccttcgtcggaaaacaggcctaggctcggttgcccctcggcaaacagtttcgtgaggccttcgaaggtcggttcgctaacggtccgatcggtaagcgcaggcggctgaggttcggggccaagggcgcgcaattctgcctctgacgccgcccgatcgccctttttacggcttccggaaactataccgtcatagctggctttccagatcgcatgccgccgcttccactcgtcacggtctgcccggtgcgcaattgcgtcctcgcgctcgcgcgcgcgtattgctccgagaaaaggccgatcgcaggcggatttgcgctcgccggatcttgcgactgtcaggaaataaatcccgacaggccgcgcgccccccagcgtttccacatcggcaaagccttgcaccgccagcgaagccaccgccagggcggattgcgccgcgattgcgacaggggccagcgtcatgccctgcaccgcctccacagccgcgcgaagcggcccgaccgctgcgacaggatagggagcgctggggggcgtcgcccgcaccagcggttgcggcccctcggcttcgaagggggtttcggggatcggtagcaaggtcatgctgccaccgcctttccggttagaatgtcattgaagtcggcaccctcgccgggatcgatcagggacacgcgccagcccagcgcatgcgcccgattggccagcacatgcgcggcctcgcgccctggctggtcgccatcgcccgcaatcaccagctgccccgattgctcgggcaagcgcagcgcgcgcatgccgctggtggagagcgcggcccacaccgccacaggccccgccaaaagcccgcacagcagagacaggccgctttcaatgccctcagtgatagccacccgcacagcgccgccagagagccttacagcgcccccagcagtcgcgccgagcatcagcttgtcaccgcccgctaggccagccttgccgcggccatcgggccgcaaataggtgcggtgcacggcgaagcccgagcccccttcgacaagcgccaccattgcggggaaacgggcaccgctcgggccgtgccagcaatgcgggtggaagcgcagccgatcgggcaaggggcaggaaatgccccgcccccgcaaataggtctcggctggagtgccatcgatcggcaggccctcgctccacagctggtgcgctgcctctgcccgccgcgctgcctgcaccttggcctcggcagcccgcttggcgaagtctgccggatcgagcgcgcgatagttgccatcaattaccccagccgccgccagaatgtcgcaaaagtcgcaagctgcgcgcttacagtggagcaagagacccgatcggccatcggacagggttaaggcgttctggtcccttcgccggtccggctggcacataggacagggcgcggccccgtagcggccatgccagcgcccgccgagcgcaagcgtcaattcgcgggcaccggtcattgcgcgcccccgtcaaatatcagcgccccgagcatcaccgccatgtcagggcggatcgcatgggcaagcatcaggaattgcgcccgctggtgagcgaggctagagagttcatgcgacaggcctgcaaagctatcgcgcgaagccccgccggtgccagccagcggggcttccttctctggatgcggaaaactcggcatcggtcagccctccccatcgatcagagcgcgcaggctggctgccgggatcagggtgcgcttgccgattttgcgggcctgcaagcgaccttcgccaatcagctgatacaagcgggtgcggcctatgctcgaaacgcggcaggcatccgccacgctataggctaagggttcgggggattgttcgggggtcatcggcatcgtcctttgtgcggcaggcgggattacctgcacggcaccggacgattatcggggcacaaggcccactcgggcaaagcctataggggggcagggcaaggccagatttgcccgaaatagggggggcacccccgctacgaatggctgaaaagctaggctttcagcgtcccccccctttttttgctttggcgcgcagacctgttccgatcgatcggttgtcggggaagccgatcacccttgtgatggcttcaacggcattgtctgaaattgtaatgccgggaaacaagtcaggccatgcgcccctaatctctgcctctcttacaggattagtttcgcaggcttttcggctcgtatagccgtttcttagcgcaagccggacagcgccttgcagatataacgatagacgcgacagatcggcctcgctgacgactaatggcgcatcgggctcgagtctcaacacattcagcagctcgtctttctcgaaaaaaacgaacgtatcaaaggggccagcgcttttcagatcgcggcaaaagcgattgtttcccccattgcttacgaatgtaatcaaaggaatgtctacgttccactcgtgagcgctcattggcatgacgggtccgccgccgacacgtagtctgtaaaatgatctcaattccccatcacggcatttctgtgcgatccagtctacgctcttattgagtcgttcagccgccctcctattcgcctcccactgctcgtgtaacttctctgccttccagtccaaaacgtgctctattggtgcatgccttatgggctggcggggccttggattggaaagactgtgagggattggaggcgaaggccgaaaagtttgtgcccgctttcgttcggcttttggactttcaatccaagatatggccgagagttcctcgccggtccaatcgggcgcaagaattgccgacccgacaagatttatggcctcaaagataaagacatactgcgagggcgctttgggccaggtcttggggaattgcaccgccggaaagcggattatccgcttggcagagtcatgcagcgggttctcgaagggcatggggcaccatcctattctgccgaacaggtggagcatccagccgccctgtcggggcgaaccgcacctgctctactccatcaacagattaggaacagttcgggaacgtgcaagcccgtttgccttcaatcagggacttatcccctattcacgcacccttcgcgccaaaacgagggatttgatactccgggcgcagccagcggaccttgcctgccttttcctctgccgcgcgctcagcgttcaatgccacctgccgcgcaacaatctcggtgggggcagattggctggctagccgtaggcggctgcaactcggcgtcgatttgccggtggagccggtcaacaatgccgacgcgcgcggccttggcgcgttccacttcgatcaggtccgaaagctgagcttagctgttccggcgtcgagcaactcgccgaattcgcaatttgtgatcggctaaaggatagtgtggttgccagcccaaggtcattatccccgcggcgcggatttcttgtgcaattgagcttggttaggcgatagaccatctattgatcatagcccttgaagcggatatcccagttccgggacagctcagcgcactgggtggcccatcatggctttgtctggcaagagaaccgtctggggtctgacaaatacgggaggcagcactcaaccgaagtagattgcggcgccttcgattaacgaaagcgccgcaatgaaccggcggtgtctttgggatgccgaacccacacgaagagacatttgcttgcgaaaagcagccccatctcgttctgctagaaattaacggtagcaacatacggcgggaggtcaagtgtgccatcagaactcgtcttcggttttgacatcggcaccacctcgatcgggtcggccatcatcagaatggacagcacagccgaagccggcgaggttctgcacttaggggttcgcatatttccagaagcgcgcgacccagacggcattccgttaaaccaggaacgacggaaacgacgcatgatgcggcgacagctgcggcggcgacgcacaagacgacgcgatctcaaccagtttcttttcgaggctggcctgctgcctgaattcagcaagaaagcagaatcagcatgggctgaggtcatggccctaaacccatggatgttgcgggccaaagccacccgcgagcacctctctcctctcgaacttggccgcgcgctctatcaccttgcgcagcgtcgccatttccggggccgcgatcttgaggacgcagccgcagccgatgaggacaactgtgaggcggcgagtgcagaggaacaaagggcggcatcccagcgggagaaggatcgcagcgccctcaaggcttcgggcctcacgcttggtgcctacattgcggccatccccgaacgcatagagcgccggcgcgggcatcatttcgcccgggaagatgtcgtcgccgagtttcgcgcgatcatcgcggcgcaagcgccgcattgtgcaaaactgcgcgatgctgattttgtcaccgcacttgagcagacaatcttcaaccagaagtcggtgttctggcgaaagtccacgctcggagagtgccgcttcgtgccccgcgccggtctcgcggcctcggcctcctgggtcgcacaggaaaagcgcatgctggaaaagctcaacaatctgcgcatcgaggaaagcaatgaccgcccgctggatgaccgggagcgagccgcgctgctcgcactgctacgcaaaaaggacagcgtgagttggggcggtatccgtcggcacctgaagctctattggcgcaagcatgatctgccggaaaagccaacgtttaatctggaacgcggcggcgaaaagggactggtgggtaacaggctggaaagccgcctagccagcatcatgggcgaccgctgggacgccgatgcagcctatcgagaccggatacgccgtgagattcatgcccgcctctatgccgccgattatgaccagattggcgaccgtatcgtcattcggcgcgaggcagagcggcggaaggcacgcgcagcggagcgggagcgcctcatggcagatttcggactgagcgcggagcaggccgaaagtcttaccgcgctaacctttgcacctgggtgggagccgttctcggaagacgccctttggaaattcctgcctcgcctacaagagggtgcggtctttggcgcgttgctcgccagcccggaggaggagggctggcgcgccagtaccttcccgaaccggctgcagcctaccggcagctgggtggatcgtctgcctacgcccggcaacagccgcgaggaaatcaatcggcagaaagcggtgcgcaacccaaccgtgctgcgcgtccagaatgaactgcgcaaggtggtgaacaacctgatcgccgtctacggtcggccggatcgcatccgcgttgaggtggcgcgcgaggtgggcaaatcggcgcgcgagcgagcggaggacctgaagcgtaaccgggaccgtgagaaggagcgcaagaaagccagcgaggagctccagaaatgtggcattgcccatccaagccgcgatgacatcgagaaatggctgctgtggcaggagtgcaatcgccaatgtccttacacggggcagatgatcgactttgctgccctgtttcatcgcggggagtttcaggtggaacacatctggccccgctggcggtcgctggacgacagcttcgtcaacaagacgctctgtcaccgcgacttcaacctgaaaaaggccaaccgcacgccgttcgaagtattcgagcatgatccggatgggtgggaggctgcactcgaaagggttcgcggctttgctggacccaaggggcgcgtgacgatcaaggcccgccgtttcgcggcaagggaaatcccggccgatttcgccgcccgccagctcaccgataccggctatgccgcccgccaggctgtagggttcctgaaaatgctgttccccgatctgggccaggccagcgaggtgcgggtggccacgctttcgggccgggtcacatcccggctgcgtcacagttggggcctgaacggcattttgtctgacagcggggagaaggcccgtgctgaccatcgccaccacgccatcgacgcgctggtggtggcactggcgcaccccggttacacccagcgcctgtcgcgctggttccaggcgcgcgattcggccacaccgcagcccgagccgcggctcgatccgccgttcgccaatgttcggcaccaagccgagcgaaaggtcgccgagatcgtcgtctcgcaccgcgtccgccgcaaggtctctggctcactgcacaaggataccacctatggcgatgccggcccggtcgatggcaccggcgggatcgcctatcgctggttcgtgacgcgaaagcctttggaagcgctgaccaaatccctcttggccgacgatgatgcctggcccgatgcgcatgtgcgcgaccgagtgcgcgcttggatcgaagcgcatggcggcgacccgaaaaaggcgtatgtgaacggctatcccactgtctccgaaggcggcgcgccgatccgcaaggtgcgcatccgtttgaaacagcagcagaagctgatggcacgcctgaaaaacggccatgccgatctgggcaacaaccatcacatggccgtgtttcgccatgccggcggccgggtggaaaccgagatcgtgagcctgttcgaagcagcccacaggttgcgcaaacacactccggtgatccgcaaatcactgaacgaggcaccgctggtaatgtcactggcgcagggggacacgctttcctttcctgatggcaagctgcaagggctgtggatcgtgcatggcgtttgggcgggtggccaaattgtgctgtggcgggccgaggatgccactggcagcagcgtgttccgccccactgccgcatccatcctgaagtccggcgggcgcaaggtttcggtcgatcccatcggccgcatccgcccggcgcgggactgatgctgaagaagaggatcgagatcgcgcgcggggcaggcgtctgtcggtcgcgcaccggcagttggtgatcgagcggccggagattccgagagcgaccgttccaatcgaggacctgggcgtgctcgtaatcgacaatgggcgcgccagctacacccaagcgatgttcattgaacgtctggcggccggcgccactattgtcgtgatggggtgcgatcatctgccggcaggcatgatgctgccgatggacgggcaccattcgctaacgcatcggcactgtgcgcaggtggagacaagcgcgcccttgcacgagcggctgtggcaggcgatggtcgcggccaagctgcgccagaagggtcgcgtgctcaaggcggccggccgggacgatgcgggccttaccgccctcgccagccgagtgcgccatggtgatccggacaatctggaggcctagggcgcacagtgctactggccgaaactgttcggcaaggcattccgcggggatcgcggcgccgataatgccaatgcactgctcaactatggctatgccatcgtgcgcaccgcctgcgcccgtgttctggtggcatcgggcgtgatcccgtcgctgggcgtatggcaccgtaaccgctccaaagccctcgcgcttccagtcagttacgcgagagcagctccagcagaacgagaaagggctgcaatccgcagcgccacgccccgccattacaggcagaccccggctctagcagaacgagaaagggctgcaatccgcagctgtctccggtgagggcgccgcggagagtgcgctttagcagaacgagaaagggctgcaatccgcagcagggatgaactgatcgcgcggcttgaggcgctctagcagaacgagaaagcgctgcaatccgcagcgttctcctgaaggtgcgcacggacggcgaggctctagcagaacgagaaagggctgcaatccgcagccaggacaccccgcgcgtgacccaggaggatgctctagcagaacgagaaagggctgcaatccgcagccacgggaatgggcagggctagggcttgccaaaggtcattgataaactgaccgagggtggcgcgctcggccccgccggtcacgccgccccacttggcgatgaaatcgttcacggtcacgtgcggtgcactgcgcctctgggcagaggcataactgcgaggctggcagccaccgagtgattgattggctttgcagcctaattcgcggcagccttcccgatcgcggtcacgttatcggcgacgccggacagctggggagcaacgtggcggccccatgcatccatcaaggcgcggcgcatgtcgcgcagatcgctgcgcagataggcctgttcggttgcggtgccgactttgtgcgccagcgccatttccgccaccatagcggggatggtcggcattttctcggctgcccaatccctgaaagaggaacggaagccgtggacggtctctgtccggcccgcgctgcgcataatcatggaaagcgccatgtcggtaagaggcttgccgcgcgcgcctcggaaaatcaggccctcgcgcatgtcctcgggggtgtaggcctccagcagcgccaccgccgcatcggacagggtgacaacgtgagggcgcttcattttcatcagttcggctggcagggtccaagtgcgggcctccagatcaatctgttcccatgtcgcttgccgcgcctcaccagagcgggccgctgtcaggatagcgaacagcagcgcagatcggccagccgcgttgcccttggcatactcgcccgcaaagaacgcgggcacttcgataaagggcacggcttcgaagtgcttgccagccttctgcttggacaggcccgagcgcagttcccgcacatcgggcaacgcctcggcgcgccagccttgggccttggcataggccagcacttgcccgatgcggctccgcaccttgcgcgccatcatcggcttttccgtccagatcggggcgagcgcgccgataacctcggcgctgccgatcgcatccaccctaagcgctcccagcttgggcagggcatggtctgcaagcgacgtttcaaaggccttggctgtcttttcgctccagcccgcctttagagcctcatgggcggccttcatggcctcggcgaaagtcgggacccgcttacgcttgcggtcgcgctccagcaccggatttgccccagccttggccagcttgcgcagggcggctgccttttcgcgagcctctgccaacgtgagcgagcgcttgagcatcagcgaggcttcccctagccgatcatccccagccccgaaagcctcgcgcccagcgccgtcaacatcggcagccccgaggccaatgtcccgccgcttgccatcggcctgcacacgcaaaatccaagactttgcaccggtcggggcgcaattcaggaaaaggccctccccgtcctgaaaggtcgctttgatcggctggccattcttgccgatacccggcttagcgtttttcaccttagcgactgtcagcttgcccatgacattatccccacattcttacccacactttagggcggttatgagtgaatggcaatggccgatagcggcagaggcttttaattaatttcaataattcaatggatttacaggccgtgactgactggcactgaaagcgccttgtgattctactcggggagccactttcttccagaccccagaccgaattcctgcctgcgcggttcagcgcggtgcggcggatcgcggctgcgcagggcacatcaaggtcaccctgcctgccgcgaagtcataggtgatcgaggcacagtgcccgatcgtgtccatgccgatatagagccgctggttgggaaccttgcgcttgctgtcgccggtcacgacgatctcgttggggtcctgctcggcggacgccccttcggctatgccctccgcgctccccatgtccgagacccgcacggcgagattgcggatctccagttccccgagcatcagcgggcgtgccagttcgagcgggcggacggggcgcgatacgccgtagaggatcggtgccgcgcgcgcccccccggagaactgcccgccattggcatcggcgatccagcgcccgcccgttgcggtcacgaggctctctgcccggtcgaaactgaaggccgcgtagatcgggcggccgccgacatccagccgcacgcttgtctggctgcggcccatctcgcggtcgagagggaaggtgacggcgcggtcgtccggtcgcggatcgcgcaggacgaaggtggtccgcgcggcggggaaggattcggggcctgcaatgccgtcggcgcctgaaacaagctgtctgtcgctgaaggcggtccggcggcggaaggacgcatcgcgcgggccgtagcgcacgttgtcggtgcggaaggcgatcttctccgggccaatgacgtagatgtaaccgatcatgctcggcttcagtccggcccttgcggcggcatcggcattgatggtcggaacggaaatcgcatcgggcgccaggcggaaccgcatgggctggtcgttgatggtcatgtcgaccgcctcgccggcgcgcacgacaatgtcggcctgctccggtgacggtgccttcgccaagccaggcatcgcgatcgcgagagcggcaaggacagccgaggacacccgaaacatcattgaaaattcccctgaaagtttcacgatttcaactccatggtcactgaatggcgactgaatgccgggccggtaacctatgttcgggcgaggcacccccgcacaggcgatggtgcggctcgcggcgcagggatccggcctgcagccgctcgtccacatcaaacgggggaagatatggagaaccaccgcatcgccgtgccttttgcgcagcttccggagatcggcggcgggaaagccgcgtccggcggggccaatttgcatcccgtttcccggccttcgccagccggattgacgaccttcgacgtgttcgagacgctgctcgtgcgctgcgtcaccccgcatcacgagattttcgaccggctcggccgggccgctgcaagccgcgggctgattccctgctcggcccacgccttcgcgcgaacccgcgaggccgcgaaccaccgcgcccgatcgcttcacggcgatgcgatgtgcctgcgcgagatctatgccgatcttgcggcggcgctgggcctgtcggcggaggtcgcgcaggagctgatggcgctggagattgccgaggaagcgcgcgcgctgcgtccggtcgagagcgcgaggccgctgctggccggggcgagacaggcaggacgtggcgtcgccttcgtctccgatatgtatctgccgtcggacttcatccgcgaacagctcgaacggcatggcttctgggaggatggcgaccgcctctacgtctcgcacgatcacggctgcgagaagcgcggcgggcgcctgttcgcaatcgtcgcagcagccgagggcgtctccccccgcgccatcacccatttcggcaacgacaccgccgccgatctgcgcgggccgcagaaggcgggggcgaccggtaggctcgtcacagccggcaaccccaaccgctacgaacgcgcactggagtccttccgccacgagaccgacggccgagccgcgatcctcgcgggcgcctcgcgtctggcgcgcacgtcgatcccggcggcatcgggacgcgatcaggcgatgatcgatgtcgcggccggagtgatcgccccgctgctcacatccttcgtgctgtggctgtttcagcaggtcgaggagcgcggcctcaaacggctttatttcctctcgcgcgatgccgaaatcctgatggaaatcgcgctgcaactcgcgcccaagctccgcaaccgcgtggagctgcgctatctctatgccagccggctggcgtggaactcggcagtgtccgggcccgataccaacccccacgtgtggtacagcgtcatctaccagtcggcgaccggcttcaccaatgccgaactgctcgagcgcgtcgggctggagcaggaccagatcgagcggatcactgccgcagaccgcagggaatggagcgggacgcgcgaccgcacgatcctgcggaccacgctcgagggcctgcaggccgacgggacgctgcggcgacttgccgagcggaacaaggaactggtgctcgactacctcgggcaggaaggcctgttcgacgatgtcccccacgcggtcgtcgacgtgggctggcgcgggacgcagcacgacgtgctgattgaattgcagcgcgaacgcagcgtcgccccggcctatgggctgttcttcgggctcgacctcagcggcagccggtgggggagcctgcgcagcggattctatttcgatgcccgccgtcacgccgcggaaaacgccggcgaagtccatgacggcccgtggggctaccagcccccccgcgtgcccgaggaactgggcaaggtggccccgcgcgagctctattcgctgttcgaaatgttctgcgccggccgcgagggttcgctgctcggctatcgccgcgaggacggccgcgtgctcccggtcaccgatgcgcgcaggccggcagaggtccgggcgtggaacatcgaccgggtctacgaaaccgtcgccgcctttgtcgccaatgtcgacctggacgagacgtccttcctcaatgtcgacgtgaggcctgccctcgaacgcgtcgtcgacctcctgtggcagcgcccgacgcggctcgaagccgaggcctggggcaccttcccgtgggaactcggcctcggcagcagccggtgcacccgcgatttcgccccgccctacgatcaccgctacatcggcacgaaactggggctggatgcgacgctgaagacccagtggccggcggcatcgctggcgcgcagcaaccctgtcatgcttgcgtgcaagacgctgaaggacggatcggcctatccgcgcctgatcggcaagtcgaaggcggtagtgagacggctcgtgggctgaggcagcgcggccgcagggggcggattgccttggcgggcggagcggttcatcctgcccgccgtgaaccctgccgcaaccatcgccctgatgttcctgatcggctattccagccagcgcagcggcgtctgcatggtgcgggcgatgcgcgaggtgatcgagcggcggcgggtgcaccgcctcgcgggcttcctcctcgccgcagcgagcgcgatggtggtgatggggctcgccaaggcgctcggggccagtccgttcatgacgatccctggcgccccgcccgacgcgctggcggtcgcgggcggcgtgctgttcgggctcggctcgctcgtcaacgggcactgcgcgctgggcacgctcgcggcgctcaccgccggagaggtgtcccgtctcgcgaccctcgccgcgctgttcgtcgccgcgctgcttctggggccgagcatgtcgggcgcggcgctgatgctgccggagcgcccggtggtgatctcgccgcttgcccgcgacgccgccgatgcgctgatcctcggaagcgtgctgtcgctgatttcggcgggctatatccatcgtcgtctgcgctggaagaggccgcgcggcggatggtcaccgctgatagccatgaccctgatcggcgcggcatcggggttgcttttcgcgctcgaccgtcattgggtctacacgagccgcatcgcggaaatcgcttacggcaaggcctgggccctgccggcggtggtcgggctggccgcactgttcgccgggatgacgatcgcgacggtggtcgccggcaccttccggctgcacaccggctcgttctcccaatggctgcgcgcaggcggcggcgggctgctgatgggcaccggcgcgacgctggtgcccggcgggaacgatgcgatgctgttcaccggggtgccgctgctgctgcccaacctgcttgcgggctacgcggccttcaccgcgaccttgttcctcgcgttggcaatccggcggcaggctgtgccgacggacgcctgaacctagacgccgaacagcaggcggacgcccaccaccagcaccaacagcgcggtgagccagcggatccattgctgcggcagcaggcgggaggccatcaggctgccgacctgcccgccgatcaccaccgcgagcagcagcggaagcgccgcgccgatcgcctgtccgaacagcgcggggccgttcttgaccatctgcccggccagcccgaacagtgaattgacgaggatgaacaggctggcggttgccgcgatcccccgcgcttcgtgccagcgcacgatgtgcagcaggggcgcaagaaagatccctcctccgatccccaccagccccgcgagatagccgagcggcgcggcggcgagcggcatgagacgcgcggcccatgtcggcgcgccgccggcgccctcacgcaccggcatcagcatggtgagcgcggtcagaacgagactcccgcccagaagcatcaggaaggtcgcctccctgatcggggtcaggccgccgaggaagctcgccggagcgccgagggcgacgatcaccagcgccttcttccacggggtcacgccggcgcgggcgaagcggatgcttccgcccgtcaccaccacgatattgcaggcgaggctgaccagcgggatcagccggtagtcgaggtccgacagcgccagcagcgccgaataggtcgatccgccgccgaagccgacactggcataaagcagcgccgtcaccccgaaggcgagcgccagcagcaccggaaccgctccgatcatcattgccccccgctctcaggcgtcagacgttctgggaggcgcccaccgcaccgtggcaatgcttgtacttgctgcccgaaccgcaggggcacggcgcgttgcggctgatatcgaggttggcccaggggttttccgggttggccccgcccggcccgaacgccgcgcgcgggcttcccgcaagcgagccgaacagctcgggacgcagttccgaaccgtcgccatcggccgagttgtcgagcccggtcagcgggtcgatatggccggtgaggaagtcgggcagttccggcagggcctgcggcgcgggctgttcgatccgcagttcggcgcggaacaggatcttggtgacctcctcgcgcagggtatcgagcatggtctcgaacaggccgaaggcttcctgcttgtattcgttgatcggctgcttctgggcaatgccgcgcatccagatcacctggcgcagcgcatcgagcgtggcgaggtgctccttccagtggtgatcgagctggcgcagcagcacgtccttctcgacgatccgccagatcgaggggtccgatgccgtgaccttctcctccatcatcccgtcggtgagcgcccgcagcttctcctcgagcagttccggctccacctcatcctcggcgagccactcgtcgtagggcggctggaagccgaagatctcctcggtgcgcgccttgagcttctcgatgtcccactgttcgggataggagcccggcgggcaggcggcgccgacgatggcgttgatcgtgtcgtggcgcatgtcgaccaccacatcgtccacggcttccgaatccatgatctcggcgcgctgttcgtagaccaccttgcgttggtcgttcatcacgtcgtcgtattgcacgacctgcttgcgcatgtcgtagttgcgcgcctcgaccttcttctgcgcggtctcgatcgccttcgacagccacttggaaccgatcgcttccccatccgcgaggttcgagttcatcatcttggcgaacagcgtgtcggggccgaagatgcgcagcagatcgtcctcgaggcacaggtagaagcgcgagaggcccgggtcgccctggcggcccgaacggccgcgcagctggttgtcgatacggcggctttcgtgccgctcggtgccgagcacgaacaacccgccggccgccttgacgcgctccttctcctcggcgacttcggcgcggatgcgggcaatcgccgcgtcgcgctcgggcccctcgggtatctcggcgagttcgtcgttgatgcggaattcgacattgccgccgagctggatgtcggtcccgcggcccgccatgttggtggcgatggtcacagccccgaagcggcccgcctgggcgacgatgtgcgcttcctgttcgtggaagcgggcgttgaggacggcgtgcttcacgccttccttgtcgagatactggctgagcagttcgctcttctcgatcgagaccgtgccgaccagcaccggctggccgatctcctgctttgccttgatcgcgcgggcgatggcctggaacttgtcggcggtgttcttgtagaactcgtcctcctcgtcgatccgcgcgacgggcaggttggtcgggatctcgaccacgccgaccttgtagatgtcccagaactccgccgcctcggtcgccgccgtgccggtcatgccggagagcttgggatacatccggaagtagttctggaaggtgatcgaggccagcgtctggttctcgggctcgatccgcacaccttcctttgcctcgaccgcctggtgaagcccgttcgaccagcggcgaccatccatcatgcggccggtgaactcgtcgatgatgatgaccttgccatccttgacgatgtagtcggtgtcgcgcttgcgggcgaagttggcgacgagcgcctgatcgagatggtggacgacctgggtgttttcgacatcgaacaggttgtcggtggcaagcaggcccttctcgatgagcagcttttcgacctcctccattccctcctcggtgagctgcacgcgcttcaccttctcgtcgatgtcgagccattccttcgggatttcgcgcgccacctgatcgagtgcgacgtaaagctcggacttgtcctcggtcgggccggagatgatcagcggggtgcgcgcctcgtcgatcaggatcgaatccacctcgtcgacgattgcgaagttgaaggggcgctgcgccatctgcgcgcgctcgtgcttcatgttgtcgcgcaggtaatcgaagccgaactcgttgttggtgccgtaggtgatgt

SEQ ID NO: 3135 - DNA, 23138 bp, synthetic construct
  source 1..23138: mol_type = other DNA
  misc_feature 1..23138: note = Synthetic
ccagggcatcagccggatcgtgcagtcgaaccgctcaaccttttattgtgcccatcgccagcggtgaacccggcaggcgcgctggcacgccagcgatagccttgcgtggatgtggggcagtggggcacaacagccagcgatgatacgccacgcgatcccattgctgttcgcccctctgcgtgccgctctggtgccagcccttctggggttgctgctgcttgccagtgcgcctgcggcggcccagcgctatgtgctggggaccgaggatgtgccgttgatgccgggcctctccttgcgggccgatacgctcacctcctttgattccgcgcgcgggcgcgtcgtctcgatctacggcggcggccagctgcagcgcgctcaggtgttggagttttatcgtcgctcgctaccgccgcttggctgggatgtggtgaccacgcgcctgttccgccgcgagggcgagcacctgtcgatcgatgtggaggaccgcggcggcggtgtcgcggttcacttcctattggttccggcgaactagcccttccgaacctctccccacccctccccaccccctcacgggagttgccgatgtcctacgagatgctgctggttgaaacgcgcggtgcagttggcctgatcacgctgaacaggccgaaggcactgaacgccctgtgcgcccaattgatgcaggaactggggcgcgccgttgccgccctggatgccgatgacgccgtcggcgccattgtcatcactgggtcggagcgcgcgtttgcagccggcgccgacatcaaggaaatgaaggacttcaccttcgccgaggtgtttggctccaacttcatcactcgcgattgggaacacgtctcccgcgtgcgcaagcccgtgatcgcagctgtggctggattcgcactgggtggcggctgcgaactggcgatgatgtgcgacatgatcctggcggccgacacggccaagttcggccaacccgaagtgaccatcggcaccatccccggtgcgggcggaacgcagcgcctgacccgcgtggttggcaagtccaaggccatgcacatggtgctgacgggtgagatgatcggcgccgaagaagccgagcgcatcggcctggtcgccaaggtctatcctgctgccgacctggttgctgaagccgtgaaaacggcggagaagatcgcaagcttctcccgcccgatcatcgcaatggccaaggaagccgtcagcaaagcctatgaaacgacgctgaccgaaggcatcggatttgagcgccgcctgttccacgccaccttcgcgacggatgatcagaaggagggcatgaccgccttcgccgaaaagcgcaaggcggactacaagcatcgctaatgccgccggggcggatctttcgctacatcttcgggcaggcggcgctggccacggggctagtcgccgtctcgctcgggctggcgatatggttgacccagtcgctccggtttgtggactggatcgtcaaccgtggtctgccgatctccacctttttgaccattgcggcattgaccatgccgctgttcctgtcggcgatcatcccgatctcgtgcttcgcggccgtcttgttcacctacaacaagctggcgggcgacagcgagttggtggtgatgcgcgcctccggcgtcggccctgctcggttgatggcgcctgccatcagtctggccgtgatcgtcgctggaatcggctggctgctgaacctgtatcttctgcccaccgcctatgggcagttcaaggatctgcaatggcagatccgcaactcctttgcctccatcctcattcaagaaggggtgttcaccccgattgatgaccgcatggtgatcttcgtgcgcgagcaaagcagcgcgggcgagttgctggggctgatggtgcatgacagtcgcgagcccgatcgcacgatcacactggtggcggaacgtggcgcgctggtcagctctgctgaggggccgcgggttgtaatggtcaatggcaaccgacaggaattggacacccgcgacgggcggatctccttcctgttctttgatcgctacaccatcaccctggatgccgccgcaaatgcagcggttggcatccggcagcgcgatgcgaccgagcggtttctgtgggagctgttggatcccgccgaccccgtggacacgcgcacgcgcggtgtgttccgcgccgaagggcatagtcggctggcgaatcccctctataccatcgtgtttaccgtgatcgccctggcggccctgctgggcggatcattttcgcgccgcggccaaagcctgcgcatggtcggcgctgtggccgcagtggtcgccttgcaggcgctggcaattggcctgaccaatctggcggggcgcaatgccgggctgatcccgttgttgtacctcgtccccgttctggcaacggctgtggcacttggcgcggtggctgccccaccgggctggtttgaacaccgcttcggtcggcccaacagcccattggcgcctgagaacgccccaccgatcacaaagccttgacccggctgccggggctgcgtataagcctcgcctccgcgagttcaagagtagaccgatggcacatcacgcctccgccaagaagcgcattcgtcagaccgagcgtcgaaccctggtcaaccggatgcgagtgtcccgcatccgcacctttgtgaagaaggtggagctggcgattgaagctggcgacaagtcggccgctcagcaagcgtttcaggcggctcagcccgaaatgatgcgtggcatcaccaaaggtgttctgcaccggaataccgtttcccgtaagctgtctcgactgtcgaaggcgatcaaggcgctcggcgcctagtccaaaccgcccgtcgattgagtagcaaagcccttcgctgtttcgcagcggagggctttttcatttgattccaacgccttaagattctctcagagagtttttgcgcggattccttgggcttgcccgaatcaagactcttttttcacaatcgggcagattcgttcgctggactcaccccccagccctggatagagtccccgcccacaggccgaatgatgggaagttcggaaaatacctgtgaataagtcgcccgctcgcaggcgacgaaaaagactgggtggcttcatgtgcaagactagatcatttgatcgggccgtgctggtggattgccactcggtctcgactgtctggtacagcgaacggaatacgaatagcgacagcacagtcgtttttatctattccggagattgattttacttttcttctcaagctaggccaaactgtgacagtggggttgctaaagacccccttgaacattgatctttgtcaggagaccagggctatggcggacaccgccggacccgagcatcagctatcggctcaatggaaccgcgtgcgcgggcgactgcgtcaggaagtgggcgaggcggcgtttcacagctggctcacccctctggtgctggcaggtgtgcgcgatggggctgtgcaaatggggctgccaacacggttccagcgggattgggtcgcgcgtcattacgccgatcgcttgcgcagcctgtggtgtggcgagaacccagccgtgcgcacagtcgaactgctggtggtgccaagccgggcgccaaagccaatgcccgtgatcgaggcggacgctggtgctctcgtcactctcggcgatgacgcgcctctgcctgcgcgggcggttgatggagaccggtcgcgctggtcccagtcgttagccccaacccccctgccctcgttgcgcaccggcggtgtgtcccacactggtgcgaccccaggccctggcgttacggctgctcccgccagtggggacactcaagacgcgctggtgtcgggcgagttggatgcccgcttcaccttcgatgatttcgtggtcggcaagccgaatgaactggccttcgccgccgcgcgccgcgtggcggagcagccgacagctgagtacaatcccctgttcctctatggcggtgtggggcttggcaaaacccacttgatgcacgccattgcgtgggaaatccggcggcgcgaaccaggtcggcgggtggtttacatgtcggccgaaaagtttatgtatcaatttgttcgtgccctgcggttcaaggacacgctggaatttaagaaccagtttcgcagtgttgatgtgctgatgattgatgacgttcaattcatctcgggtaaggactcaacgcaggaagagtttttccacacgttcaatgctctggtggatcagcgcaagcaattggtgatctcggcagacaaatccccctcagacttggaagggttggaagaacgcctgcggtcccgcctcggttggggcttggttgccgacatacatccaaccacctacgagctgcgccttggcattcttcagtcaaagctggagcagcaaggggccgatattccgcaaaaggtgctggagctgctggcccacaaggttcaatccaacgtccgcgagttggagggggcactcacccgcctgacggcccatgccaagctggtcaaccgctcgatcaccgttgatgtcgcccaggacgtgctgcaagatgtgctgcgtgccaatgaccgccgcgtcaccatcgaagacatccagcggcgggtgtgcgagcatttcggcatccgccatgccgacatgagcagcgctcgccgggcgcgcgctgtggctcgtccccgacaagtggcgatgtaccttgccaagcaactcaccacccgctcgctgccggagatcgggcgcaagttcggtggccgggatcacaccacggtgatgcatgccgtgcgcaagattgaagagctggtggcaagcgacgcagccctggcggaggatgttgcgctgttgcggggcatgctgggcggctgaggtggtttctcttccgctgctgcaggctgtgccagagttgttgaaaggctgcggcacctccgctacacccttcgtcccatccttgcgcggtccggtgccgccgcacggcccgtcacgctgtttcgagttcctgcgatgaagctgaccatcgaccgcaccgccctgttgaagtgcctaacccacgtgcaaagcgtggtggagcggcgcaacaccatcccgatcttgtccaacgtgctgatttcagccggggatggtcacatcgggttgaccgcgacggacatggacatcgacatcgttgagcgcgccgtggcatctgttgaggtgccgggttcgacgactgcaccagcccacaccctctatgacattgtgcgcaagctgccggatggctctgaggtggaactggatgggggcggtgataaggaacgggtgcgggtgcgcgccggtcgttccaccttcaccctgcccgcactccccgtggctgacttccctgcgatcagcggcgacagcctgccccacagcttcgaactgaccgccaccgaactgaagcgcctgattgaccggaccaagttcgcgatctccaccgaagagacgcggtactacttgaacggcatctacgtgcatgcaacccgcatggacgatcgcccggtgctgcgcgccgttgccaccgacggccaccgccttgcacgggttgagcaggaatgtcccgacggtgccactggcatgccgggcgtgattgtgccgcgcaagacggtgcaggaattgcgcaaactgctggatgaagtggatcagccagtcgccatctctctgtccgagacgcgcatccgcttcgcctttggcgccgttgtgctcacctccaagctgatcgacggcaccttcccggattacgagcgggtgatcccgaccggcaacgacaaggtgatggaagtatccgtcaagccattctccgcagccgtggatcgtgtcgccaccatatcgaccgagaagagccgcgcggtgaagctggcggtgcagcgtggtaccctgaccctgtctgccaccagccccgatgcaggctcagcgaccgaggagttggaggccgtgtacaccgggccttcaatcgaaatcggcttcaactcacgctatctgctggacatcacgcaacagatcgaaggcgacgaagccaagttcatgatggccgacgccgcggcgccgactgtgatttatgatgcagccgatccggaagccgtgttcgtgctgatgccgatgcgggtgtgagcacgccagaggcggcacccagcacctccggcagcgccccgcgctgcccggccttggttcggttgtccctggctggttttcgcaatcacgcccgcctggagttgcggctggaaccgcgctctgtggtcttgatcggcccgaatggggtgggcaagaccaatctgctggaagccatctcactcctagcaccaggccgcggcctgcgccgggcgggtttgggcgaattgctgggcccggcagctacggcctgggcgattggggcaaccctccagggtcttgcaggggttcgggaggtggcaaccgcgctggaagccaccgggcgtggagatcgtcgggttgccaccctggatggcggggtgcgccggggtccggtgtcccttgctggcgtgctgccgctgctgtggctgacacctgcgatggaccgcctgttcgtggaaggcgctggcaatcgccgccgctttctggaccgtctggtctatggcctggatcccgcccatgcggagcgtctgcaagcctatgaccgcgccctgcgggagcggttgactctattgcgcgcgggacggcgcgatccagcgtggctcacagcgctggaagcgcgcctggcggccgatggtgtggcaattgcagccgcacgggtggcgaccgtggagcgcctgggggctgccctggctgcggaggacggcccatttcctgcagccgacctcgccctcgttggtgagatggaggcggcgcttgccaccactccggccctggccgtggaggaaggtttcgccacccgcttggcccgcaaccgcgccaccgacgccgaggcgggcaccaccactgttggcccccatcgcagcgacctagccgtcagctatcgcgcgcgcggcaccccggcgcggctggcctcaacgggcgagcagaaggccctgctgatcgcaattctgctgggtcaggcgcgggtggcatcagcggccggtctcgcgcccgtgctgctgctggatgaagtggccgcccatctggacgaagcccggcgacgggcgctgttcgaccgtctggccgcccatcccggtcaagtctggttgacagggaccgaggcggcgctgttcgcaggcacggccgccacctgccaaggcatcgcattggctggggatggttggcgcatggtagatttgctgccctgatccgatcggatcggctacaatctcaagcgatccgagggcggccttgaccgcccccgagctggagcataacccgttgactcagaacgaaaatcccgacgcgtccggttacacggccgaatcgattaaagtcctgcgtggtcttgatgcggtgcgcaagcgcccgggcatgtatatcggcgacaccgacgacgggtcgggcctgcatcacatggtctatgaggtggtggacaacgccatcgacgaagcactcgcgggctattgcaccaaggtggaagtgctcctaaacgccgatggctcggtgacggttcgcgatgatgggcgcggcattccagtagacatccaccccgaagaaggggtgagcgctgcgcaagtcatcatgacccagcttcatgccggtgggaaattcgatcagaacagctataaagtgtctggcgggttgcacggcgtgggcgtgtcggtcgtcaatgctttgtcgacttggttggatttgcgcatttgccgcagcggcaaagaatattacatgcgcttccaccatggcgaggcgatcaaggacctgcatgttatcggtgattgtggcgaccggcatggaaccgaggtgaccttcctgccctcgccggaaaccttcacccgtacggagtttgatttcaaaacgctggagcaccgcctgcgcgagttggcgttcctgaactctggcgttaccctgcacctgaccgatgcgcgcggtgacgagccagtaaccgtgccgttgttctatgagggtggcttgcaagcctttgtgcaatggctggatcattccaagacagccctgcatgaaaccatcgccatccggggtgagaaagacggtattactgtggaattggccctggaatggaccgatgcctaccacgagaccatgctgtgcttcacgaacaacattccgcaaaaggatggcggcacccatttggctgggttccgcggtgcgttgacccgcacgatcaatggctatgcccaggaagcaggcgtggcgaagaaggaaaaggtgcaactgaccggtgaagatgcgcgcgaaggcttgacctgcatcctctccgtgaaagtcccggacccgaaattctccagccagaccaaggacaagctggtcagctcggaagtccgcccggtggtggagcagatcgcagccgatcgcttgcagcaatggttcgaagagcacccggccgacgccaagcgcgtgatcgccaagatgtacgaggcggcagcagcccgtgaggcagcccgcaaggcgcgcgaactcacgcgcaagagcgtgctgaacgtcaccaacctgcccggcaagctggccgattgtcaggagcgtgaccccgcgcgcgccgaactgttcatcgttgagggtgacagcgccggcggcagcgccaagcaggggcgtgaccgccgcttccaggcgattctgccactgcggggcaagatcttgaatgtggagcgtgcacggttcgacaaaatgctgtcgagccaagaaattggtactctgatcacagcgcttggcaccggcatcggtcacgatgagttcaaggttgagaagctacgctatcacaagatcgtgattatgaccgacgccgatgttgatggtagccatatccggaccttgctgttgaccttcttctatcgccaaatgcctgaattgattgagcgcggccatctatacatcgcgcaaccgccgctgtttgttgccaagcgcggcgcctcggcggtgtatttgaaggatgaccgggcgctggaagagtttttgattgccaccggcctgaagaacgccgtcttcacggcaggatcagagcagatcgcaggcgaggacctccgcgcacgcctggatgaggcgcggcaagcggccccgtggatcaccacgctggcacggcgggcgggcagtcgcgagttgatcgagcaagcggcgatcctgggcctcttgaccccggacatcctgtcgccggagcgtgcggggcaagcaggccaggatttggctcaacgcttggacgcgctggctcccgccaatgaacgcggctggcgcgggctgctggatggggtggaggatggtcgcggtctggtgcttgcccgcacggtgcgcggcgtgacggagcgatgccgtcttgatgccgacatgttgcgcagtgtggaggcacgacgcctgacggccctcgccgcggcctacgcgcgctaccgggacggcgccagcctgaccattcgcgagcgcgcccaccccgtccgcggcccgctggcgctgtatgaccttgtgctggaaaccggtcgccgcggcctcgacatcatgcgctacaaaggcttgggcgaaatgaatgccgagcagttgtgggaaaccaccctcgatcccaacgcccgcactctgctgcaggtgaaagtcacccacacggagtcggctgaggaggtgttttccactctgatgggcgacttggtcgaaccccgccgcgacttcatcactgccaacgcgttgaaggtcgccaacctggatatctaggggctgacccagcccgtcggtgggaccctgacccgccgcacctgccgaccctgacaatcaaaacggcgccctcggaaaccgagggcgccgcatgaagtcggcagcgtctttgggatgccgagcccacacgaagagacttttgcttgcgaaaagcagccccttctcgttctgctatgcaactatgctagcgcatagcgaacggggaggtcaagcatggcatctgaactcatcttcggtttcgatcttggcacaacgtcgattggctcagccgtcgtcagaatggacgagatggctgagaccggcgacgtcctgcacctgggggtgcgcatctttccagaagcgcgcgaccccaagggcatcccgctcaaccaggagcgacgcaaccggcgcatgatgcggcggcagctgcgccgacgccgcgtgcgacggcgcgcgctgaacagcctgttgaccgaggctgggctgctgccacccttcagcaaggccatcgactccgcttggtcggccgcgatggcactggacccctgggcattgcgcgcccgcgccgtcagcgagccgttgagcccgcaggagctgggccgcctgctctaccacctggctcaccggcggcactttcgcggtcgtgacctgccggaggcgcccgccacaaagcccgacaaacaggacccagccgccgccgaagaacaggaggcctcatccaagcgggaggagcatcgcaaggcgctggcggcgtcaggccttaccgttggcgccttccttgccgccaaggacccgatcgaggaccggcggcgcggtcaccatttcgatcgctcggacgtcgaagccgaattccgcgccatcctggcggcccaagcgccccatcacgcggcactggccaacaccgacctcaccaccgaaatggaacgcgtggtgttcgatcagaagccggtgttctggcgcaagggcacgctgggcgaatgtcccttcgacccagacaaaccgctagcagcgtcggcgtcctgggtcgcccaggaaaaacgcatgctggagaaagtgaacaatctgcgcatcgaacagggcaatggtcgccccctggatgagcatgagcgcaaggtgattatcgacttgttgcgcaggcaggacacagccacctggccttccatccgcaaagccctgaagccgtactggaagtcccaaggcctgccagaaacccccaaattcaacttggagcgcgggggcgaagaaaagctgacaggcaaccgcctggagaacagccttgccaaggcgatcggcgcgcgctggcacgctgatccggatttccaatcccgcctgcgccgggacatccatgcgcgcctgtatgaagctgactatggccagatcggccaacgcatcgtcatccgtcgcgaggcggagcgccaggcaaagcgcaccgaggcgcgggacagcctgaaagcagactttcagttaaccgatgccgaagccgataccctggcccgcttgacctttccaacggggtgggagcggttctccgaagccgccctgtggcagttcctgccgcgcctggaagcgggggcggtgttcggcgcgctgttggcaggaccggaggaagaagagtggcgcgccgccaccttccccaaccgtgccagaccgacgggaacctccgtcgaccgcctgccgacagccaagcacaacaaagcagagcgcgaccgccagaaagccgtgcgcaacccaacggtgctgcgggtgcagaacgagctgcgcaaggtggtcaacaacctgatcgccgtctacggcaagcctgatcgcatccgcgtcgaagtcgcccgcgacgtgggcaagtccgcgcgggagcgggaggaagatctggtgcgcaaccgggaccgcgagaaggaacgcaaaacagccgccgcagacttgcaaagcaacggcattgccgagccatcgcgcaaagacatcgagaaatggctgctgtggcaggagtgccgcaagcagtgcccctacaccggccgagagatcagcttcgccgccctgttccaccacggtgagttccaggttgaacacatctggccgcgctcgcgctccctcgatgacagctttgccaacaaaaccctgtgccaccgcgacttcaacttgacgaaggccaatcgcacccccttcgaggcgctgcaccacagcccggaggaatgggccaaggcactggaccgggtgcgggccttcatcgggaagcgcggtcgcccgaacatgaagctgcgccgctttgcagcaacggagatcccagccgactttgccgcccgtcagttgaccgacactggctatgccgcccgccaagccgtcggctttttgaagatgctgttccccgaccatggcgccaccagccaggtgcgggtcgccaccctgtcgggcaaggtcaccgaccggctgcgccgcagttggggcttaaacaaactgctggcagacgatggggagaaaacccgcgccgaccaccgtcaccacgccattgatgcgctggtcgcagcactggcctaccccggctacacccagcgcctgtcgcgctggttccaggcgaaagacagcccaatcccagaacccgaaccagatctgtccccgcccttcgctggagtgcgggagcaggccaagcgccagctggaccaggtggtggtgtcccaccgcgtgcgccgcaaagtctctggtccgctgcacaaggacaccaccttcggcgatggcggccaagcggacaccacctaccggtggttcctaacgcgcaagaaggtggagacgctgtccaaggacctgctggccaaggacgatgcctggccggacgcccatgtgcgggatcgagtgcgggagtgggtggcaaccaatggcggcgatcccaagaaagccttcggcacgggctatcccactgtatccaaggacggcccacccatccgcaaggtgcgcatccgcatgaagcaacaactgtcactgatggtaaagttgaaggatggcttcgccgaccttggcaacaaccatcatgccgcgatctaccaaacaccagacggtgagactgtgtttcgcgtcgtttccctaatggaggcagcgacgcgattgagacacggcctgccggtggttgaccgctctcctgaaggaaacttgaagtttctgatgtcattatctgcaggagacacagtgcgtctggccggagatcgcgcaggactttggattgtccgaactgtatcgtcgaaaggccaaatcgccctgtggccgatcaacgataccgatgcggacaaacacgaaaccgtctttgcgccaaggatcggcgggatgatcaagcgtggtctggaaaaggtatccgtcgatccgatcgggcgcatccgcccggcgcgtgactgatgctgcggaaaaccatcgagatcgccacgccaggcacccggctctcggtcgcccagcgccagctggtgatcgagcggccggagctgcccaaggcgactgtgccgattgaggacctgggtgtactggtggtggatgatggccgcgccaactacacccaggcggtgtttgtggagtgcttggccgctggcgccaccatcatcatcaccggtcgcgaccacctgccggttggcatgatgctgccgctggacggccaccatgtgctgaccgagcgacactgggcacaggtggaagccggtgccgccctgcgcaagcgcctgtggcaggcgctgatcatggctaagctacgccagcagggtcggctgctggaggagacgcacgggcaggattccggccttgccgccctggcaggccgggtgcgctcgggcgatcccgacaatctggaagcccagggtgcccaacgctattggccccggctgttcggcgcggcgtttcggcgcgaccgcgaggccgatggccccaacgccctgttgaactatggctatgccatcgtgcgggcagcgtgtgcgcgggcgttggtggcgtcgggcctgatcccctccctgggggtgtggcaccgcaaccgtgccaaccccttctgcctggccgatgatttgctggaaccctggcgcccgattgtggactggaaggtctatcgtctgcatcagggcgctcggacgccacccagcctggacgaccggcccacccgtgccgccctactgtctgtgttggcggaaaccgtggtggtgggcggcaaacgctggcccgtgctcttgggcattgaccagagtgcggccagccttgccaaagcactgacccagaatgaccgggcggcgctgattgttcccgaaagcctgccgctgcaaccggacctgctcgaccatggcgcgccctgaaccgccgccgctttatccgatccagccctgggggtggcggagcatgtgggtgatcgcaatgttcgacctgcccgtcgacaccccggctgcgcgccgggcctatgcccgattccgcaaggacctgctggaggacggcttcaccatgatgcagttctccatttacattcgccactgcgcgtcgattgacaacgccgaactgcacaccgcccgcatgggcgccaaggttccggagagaggagaagtgcgattcctaatcgtcaccgacaaccagtttggccgcatccgcgtgtttgttggcaaaaaacgcgacaaacccgcccccgcaccggcgcagcttcagcttttttagcccccaaaacggcaaaaccctcgcgtttccaactggttacgcgagggctagcttagcagaacgagaaagggctgcaatccgcagctagcgtgcggagtcaaccatggctagctttagcttagcagaacgagaaagggctgcaatccgcagcattgtccctgtgacgtgacagtcgcgcgcgagcttagcagaacgagaaagggctgcaatccgcagcttgcgcctattatcaacgctaaagacccggagcttagcagaacgagaaagggctgcaatccgcagcggcgcggagcgttgcccctgcaccccgataagcttagcagaacgagaaagggctgcaatccgcagccggtgactgttgatgccgctggtgacgcggagcttagcagaacgagaaagggctgcaatccgcagctagagcttttgcagctcagcgtgcgtgtcgagcttagcagaacgagaaagggctgcaatccgcagcgacggaacgaacggcggcaaggtcgcgttgagcttagcagaacgagaaagggctgcaatccgcagcttgttaggctcaaaaaccctgtagctatcaagcttagcagaacgagaaagggctgcaatccgcagccgaaaacggcgatgtttcgttctattgcctgagcttagcagaacgagaaagggctgcaatccgcagccatgacagccacgccttgccacgccttgccagcttagcagaacgagaaagggctgcaatccgcagccccgccatgcggttgagtggcgcggccgtcagcttagcagaacgagaaagggctgcaatccgcagcccgagtgcgtcgtggtccttcctgcccacgagcttagcagaacgagaaagggctgcaatccgcagcaagcgtccggaagtcgacatcatgcaccaaagcttagcagaacgagaaagggctgcaatccgcagcatgtggccatcagtcgcgacgatgcagccgagcttagcagaacgagaaagggctgcaatccgcagcgacaagatcgccacgctgatccagttcggcagcttagcagaacgagaaagggctgcaatccgcagcggatcagcaaccggtatcacgtcaatcgacagcttagcagaacgagaaagggctgcaatccgcagccaatcggagggtgacacgatggaaaagatcagcttagcagaacgagaaagggctgcaatccgcagcgcagcggaatgggctgtaaagcaacactttcagcttagcagaacgagaaagggctgcaatccgcagcattgtcagcgtgttccagttgaccgccaggagcttagcagaacgagaaagggctgcaatccgcagcagaagtgtttcaaactccgtcatgtctcatagcttagcagaacgagaaagggctgcaatccgcagcctgggagccatcggtctctcctgttggagtagcttagcagaacgagaaagggctgcaatccgcagcgtttctgtcggttttaccggcggaaccgcaagcttagcagaacgagaaagggctgcaatccgcagcaccgcctcgcggcccaatttgcgcccgtctagcttagcagaacgagaaagggctgcaatccgcagccggcgttaccgcgatacactcccgtctcgcagcttagcagaacgagaaagggctgcaatccgcagctgccgtggcgcggcggcaaagcgcagggcgagcttagcagaacgagaaagggctgcaatccgcagcgggtggccggaattggcccgaaactgtcaaagcttagcagaacgagaaagggctgcaatccgcagcgggaattgcgcgcgtcaatccgcggaatccagcttagcagaacgagaaagggctgcaatccgcagcgcgagccgagtaggaggcgggcgatgaccaagcttagcagaacgagaaagggctgcaatccgcagcggcgcatgacgccagtcgcgggcacggctaagcttagcagaacgagaaagggctgcaatccgcagcccccggcacgctgcaacgcccaggcgctcgagcttagcagaacgagaaagggctgcaatccgcagcacgaggccgacgctttggcctgctggtatgagcttagcagaacgagaaagggctgcaatccgcagcatagcccggcacggtcgcggcgcggatagcagcttagcagaacgagaaagggctgcaatccgcagcgatgaatccgccctcgtttcgcattgccatagcttagcagaacgagaaagggctgcaatccgcagcgcgatgccatcatcgatcgcctagcgcctgagcttagcagaacgagaaagggctgcaatccgcagctctgggcttggtggtgtcagttacacgcggagcttagcagaacgagaaagggctgcaatccgcagcgtcatgcgccccggcgtcgctgtcatcatgagcttagcagaacgagaaagggctgcaatccgcagcgacaggcacggctggctttgcgtgccgccgagcttagcagaacgagaaagggctgcaatccgcagcccaaaagactggcgaggtccagacatgcgaagcttagcagaacgagaaagggctgcaatccgcagccatcaatcgggagacaggacaatggctagcagcttagcagaacgagaaagggctgcaatccgcagcggtcggacgcggatgcagttggcccgcgccagcttagcagaacgagaaagggctgcaatccgcagcaagcccagcggattgcgcaccgcactcaagagcttagcagaacgagaaagggctgcaatccgcagcaagccagccgatgccaacttggtcgggcacagcttagcagaacgagaaagggctgcaatccgcagctcacggcatacgcggtagacatagcgagtgagcttagcagaacgagaaagggctgcaatccgcagcaaggtcaactcgcggcgatcgcctaccagcagcttagcagaacgagaaagggctgcaatccgcagcgcgccggagggtgacatctccggcgccgtcagcttagcagaacgagaaagggctgcaatccgcagccgaagccggtggccctcgacgccatctaacagcttagcagaacgagaaagggctgcaatccgcagctagccgcgttgccggtctgcactgtccaggagcttagcagaacgagaaagggctgcaatccgcagcatatgctgatcgcttgccgcgtggtcagcgagcttagcagaacgagaaagggctgcaatccgcagcccacctgcgggcacaccacgaccggctcgaagcttagcagaacgagaaagggctgcaatccgcagccaaagggcgcagcgctcggtgaggcgatggagcttagcagaacgagaaagggctgcaatccgcagcatcacgttccaagtccacaagtgcaacatcagcttagcagaacgacaaagggctgcaatccgcagccgcccgccgccgcgccacacttccagcgtcagcttagcagaacgagaaagggctgcaatccgcagcacgcgattgctcactgtcccagcccgtgacagcttagcagaacgagaaagggctgcaatccgcagcaatcggaaaactgtgggttcgactcccacgagcttagcagaccgagaaagcgctgcaacccgcagccgattggctcatgcctggggacgggagcgaggatcggacagcgtggagctgggcccggagcgtgtcggccactggggccctgtcacctgtctcggcctgggccagtcgtccgcgggggactggcggagggggcgggattcgaacccgcgaggagctgttaacccctacacactttccaggcgtgcgccttcgaccgctcggccacccctccgtgagggcgcggagcatagccaaagttcgcggcgatgcaagcccggcgatgtgtgtttgttggctccggggcatcctgccgctggtggacagtggcgggtgcccaccagtagcctagcaccatgctgcgcaccttgcttcgtgttgtcggattctcgttggtcgccgtcgcggtgttcttcctgtttcgcgacttgtggaccagtctggaggctggcggttggaccgccgtcgccgcgggcgagctgtggtatcgctggcacccggccagcttgaacttggcccaggcggcgattcagcgccatgtgctgccagagctgtgggatccctggattgtcggcgtgctgctggcacctgccagtctggtgctgggtgtggtcgggctgctggtgatggcgctggctggtcgctcccgtggctgaaccgccggaccgatcgggggcggcgcaaccgggggcggcgcaaccggggacggcgcaaccgggggctggggcggcgggcggctcggcggtggcggcaccgctggcgttgatgctggccgtgcaaaccatgctgtcgatggccaccctcacggtgcctgtgctggccccggtggcgaaggcagagctggcggtgccaccgggtgcagttgggctctacaccgccctgctgtatggcggggcgatggtgtccaccttgatcggcggcgcgctggtgccgcggctgggggcggtgcgcgccagtcagctgtgcctggtgctggcggcgctggcgatgctggcgacgctgccgatgttggccgtggtgattgcagccggggcgctgctgctgggcatcggctatggtccggccacgccagcctcctccgacgtgctggcgcgggtcacgccgcctgcctggcgcgggctggtgttttccttgaagcagtcgggcgtgccgctgggcggtgcgctcgctgggttggttgtgccgtggctggtgctcaccgtcggctggccgctggcgggacccgtggtgggtgcggcctgcctgctgctggcgctggcgttggagccgtggcggcgacggctggacatacccaaccggctgccacccactggggtgccgctgatggccctggcgcgcgtgctcacgccgatccgccgcgcgctggcggagcctgccattgcgcgccttgcctggtgttcgttcctgttcgccatgctgcagcacgcgctgggcacctttctggtcagtcacctcgtggcgtcagcggggcttagcctcggggcagcggggggtgtgctggcagtggcgcaagtcagtggcgctgttgcccgcatcgtgtggggggccgtggccgaccggctgctggcgcctgccaccatgctggcgctgctggccctggcgatggctgccggtgccaccggcacagcactggtggatggcacaacgccgtggggtgtgctgatcgccatcgccgtgttgttcggcgccagtgccgtcggctggaacggtgtctatctggcggaggtggcgcgtcttgccccgcgcggtgccgtggcagagatcaccggtggctgcctggcaatcacctatctgggtgtgatgatcggtccagtcgcctttgcggcgctggtcagcaccactgggttcgccaccgcctatgtctcccatgccgggctggcgctggtggcggtgtatttgctggtgcggcgatgatgcagacgggtctggcgccccggcatgtctgggcgattgagggcagctaccgtgatctcgccgtggcggcggccgaggctgggctggatcgcaatgccgtgcgctatgcctccgacacggtgcaaccggccccgctggccgaggggcggctcgacctgccctccccctggtgcgagacaccggcgccgtggctcgcgaccctggctgtgctggccgaccgcggcctgtcgttccgcctcaccctgaccgagaccaacgccgatgggcgcgtcagcgcctttgccaagctgttcccgcgcttcgatgccagcctgcgcgatctgctggcggctgtgcatccgcgcgccgcagccgacctggaccggcgcagccgagcagtggaggcagccctggaccagcttcgccgcgccctctcccagggttaaagccggaaggctgggcgcagccacacgccgacttggctgcccagccaccccgctggcagccacagccagccatgcacactggtggacgcgatgcccgacagcaccgcgccaatggtgcagcccccagccagccgcgcgccatagcccatcgcgatgccgcccagcagtgccgccagccacggcagcaggtggcggggcggcgggtcggacgggcgcccgaccatcgtcgacgccaaagccgcgccgatgatcacgcctgcgtcgctggcggtgatgggatggtgcagcagcggctccgccagcatcgcggccaagtcacgccacagggggtcggcgctggcctgccagccgagcgcgctggcgatctggccgctccacacaacaaatccccaggtgaccgaccagggtcgccctgtcagcagcaacagggccagggtgccaaggccaaccacaccagccagccgccaggctggcccgccgggtgccccgcaccgccaccagatcgccgccaggatggctccctgggcgatgattgccggggtccacccgatccacgcccccaacaccaccggcggggcggagggcagcagcgcctcccaccacgcgagacccggcaccccccagaaggagcctagcaggaacccagcaaaggtggcgagcagacggcggtccccactgccgaccagccacagcacgccactgccgcagccaccgcccaactgcatgccgatgccaaacacgaacgccccgatcagcatcaccgggccaatcggtgcccaggccccctccagcgcccagccctgcccctccgccagcgccagcaccggtgccgtcaggatcaggctgaccagcaccaccagtgcctgggtgccgatgcccgtcggatcgcggccctgctgccagcggcgccagccgccgccaaagccaaatcgccacagccacaaggccgcacccagcacggcaccaacggccaacaccggtagggttccaaccagcgctgcctgcacggcgacggccagaacgacgaccacagttgcgctgattcgcacgctgcgatagcgaccagcggtttctgcggcggcttggtcagttggtttcgattgccatgattcggccatttctgcggttttcctcgcccggtgtcacactgtcgcttgcccggcgttcgcaggcagcgcgttcaaggatacgattcggccatgcatttcactggctccgcccattcggcccggtccgttctgccaaaacccgttggcagccctgaagatgtgctggtgctgaagggcggtcgaccgttgcagggcatctggcgtgtcgacggtgcgaagaatgctgccctgcccttgatggtcgccacgctcttgaccgatggcttggtcactctcaccaacctacccggcattctggacgttgctgtgctggcggagttgctgtcgagcctgggcgttgagcagcattggagctatgcggagattggcctgcgcgccacctttgccggggtgcgggtgaccggccagcccgatcccgaaggggtgaggcgcatgcgggcctcgttcctgatcctcggcccgctgatggcgcgcacgggcatcgcgacggtcgctctgccaggcggcgatgccatcggctcccgcccggtggacatccacctggatggcttgagggccctgggcgccgagattgagatggagcatgggctgatcaccgcccgcgccccaactgggttgaagggtgcgcgctacacgctgggctttccctcggtcggcgcgaccgagcatctggtgatgaccgcaaccctcgccgaggggcggaccgagttgatcaactgcgcgcgcgagccagaggtgaccgatttgtgtcggctgctggcggcaatgggcgccaagatcgatggtatcggcaccgaccgcctgaccattcacggcggcgaacgcctggggggcgccgtccatcgcaccatccctgaccggattgaggcgggcacgatcattgtcgcggcggctgtctctggcggccgggtggagttgcgcggccccaccctcgacgatttgggagcggcctatagcctgctcaccgcgaccggcgtgcgcctgaccgaagtggaaggtggcttgatcgccgaagccgacgccagcgggctgatcgggaccgacttcgtgacccaaccctaccccggcgtcgccaccgacctgcagccgccgctgatggcgttgatgctgcgggcggcaggcagtgcacgcatcgacgagacgctgttcgagaaccgcttccgccatgtcgacgacctccgccgcctgggtgcagacatcaccgtgcgcggtcgcaccgccctggttcgcggcgttccgcggctgacgggcgcgccagtgcgcggtaccgacgtgcgcgcggcaagctgcctcgccatcgcaggcctgatggccgagggcgaaaccatcctggaaggcctggaccatctggaccgcggccacgccgccttcgccgaacgcttagccgccctcggcgccgacgtaacacgccacggtcgctaaggtgcccggcaggatcaggctgccgcctcggcaagccgatccagcacggcgagcgctgtcagcgcctcccgcccggtgacggaacccgagggggcgccggtgcggatccagtcggcgaaagcagtcaactcggctgtcagttggtcggcacgagtgattggcagcacgctctccccctctgcggtgtggagagtgacggactgggcggtgtagtccagaacg

SEQ ID NO: 3136 - DNA, 19323 bp, synthetic construct
  misc_feature 1..19323: note = Synthetic
  source 1..19323: mol_type = other DNA
gacagcaacgacagcgtcgccttctacgcgaccttccgcgcgcccgggctgaatctttccttcaacgtcgccttgaaggtgttcgccgatggcgatgtcgacgttaccggcgacacgccggacaatgccacctccaggatttcgggcagcgccgcgacgctggcggcgaccagcggcgatggcacgctgacgttcgagacgccgtcgggacaggcttatgcgctgctggtcgtcgccgcgccgacggccgcggcggcggtgccgagcatcacccggcccgacgggaccacggtcgtcgccgccgacttcctcgccaatggcatcgaaatcgtcgatccctcgcccggcgatggccaatatttcatcgtgatcgcggcaccggcggccggcacctggagcgttgccggcgacagcgggacgaccatcggcgtcgacttccccgatgcgcagccggtggtcaacgatttcaacgtggcgaacctcggcaacaacctcaaccgcatcaccctcaatgtcgccgatgaccgcggcgcggtttcggttcggctgttcgtcgacgaggatggcgacggtttcgacggaaccttcctcaccgaaatcacccaagcgtccggcctgttgacctatgactggtcgggggcgacccgcgaggcgggcagctatcgcatctacgccgtggtcgacgacgaccgcacggcgccggtcgagctatatgccgccggcaccgcgatcgtcggcgatgccgccgatcttgctgtcaccaccattgtgacgcagaccgccgatggcctcagcctgaccatcgacgctgccaatacctcggctttcgccaccgcggcgagcctgctcgtcaccgcccccgaaggcttcaccttcggtacgatcggcttgcccgccggcatcaccgccgaaggcgccaccatcgaccttggcaccatggcggccaattcgatgacccgtgtgacggtcgcgctgctcggcaccgcggccgccagtgcgacgctgcgcgggtcgacggaaatccgctcggatcgccccgattccgacatcgaggacaatatcaatatctggcggttcgaagttcctgccgcgacgatcgccatcagcaaccttgcctatgaaaccaccgcgctgcgcggcagcagcgtgacgcagcctgaccgtcaacctcagggcgaccgacacggtgatttcgtcggtcgtcaccgccgaaatcatctcgacgcaacaggacgaccccgattcaaccccggggaacggcctcgtcgaggacgatcgcgcccaggtcagcgccaatttgcgtttcttcgacatcgtcggcgacaatggccccaacaagcttaccggctctatggtcggcgagcggatcggcggcctgttcggcaacgacacgatcgaggcgggcggcggcaatgattatgtcgaagccggcgcgggcgacgacctggtcgatggcggcgacggcgatgacgagctgctcggccaggaaggcgccgacacgctcaaggggggcaatggcgatgacctgctcgacctcggcccctcggaaggcttcggcacggacttcgggttcggcgagctcggcgatgattcgatcgtcgccagcagcggcgccgtgctggtcggcgggcccggcgacgaccgcttcgtcttcgactcgccctttgcgacgccggcgcggatcatcggcttcggcggcggcgatgtcatggacatcagcgccatcgccgacctgcgcggctatggcggcagcgcgccgctggcggatggcttcgtcaccgtcaccgcaagcagctggggcgccttgatccgcatcaccggcggctcgggtgctgcctttgatctcgccgtcatccccttcctcgatccgcggtcgatcgacgcgggttcgttcatcatctgaaggaaacgtcatgcgcctgttcacggctctctcctcggttgcgggaatgctggcgctggcggccccggccagcgccatcacgccctatgtctcgggcggcatcggcttcggcggtgcccagtccttgaacggtagcgtccgcgttggcgcggtcgacgtcggcggctttcgcgccgaccctggcggcgagatttccggtgagatcgccggcggcggttatttcggccgccggctcgccgccgaaatcgctttccgatatggccgtgccgagttggcgagcgcgacgatcgccggccagtcgacgatcgtcgataccgagatcgaaacgctgacggtgctggcgcggtcgcgcttcctcatcgtgccccgcggcgatgtccgtcccttcatcggcggcggtatcggcgtgcagcgcgtcgccatgggcggcgttgaacgcaccggctttgcctatgaaggctcggccggcgtgaccctgaccgtggcgccgcgctgggacgtcgatgtcgcggcgcgctacaccggctcgaccacggcggcgttcgatgccggcagcggcgttgccgtcgatggcttgcggtatcgcaccatctcgggcggcgtcacgctgcgctatcttttcggcgcgcgccgctgaggcggttggccggtcggcgtcgctggcgcagggcaaccaaggttgcggcttcgcggctggcaaaaccccggcacagtctctaaccttggcgccaacatcgaatcgcgccttggggacccgccatgaccggaaccgtgatcaccgccgcccgccgtacgcccgtcggcagcttcatgggcagtttcgccaccacgccggcgcatgagctcggccgcatcgccatcgaggcggcgatggccgacgccggggtcgaagccggcgagatcggcgaggtcatcctcggccaggtgttgaccgccggccagggccagaaccctgcccgccaggccgccatggcggcgggcatcgccaaggaaaccccggcctggggggtcaaccaggtctgcgggtcgggcctgcgcgccgtcgccctcgcgagccaggcgatccagtcgggcgatcatcgcatcatgatcgccggcggccaggaatcgatgagcctcagcccgcacgcccagtcgctgcgcgccggcaccaagatgggagcgctcgaactgatcgacacgatgatcaaggacgggctgtgggatgccttcaacggctatcacatgggcatcaccgccgagaatgtggcggaacaatatcagatcagccgcgccgcccaggacgaattcgccgtcggcagccagaacaaggcctcggccgcgcgcgctgcgggacgcttccgcgacgagatcgccgccgtcaccatcaagggccgcaaaggcgatacggtcgtcgataccgacgaattcatccgcgacggcgtcaccatcgacggcgtctcgggcctgcgcggtgccttcaaaaaggacggtacggtgaccgccgccaatgcctcgggtctcaacgacggcgccgcggcgctcgtcgtcatgagcgaagccgaggccgcccgccgcaacgcgccggtgatcgcgcgcatcgccagttgggcgtcggtcggtgtcgatcccgcgatcatgggcatcggccccgtccccgccagccgccgcgcgctcgaaaaggccggctggagcgttgccgaccttgacctggtcgaggccaatgaagccttcgcggcgcaggcgctggcggtcggccaggaacttggcctcgatccggcgaaattgaacgtcaacggcggcgccatcgccatcggccatccgatcggcgcctcgggggcacgggtgctgacgacgctgctccacgaaatgatcaagcgcgacgttcacaagggcctcgccacgctgtgcatcggtggcggcatgggcatcgcgatctgcgtcgagcgctgacgcgcgccgcgtgagcgacaggaacccgctggcgcgcttcgctgccggcggcagcggcctgcgggtgctgctggtcggcgcgccgccgccgggcctggcgctggcgctgccgcccgagcccgccgcccaggtcgatgtcgcgctggcaccgggtcatccgggcgatctcgtcgcggcgccggcgcggctgcccttcgtcgaggcgctgttcgatcgcatcgcctttgccgggctgctcgccgatccgcgcgccgagctgcgcgagctgtggcgggtgctggcgccagcggggctggtgctcttcgtcgtaccggcgaagcggccgtggcagcgccgccccggctggcgcgagagtccactcaaggccgccctccacgacgcgatgttcgagtggctggcgggcgatattgccgcactgcccgcccgccaccacgtcatcctcgccggcaagcgcgacggcctgtcgccgatcgtgctgaccgccgccgccgagcccaccgcgacgccggcgctcgccgccaaccccagccccttccagccgcgcgaggaaccgcgatgacatctgccgcccctggccctgcccccaccgacatcgccgcgatggtgcccttcgccggccacctcggtttcgaggtaatccgctgcgaccgcgacgcctgtatcgtcgaagtgacgctgcgccccgaacattgcaccgccggcggcaccgcgcatggcggcttcctgatgacgctcgccgatttcgctggcgccgccggcgcctggatggtgctgcccgaaggcgccaagggcaccaccaccagcgattccaagaccaacatgatcggcgcggcagcggcgggcagccgccttgtcgccaccgccaccccggtgcacatcggccggcgcacctcggtgtggcagacgcgcgttacggtcggcgacaagctgatcagcctgaccatgcagacccagatggtgctctgagcaagtcaatcagcacgccgtcggtcaggcggcgagttccgccgccatcgcggcgcgcgtcggcgtccaggcgaggtcgccggtgtagcgccacgccaattggccttcgtcgtcgatggcgaacaggtgcagccagcgattgtcgaagagtgcgcggacgccgggatggcgttcgaggatcgccgtcatcgcctcgcgcggcgcctcgatcgccaccgtcagccgcagcggctcgtgcatcgtcgccgtgccgtcgtgcaccgactgccagggcaggccggcgcgcagattgccgccattgccctcgacgacgccgatgccgccgacgacattgtggagaagcttgttgccgccgccgaacagcgccggcgccaccaccgagccataatattgcaggctgatccagctggcgacgacgaccggcgccgtcaggatgagttcgaggacgccgaagccctcgtccccgcgccagtcgtaatcgtggaggaaggcccgccccgccaggtcgcggccggcggtgcgccggcgcggcgcggcaatgaaggcattgcagccggccagcccccattcggggcgggtttcggcccaatcgcggctgcgccgcaagatgtcgccgccgtcccctgcccgcggcaaccgcagcgcgcgttcaccgcgcgccagcacgcccgccgatgccagccagctttgcgcccgcacgaggtcgcggctgcccgccaaccccggcacatcgtcggcgtacatcgtcaccgcatcggtggtggtatcgtgcagcgccgcgacgaagcgcgtttcgggcaggatggcgatacgccgccgcagcagcccggcgcgcacctgcgcgtcgttgagcagcgccgccagcagccgggcgttgacctcgcccgaatagccgccgcaggcgccgcagtgcagcgcgctggcatgggggttgttgacggtgctggcgccatggccggcaaggatgaccagcggcgcgaagccttgggtcagcgacatggcgcgcagcaccgtttcggccatggtgacgcgggtttcgtcatcgagcgccggcgcgggccgcggcatcggatcgggcgagcgcttcgccgccggccgcgccagggcatcgcgcagcagcttgggcagataggcggggcccgccgcctcgacaaaggcgaaggacgacaccgcggcaagcttgaagcgttcccaagcgcgcgtcgcgcgggccgaaagccgcgccgcggtgtcggcggcggcattggccgcgccgccggcgacggtcgtcatccccgggttgagcagcaccggcagccggtgttcggcgagatcggaggcgaagcggcggtgcgacgcggtgaggccgaaaaagccggcaaagcccagggtctggatgcccgaatcgagcgattcgagcgcgcggcggaagacttcggagcggacatcgatgcagaaggcgacctgcaattgcggcgccagccccgtcgccgggggcgccggcgcggcctccagcgtttgcgccaaccggcgctggccggcccgctcggcggcgtcctgcagaatgacatcggcgcgctgcgccggcgtcggccgcagcggcgcgccgtgcgccgccaccgaggcggcccagcggccggcgacctgttcgcgataatgatcgagcagcgctgcctcccagacgaggcggatggtcagcaggtcggttgtcgtcgtgtcgtcgccaccggcaagcaccgcctgccagcggcgatgccgcgctgcctgcgcccagccgccgagcgtcgtcagcgcttggtggaaagcggtcgccagcgctgtcggcgtcagcccgaggcaggcgatggcatcggcgagcgccgcgtcggcggcctccggcgtcgcggcgacgcgcgccgcgaagccggtgaggccatggatctcgggcgtcaggtcgtgggccgcggtggcgcgccagcttgcccaggccgagcggccgcgcggcagggcccacagcgcctggccctcgtcgaaccatgccgctgcccaggcgccgaagcgctcctcgatgatcgccggccagtcgatccccgaagccgcggcggcgagatcggcgaccgtcgccagtgccgccggcggcgacaccgcagcgcccgccgcggccttgagcgcgacgacactcgccggccggtccgccgcatcggccgccgccagcgccgcggcgaggtcggcgtcgtcgatcgtgccctcggcaatacgcgccgcataccagcttcgatcaggagtcaccgccaccccggcgacgcggccgaggcgcgccgcaaccatcgccagatcctcgccggcctggccgagaaaggggttgaccgcgacgctcgacgccagcggccagaccggcgggatggcgtcggcggcggcattggcggcggcagccaggtcagcgcggtcgatcatggtcgtctccttcaaggtcggggggcgccgggtcacgccgggcgccggcgccagccgccgagcgcgcggtcgagcagggcgttggcatagaagccattggcgagatggacgcgcaggccgagcatcgccggatgccccgcccacagcggcagcatcgcctgcgccacggcgaccgcgccgaagctgaggatcgccagcaccatcagcagccattgcagcgcgccgggcgccggcggcgccggcagcgcgccggcggtcagcacgcccgccaggatgtgcaggccgaaatagccgagcgacgcaaccaccgcatagcgcgccagcttggcggtaagcgcccgtggcgccgcttcggcgagcccctgcgccagcagataggcgacgccgaagatcaatatggcgccgagcgccagcgcctgcggcgactgcccaaagcgctcggcggggatggcgatcacggcatagatcgccagcgcggcggcgaaggcgcgtagcacggcgccgccatcggggatcgccaccggccccggccgccggaaggcggcgatgcggtcgacggcgccgccggcggcgagaaaggcatgcgccttgtagagcgaatgggcgaggatatgcagcagcgccagcgggaacagcgccagcccgcactgcatcagcatgaagcccatctgggcgatcgtcgaccaggccagcgaggtcttgaccgccggctgggtgagcatgacgagaccgccgaacagcgcggtgaagccgccgatgatgaccagcgcggcgagcgcgccgggcgccagcagcatgacatcggccaagcgaatgagcatgaagccgccggcgttgatgacgccagcgtggagcagcgccgagaccggcgtcggcgcctccattacctcggtcagccagccatggatcgggaattgcgccgagcgcagcagcgccgccagcgccagcaggctgccggcgacgatcgcgaggctgccgccggccccgctgcgcgccgcggcgtttatcgcggcgatgtcgccgctgccataggcgatgacgagcaggccggcggcgacgatcatcgcggcctcgccgatgcgggcgattaccgcctttttggcggcggcgcgctgcgcggcgcggcgctcgggatagaagagcagcagccgctgcagggtcaggctggtgacgatccaggcgagcaccagctggacgaggttgccggcggtgacgaccatcagcactgccgccagcgtcgcgcacagccagccgaggaaggcgccctggcgcgcctcgccgtcgagataggtcagcgcgaagcgtccgacgatccagccgatgaaggcgacgagcagcagcatcgccgcgctgacggcatcgaggcggacggcgaagccgagcccggcggtgccgagcaacgggctggtgatggcgccgcctgccgccagtgccgcgacaccgccggcggcggcgagcagcccgatgagcagcagcgcctcgatcacccggcgcgcgccggcgccgagccggccaggggtggcggcaccgacagctgccgcggcgagcgccagcagcggcggcgccagggggatcagggacaacatcgcgcgacctcgcttgggatggctcttcccctggaggggaatgcggcgatctagccgcgcatggcttcccgcgaaaaattcattgtttggcgcaaaacgatctgtttaagcgaacgatcgatggccgagctcaactacaaccacctccgctatttctgggcagtcgcgcatgacggcaatctgtcgcgcaccgcagcacgtctcaacgtctcgcaaagcgcgctgtcggtacagatcgccaagctcgaggaccgcctcggccatgcgctgttcgagcgccgcggccgccagcttcacctgaccgaagccgggcgcatcgcgctcgatcacgccgatgcgatcttcgccgccggcgacgatctgctcggcaccctgcgccaatcgggccaggtgcgccgcgccgtgcggatcggcgcgctggcgacgctgtcgcgcaatttccagatcgccttcgtcgcgccgctgctcggccgcggcgacgtcgagatcgtgctgcgctcgggcagcgccgccgagctgctgcgcgggttgcagagccagaatctcgacgtcgtgctgaccaatgacgccccggcgagcgacgcgctgacgccctatatcgtccacaagctcgccgaacagcatgtcggggtggtcggcaccccggcgctgctcggcgagcggcgcgggctcgccgacctgctggcggcgttgccggtgatcctgccgacggcgccgagcagcgtccgctccggtttcgacgcctttgccgaccgcctcggcatccggccgcagatcgccgccgaggtcgacgacatggcgatgatgcgcctcctcgccggccagggcgtcgcgctcgccgttctcccgccgatcgtcgtccgcgacgagcttgccgccggcaccctgcgcgaggccgacgaactgccggggatcgtcgagaccttccacgccgttaccgcccgccggcgcttccccaatccgctggtgcggaccttgatcgaaagcgcgaccgggatgctgccgggctgaggcgcggctcctgacgactggaatttacaccccagacaatgaagtagcgtcccgtaaaaacgggacgctaccaaatcggcactgcttcatgggttgccgaacccgcgcaaaggaagcttttgcttgcgaaaagcaccccttctcgttctgctagagtcacaacatagcagcgtgaaagggcaatgcaagcatggccacggaacttgtgttcggtatcgatatcggcaccacctcgatcggcagcaccgtactgaccctcgatcgcgacgccggtcacggcgaactccatcatctcggggtgcgcatctttcccgaagcccgcgatgaaaagcacctgccactcaaccatacccgccggcagaagcgactggcacggcgccagttgcggcggcgcagggtcaggcggcgcacgctcaacgaactgctcgcgacacagggcctcttgccggccttcggcgcacagcgcgacagcgcctggcgcgcggcaatggcgatcgatccctggccgctctacgccgccgccgagacgcgcgctctgaccgccgtcgaactcggtcgactgctctaccatgtcgcgcagcgccgccacttccagggccgcgcactgcaaggcgacggcggtgccggccccggcgacagcgagacggccgaggaacggcaggcgcagtcgcagcgtgagcgtgatcgcgccgcgttgcgcgccgctggcacgaatatcggcgctttcctgtcggcgatccccgatggcgaacgccgccgcggccgacatttcgcccgcgaggatgtgcgcgcccagttcgttaccatcatcgcggcgcaacggttgcgccatcccgtgcttgccgacccggtgattcttggcgcgctcaccgaagccatcttcagccagcgcccggtgttctggcgccgtggcacgctcggccgctgccggctggtcccgggcgccatgcccgctgccaccgccagctggctggcgcaggaaaagcgcatgctggaaaagctcaacgatctcatcgtcgaagtcggcaacggccgtccgctcgacacggccgagcgccacgccgtcatcgcgctgctgcgccggcaggacagcgttacttggggggcgctgcgcaaggcgctccgactaccgccgtcgaaccgcttcaatctcgaacgtggcggcgagaaaggcctgaccggcaaccgccttgaaaatcgcatggcggccatcgtgggcgcgcgctgggacagcgatgcggccctgcgcgacagcttgcgcgccgatctccatcgccgactgtttgccgccgattatgccgaaatcggcgaacgcatcgtcatccgcgataccgcgtcggcagcgcgcgaacgggcagcgctggccgacaacctggcgcgcgacttcgccctgccggtggctgccgcgacggcgcttgccgacattcagcaggccggcggctggacgccgttttccgaagcggcgctggccgccatgctgccgcggctcgcggccggcgcccgcttcggcgcgctgctcaacggccccgaggaggagggctggcgcgatcggacattcccggcgcgggagcggccgaccggcgcccttgtgcgaaccctgccctcccccgccgatcgcgacgaacaggcacgactgggcgccatccgcaacccgaccgtggtccgtgtgcagaacgagctgcgcaaggtcgtcaacaacctcatccgcgcctatggcgcgccccatcgcatccgggtcgaggtcggccgcgatgtcggccgctcagcgcgcgagcgcgaggaaatcaccacccgcacccgcaagcgcgaagcggaacgccggcgcgccgccgccgatctcgtcgctcagggcatcgccgtgcaatcggggcgcgacatcgagaaatggctgttgtggcaggaatgccggcgcacctgcccgttcaccgggcgcgccatcggcttcgaggcactgttccgcaccggcgagttccaggtcgagcatatctggccgcgtgaacgcagccttgacgacagtttcgccaacaagacgctctgccatgtcgatgccaaccgccggaagggcaaccgcaccccggcggaagccttcgacgccgccgacctggcggcgatggtcgagcgggtgcgcagctttgccgggccacccgggttgatcgccgctaaggcgcgacgcttcatccagccgatccccgacgacttcgccagccgccagctgaacgacacgcgccacgcggcgttgcaggtcgtcacgcaactgaagatgctgtttcccgatgtggggccgaccgccgaagtgcgggtgcaggtcgtcaccggccaggtgacggcacgcctccgccgccattgggggctcgccgatctgctcggcgatggcgacagcaagacccgcgacgatcaccgccaccatgccgtcgatgcgctggtggtcgccgccgcccaccccggctatggcgcggcgctgtcgcgctatttcgcggcgcgcgacagcggcgtgctggaaccgcaactgccgctgcccttccccgacatccgggcgcaggcacaggcgaagctggcgacgctggtggtgtcgcaccgcgtgcggcgcaagctgtcggggccgctgcacaaggaaaccgtctatggcgatgccgggccggcgcggggcagcggcggcaaggaataccgctatttcgtcacccgcaagccggtggcggcgctgacgccgagcctgctgaaggacgacgaggcctggcccgatgcgcatatccgcgacacgctgcggcattggctggcggcccatgacggcgacatcaagaaagcgctgacatcgggactgccgacggtatcgaccggcggccccgagattcgccgcgtacgggtgcgcgtcaagcagcaggcgaagttgatggccacgcttaaaaatggtcatgccgaccttggcaacaaccaccatgtggcgatttatcgggatgcgacgggggtccacaccgaggtcgtcagcctgttcgaagcagcgcagcgccaggcccgacacgagccggtggtacggcggcagcggccggacggcgcgaccttcgtgatggcgctgagccccggcgagatcatccatttcgccgccggcactcgtcagggcctatgggtggtcaaaggtgtctgggctgcaggccccatcattctgtggcgggcagcagacgctcgcggggtcagcgtctggcgcccggttgcggccacgatcctcggcgatggcggggtcaaggtgcaggtcgatccaatcggccgcacccgcccggcgcacgactgatgctgcgccgcaccgtcgagatcgccacgcccggcacacggctgtcggtggcgctggggcaattggtgatcgcccgtcccgatcagcctgacgcgcgggtgccgctcgccgaactgggcgcgctggtcatcgacgacggtcgcgccagcctgagccaggcggtgctgcgcgaggccgctgccgctggcgccgtcgtcatcgtttcgggcgccgatcatctgccggcggggctgatgctgccgatggcggggcaccatgcgctgaccgaacgccagcgcgcccaggccgccgccggcctgccgctgaagaagcggctgtggcaggcgatcgtcattgctaagatcgcccaacagggccggttgctggccgcggcgacgggcagcgattcggggctggcggcgatggcgcggcgggtgcgctccggcgatcccgacaatcttgaagcccaggcggcgcaacgttactggccgcggctgctgggcgcagggtttcaccgggaacgcggcggcgacggcgccaacgccctgctcaactatggctatgccgtgctgcgcgccgcctgcgcgcgcgcgatcgtggcgagcgggctggtgccgaccctcggcctctggcaccgccatcgcgccaatcccttctgcctcgccgacgatctgatggagccgttccggccgctggtggatcagcgcgtcgtggcgctgctcgccgacagcccggcgacgacattggaggatcgcccgacccgcgccgcgctgctggcgctgctcaatgaaggcgttcgactcggcggccggcgctggccactgctgctcgggctggaacaggcctcggccgggctggcacaggcgctgagcgggggcgactggcgcgccatgccggtgcccgacagtctggcgctagcgcccgaggccgacgatggcgcggcgtgacccgccgccaagctatgccgtgcagccctggggatggcggacgatgtggattctggcgatgttcgatctgccggtggaaagcaaggccgaccgccgcgcctatgccgactttcgcaagctgctgctcggcgatggcttcagcatgatgcagttcagcgtctatatccgccactgtgccagcatcgaaaatgccgatgtgcatatgaagcgggtgggtgcggcggtgccggcgcgcggcgaggtgcggctgttgatgatcaccgacaaccagttcggccgcatgcaggtttatactggaaaaaaacgcggtcagccgccgccggcgccggcccagttgcagcttttttgatggtgtcccaaggaaaaacccccgccatttcagcgagaaaggcggggggcggttctagcagaacgagaaaggggcgcaatccgcagcggtgccgatcgaggcgtcgccgacgatggggttctagcagaacgagaaaggggcgcaatccgcagcgtagtgtgtccggatggctcccgtgttcccgttctagcagaacgagaaaggggcgcaatccgcagcctgcggtcggtcatgaatgcgtccgagatcgttctagcagaacgagaaaggggcgcaatccgcagccccagtaatcgttgagagccgcaagccggggttctagcagaacgagaaaggggcgcaatccgcagcagatgaccgatgccttccgaaagcatcgccgttctagcagaacgagaaaggggcgcaatccgcagcgccggtggcgagcggcacctgggagaccaagttctagcagaacgagaaaggggcgcaatccgcagcctatggccgggcgaaggcgatctcttcggcgttctagcagaacgagaaaggggcgcaatccgcagccaaagtcgggcagcggccagagccgcggccgttctagcagaacgagaaaggggcgcaatccgcagccgcgccgaggcgatcttgaagaagcggatcgttctagcagaacgagaaaggggcgcaatccgcagctagggagagggaggccggcggggcgcaatgttctagcagaacgagaaaggggcgcaatccgcagcgtcaaccccgtcggcgccgccaccgcctcggttctagcagaacgagaaaggggcgcaatccgcagccaggcgctccagaccagctcgacctacgggttctagcagaacgagaaaggggcgcaatccgcagcgcgggcggtcatggcgtcgcgcagggccaggttctagcagaacgagaaaggggcgcaatccgcagctggaaacggcgctgttcgaccagcttgcccgttctagcagaacgagaaaggggcgcaatccgcagccggcctgcggccggctgcggattgcgaagaggccgccagagaggctgccctagcgccgccgcagcacgaaaaccgcctggtcggcaagcagattggcgaaggccgccccgcgtccggcgccgtccgacagaaaggtggcgctttcgatggcaaagccgaggtcagcggcgagcgcgcggaaatcgtcgatggtgcacagatggatgttggcggtttcgtgccagctgaccggcaggctcggcgttaccggcatgcgaccgccgagcaacagcgcgcggcgcacccgccaatggccgaaattgggaaagctgacgacgccgcgacggccgatgcgcagcaattgccccagcaccatcgccggcgcgcgcatcgcctggagcgtgtccgacaggatcgccatgtcgaaggcgtcatcgggataatcgccaaggtcggtatcggcgtcgccctggacgaccgacagcccgcgcgccacgcacgccgcgacattggccgaggcgacatcgatgccgcggccttcgacgcccttggtctcgcgcaaatgggcgagcagtgcgccgtcgccgcagccgatatcgaggacgcgcgcgcccgccggcaccgcggcggcgatcgcggcgagatcggggcgcagcgcggtcatggttcggcgcgcaggaagccgtcgacgatgcggttcatctcgggggcgtcgaggaggaaggcgtcatggccataggggctgtcgagctcgcagaagctgaccgcggcgccggcggcgttgagcgcgcgcaccagccgccgtgcctcggctgtcgggtacagccagtccgaggtgaaactgatcagcgcgaaacgcgcgcggctgccggcgaaggcgcgcgccagctggccgtcatggggggcggcgagatcgaaataatcgagggcgcgggtgatgtagaggtaggaattggcgtcgaagcgctgggtgaagctgaggccttggtggcgcagataggattcgacctggaattcggcgtcgaagctgaagccgaggccggaacggtcctggaggcggcggccgaacttctcggtgaggcccacttcggagagataggtgatgtgcgccgccatccgcgcgaccgcgagcccggcggcgggcggcgcatccgacgggtagtcgccgccgcgccaattggggtcggccatgatcgcctggcggccgacttcgtgaaaggcgatgttctgcgccgagtggcgggcggcggtcgcgatgccgatcaccgattgcaccctgtgcgggtgcgccacggcccaatcgagcgcctgcatgccccccatcgaccccccgacaaccgcccgcagccgccccaccccgagatgattcagcagttcggcctggacattgaccatgtcgcggatggtgatgaccggaaagcgcatggcgtaacgctcgcccgtcaggggatcgagcgacgacggcccggtggtgcccatgcagccgccgagaacattcgagcagatgatgaagtgccgcgccgggtcgatcggcttgccggcgccgacgaggcgccgccaccagccgggtttgccggtgacgggatggtcgctggcgacatgctggtcgccggtcagcgcatggcagacaaggatggcattgccgccatcgggcgccagttcgccataggtttcatagccgatttcgagggcagcgaggctttgcccggacgccagcgcgaacaggcccggcagcacgacccgccggtcgagcccgaaacgccgatcgatctgcgctgccgtcgccatggtcgcggggttagggcgtcgtcacggctttgtcacgaggctggcggctatcgggcagcggcggcgcgcgctcttccccgccgccgcccaaggctctacagccgccgccatgagcagatcgcccgaaatgaagccctgggtcgccggcatcgacccctatgtgcctggcaaggcgcgcctcgccgatcggccggtggtggcgcgtctcgcgtcgaacgaaaaccccttcgggccgagcccgcacgccatcgcggcgatgcaggcggcgctgaccgacagccatcgctatcccgatcccgcctcgacggcgctgcgcgaggcgctcggcgcgcatcacggcatcgatccggcgcggatcatctgcggcaccggttcggacgaaatcctgcacctcgccgccggcgccttcgccgggccgggcgacgagatcatccacgtccgccacggctttgccgtctatgacatcgcgacgcggcgcgtcggcgcgaccccggtggtggtccccgatcgcgactggacctgcgatgtcgacgccgtcctcgccgccgtcaccgagcggacgcgcgtcgtcttcctcgccaatcccaacaacccgaccggaacgatcatttcggccgccgaggtccgccgcctccacgccgggctgccgacggattgtgtcttcgtcctcgacgccgcctatgccgaattcgccgaagggctctacgaggatggcattggccttgccaacgaacacgccaatgtcgtcgcggtccgcaccttctccaagctttacggtcttgcggcgcagcgcatcggctgggcctatgcgcaaggggcgctgatcgacgcgatgcaccgcatccgcgcgccgttcaacgtgccgaccaccggccaggccgccgccatcgccgccatcgccgaccaggcctgggccgaaaagacccgcgcccatacgctgcaatggcgcgcctggctcgccggcgagatcgccgcgcttggcaacgccggcctgcgcgccgtgccgtcggcggcgaatttcgtgctggtcgagtttcccgccgacggcccggtgaccgccgccgccgccaatacggcgctgctcgccgacggcatcctgacgcgctatctcgccgtccagaacatgcccaactgcatccgcatctcgatcggcaccgaggccgagacgcgcgccgccgctgccagcctgcgcgccttcgtcgaggccgccaccggcaccaaagccgcctgatgctggcctattcgcgcgtcgcgatcatcggcatggggctgatcggctcgagcctcgcccgcgccatccgtgcacgcctaccgacggtacgcctgaccgtcagcgacgcctcgcccgaggtgcgcgcccgcgtcgcggcgctcgatcttgccgacgatgtcgcggatggcgccggcgccgcggtgatcgacgcggaactggtcatcctcgccgtcccggtcggcgccatggcggcggtggcgcgcgacatcgccgccgatctcgcccccggcgccgtcgtcagcgatgtcgggtcggtcaaggcgcgcgtccttgccgacctgaccgacgccctgcccggcgtcatcgtcatcccggcccatccggtggcgggcaccgaaaaatccgggccggacgcgggcttcgccagcctgttcgccgaccgctggtgcatcctgaccccgcctccgcaagtcgacgcctggcaggtcacccgcctcggcgatttctggacggcggtcggcgcgcgcgtcgaggtgatggacgcccaccaccatgaccgcgtgctggcggtgaccagccacctcccccacctcatcgcctattcgatcgtcggcacggcgtcggacctcgaagccgtcacccagtccgaagtcatcaaatattcggcgggcgggttccgcgacttcacccgcatcgccgcctccgaccccgtcatgtggcgcgacgtcttccttgccaaccgcgaggcggtgctcgaactcctcggccgcttcaccgaggatctggtggcgctgcagcgcgccatccgctggagcgacggcgagacgctcgaggcgctgttcacccgcacccgtgccatccgccgcagcatcatcgaccagggccaggacaccgaggagcccgacttcgggcggaaacattaggtcgattgcagacccatcgaagcggaacacttcatccctcccc

SEQ ID NO: 3137 - DNA, 7396 bp, synthetic construct
  source 1..7396: mol_type = other DNA
  misc_feature 1..7396: note = Synthetic
tggcgtggatcgcggacacgtactcgttcctgtcggaggtcgcgggtcagaatccgtcggcggtgatcacggggaagccgatcgagtatggcgggtcgctggggcgtgagaaggcgacgggtcagggggtggtggacacgctggtggagatgctcccggagttgaacctgaagcccgcgcagtgcacgttcagcacgctggggtacggcaacgtgggctcgtggtcgtcgcggatcttccaggacaagggcgcgaagatggtcgcggccgccgaccacacggggttcatccgcaacgatcaggggatcgacgcgcacgacctcgcgacgcactgcgagaccaaggggagcgtctcgtcgtatcccaaggcgacgaagtgctcgaaggaggagttctaccaggcgaaggtggacgtgttcatcccggcggcgctggagcagatgatccaggaacccgaggcgagcatgctgaactgcaaggtcgtggccgagggcgccaacgcccccaccacgcccgcgggcgagcgtgtgctccagtcgcggggcgtggagatccttcccgcgatcctgtgcaacgcgggcggcgtcacggtcagctacttcgagtggctgcagaacaagacgttccagtcgtgggacctggagaaggtggaccagacgctgaacaagcacatggtccgcgcggcccagcgtgtgcgcgtggcgcggaagaagtacaacgtcgatctccggacggcggcgtacatcgcggcgctcgagcggctggcgaaggcctacgaggtgcgcgggatcttcccataactcgggggatcaaggcgcgtcgctcggcggcctctcgctccggcgatcgacatcgaggtttttgtgctgattttcgtgcctgtgctttggacaggccgatggttccgttcaaggattgtgcgccgcgttcggctcgccctcgtccgccccggtctgttcggggcctgatcgagtgtggatccgatcgcgaggagaaaggacatggacgagatgggtgcctggggctttggccactttgagaacgacgacgccgcggactgggcggcggatcttgtggagatggacgacgccgccctgatcgaggaggcgttcgagcgtgtgctgaacgcgaaggagtcgtacgtggaggcccccgaggcgtggtgtgcgctcgcggcggcggaggttgtcgccgcgctgaagggcgcgcgcgggtcggaccttcccgaggagatccacgggtgggtcgaggggaagccctcgcccgaggcgtcgctcgtcgagcgcgcggcgcaggcggtcaaggtgatccgcgagtcgtcggagttgcgtgacctgatcgacgagcaggacgatctcgcggagtgggagccgcgcgtcgccgatctggagcgtcgcctggcggcgtgatcgtcggggaccggcccggctcgacatcgaatggaccgaggcgcccgcgggagactcgcgggcgttctcgttgatggcccgagaacggtccacgtccctcccgccccgcgtcgtcgccgcgtgtacccttggggcacatgtcacacgatcacgaacgctcgcgtcggcccttcgtgggcggcaactggaagatgaacaccgaccgcacgtccgcgagcgacctgactcgtggcgtggtggacgggctgatgaacatcgacggcgtggacgtcgccgtcttcccgccgtatccgtacctgctgctggtccgctcgatcctgcgcgaccgcagcagcgcgatcaggctcggggcccaggacgcgtacttcaaggaggatggcgcgttcacgggggaggtctcgatcgcgatgctgaaggactgcggcgtgcaggtcgtcctgtgcgggcactcggagcgtcggcacgtcatcggcgagagcgacgagatggtgaacgcgaaggtgcgagcggtgctcgacgcgggactcgagtgcgtcctgtgcgtgggcgagacgctcgacgagcggacggcggggcaccaggacatcgtgacgagccggcagatcaagacgggcctggcggaggttcccggcgactggctcgagcgtctgacgatcgcgtacgagccggtgtgggcgatcggcacgggcaagacggcgacgcccgacgacgcgcagtcggcgcacgcgcacatccgcgagctggtggcccacttgtacggccccgagcgggccgcgcgcctgcggatccagtacggcgggtcgctgaaggcggggaacgcggcggaactcttcgcgccggccgacgtggacggcgggctggtgggcggggcgtcgctcaaggcggtggagttcgtggggatcgtgaaggcggcggcgaccgcgcgcgggtgagccgcggcccagagggtcgcgccgcggtccatgcggaccccaaaggtcaccatcgcgcgcccgtgtccctgtccgcgccccgtttggccacggtgttctattcccatgtggtcctttgccccggccctctggccctctggcccggccctttggtcctttggccccgcgggccacgtccccacgccttattcacgcgagaacgcggcccacgcggggttccacgtcgccataaccgcgtgcgggatcgtccatcacggcgatcggatcgttcggcacgccgcatgaatcgtccatcacgcgtgcgggatcgttcatcacgcgtgcgggatcgtccacgacgcgtcgtgaggagttcagcacgcgtgccgaggggttccccacgcgtgcgggaaagtcgaacacgcgtcttggatcgtccatgtcgcgggtagatcgatccatcattcggatggactcgtgtataccgcacccgcttcgcccccgaccgcgggtgcctgcgctggcatcgggaggtggtgatgcggtcaacgtaaccgtggcgcggcatcgaccacatggcacaatcttgtgtgggtaccgcgctcaaaacaaagaaaccccttcaagaggggttcgaagggtcggcctcggccggagcccggcggatgtttcctttaccgtgataacggaggggaagcatcgctcgattacactgcacgcaatgtaccatggatggcgccctcgtgtcacccccagttccccttctctcggaggctttctcatggcggcactctcgtttggactcgggctcgatcagggcgtggcctccatcggctgggcgatcgtcatcctcgactcggcgggaaagcccgtgggtgtggagcggatggggacgcatctcttcgaggcggggaccgaggggaacatcgtggggggtatggacgagtcgcgggccggcccgcgtcgcatggcccggcaactgcgcaagcagtatcgccgtcgcgtgctccgcaagagacgactcctgcgctggctccaggaactcggcctcatgcccgagggcgacatctcgaccgccgaagggcgtgatgcgctcctcaagggactcgacgaggaactccgtcggaaatgggaaggcgacgccgatcatcgcacgcggcaactcctcccgtatcgcctgcgcgccgcgggattgacggggaaactcgaaccgttcgagctcgggcgagcgctctaccacctcgcccagcgtcggggatatttgagcaaccgcaagacccagagcgggagcgaggatccatccgacacgaagaagggcgcgaagaagtcgaagaagggtacagaagccggcgacgccgcatcggagaaggtcgcgagcgacgcacaggacacgggcaaggaggacgcgggcgtcgtgcgtgcctccatcatcgaactccagcgccagatggagggggcggggtgcagaaccctcgccgagtacttcacgaggctggacccgaccggcacgattggcgaaaggctgcgcgggcgatggacggcgcgggagatgttcctggaggagttcggtcgcctgtgctccgagcaggccaaacaccatcccgcactcaccaccgagatgatccgcaaggtccaccgagcgatcttcttccagcgccccttgcagagcatgagccacctcatcggccactgcgatctggtgcccggcaagaagcgatgccccctcggccatcgtctcgcgcagcggttccgtctcctccaacgcgtgaacgacctccagatcctttaccccgacttcacctcgcgtcccttgtcccgcgaggaacgcgagcgcctcatcgacgcgctccagcgcgagggggacgtcaccttctcgaaactcaagaccaaggcgtggttcggactgcccaagggaagcacgttcaatctcgaacgcggcggcgagaagaggctcgtcggcaaccggaccgaggccaagtgccgcgccatcttcggcgacgagcgatgggatgcgatgcgcgacgacgagagggacggcgtcgtgcaggacctgctcctcttcgagaagccctcggccctcgccaagcgcggcgcgagcgtctggggactctcggaggagaaggccaaggcgctcggcgactgcgttctggagcccggcttcgcggcacactccaaggaggcgctcgcgacgctcctggtgcgactcgaggacggcacgccctacgcgaccgccgtcaaggaggagtttgggcgaggtgacgaggccctcgaggtccatgaccttctgccccccgtggagaaggccctgggccaactccgcaacccgacggtgacgcgtgcgctgacggaactgcgcaaactcgtcaacgccgtgacgcggacgtacggcaagcccgcgtggatccgcctcgaactcgcccgcgacctcaagcgcgcccgcaagcatcgagagcggatgagcaaggagatgcgggcccaggaggaccggcgcgaggttgcgcgtgggctggtcctggagaaggcgaggatcgcgagcgtgagccgcgccgacgtcgagcgcgtcctgctcgcggaagagtgcaactggatctgcccgtacacgggcaagcccttcggcatggacgacatcgtgggtcggcatccgcaggtggacatcgagcacatctggcccctctcacgctcgctcgacgattcgtacctgaacaagaccctgtgctacgtggacgagaaccgcaacgtcaagaagaaccgcacccccttcgaggcctacgcgagttcgccggaacggtggcgggagatgctcgaccgggtgaagcgcttccggggcgacgcggcgcgcatcaaactggagcgattctccaaggagcagatccccgaggggttcgcccagcggcacctcgccgagacccggaagatcggcgccgcgtctgccgcgtacctcggccttctctttggcggcgagatcgaccagacccacacgcgccgcgtcttcgtgaccaccggcggcctcacagcgcacctgcgtcgtgagtggcacctgaacggcatcctctccgacgacggcgagaagacccgcgaggaccaccgccatcatgccgtggacgccctcgtcgtcgccctcaccgacacgcgcgccgtgcagatcctccagcgcgccgccgagcaggcgagcgccgtcgggcgtcgcctcttcgcgccggtcgaggagccgtgggagaacttcgtgccgtcggtgcgcgagaaagtcgaggcgatcaacgtctcccaccgccagagccgccgggtcgccgggaaactccacgccgagaccaactactcccgcgcgatccaacccaaaggcgagcgccgcatccgcaaggaactcgcgaaactctccgagaaggaggtcgagcggatcatcgatcccaaggtccgcgcggccgtcgaggacaagatcaaggaactcggcctcaagcccaagggcccggcccgccggtacacggacttttccagccgcgacctgcacccgttcaccccgaccaagaccggggcgaagaactggatccacaaggtgcggatcaagtcgggtgagaagccgtgggccgtggggaagggggcccgggagcggttcgtgacctccacgccggggagcaaccaccacacggtcctcagtaggcaacgtgaaggcaaatggagcgacgagcccgtgccgctcctgaatgtgcgctctctcacggcgcacgagaagaggccgcacgatggcgaccggctctctctcgcgtccaacgagtttgtcatcatgcaggaccgatcgggtgtcgagcggctctatcgcgtgctgagcgtcagcagcggcgacatcgaactcatcgagcacaccgatggccggatctcgaaggaccgaacgcacgaccgcactcgaggcggcgcggccgcgctcatgaagcgcggactgcggaaggtctccgtcacctacctcggcgagatccgccgggccgggggctaaacgccatgccccgcgagcgcttcctggagatcgccaaggacccggcgcgcctctccctgcgccacgggtgcagcgataccaggattggatcgacaacgcggcgggcgtgggcctctcggcggcccagtccgacgccgtcaagcaggccaccgtcgccgcacgcgccgcctacaacgcggcgcaggcggctcgcatcgcggccaagaacgccaccatcggccaggccgccgccatgagaacattgtcggatctcggcgccgacgccattcgttacatccgagccttcgccgagagccagcccacccagcagcagcaggacgcggtctatcaactcgcctccgtcccgcccccggccccaccgacccccgccgggccccccgaggcgccgacggacctcgtcggcgaccccaacgccgacggcaccgtcaccctcaactggaaggggtccaccgcgaaccagacgttcttcacgatctggcgccgcgtcggaaccacgacgacgtggacccaggtcggcgccgtcgccagcaagacgttcatcgacgccaccgccccctccggcgtcgcgagcgtccgctacatcgtccgcgcccaacgcaacaaccaggtcagcgcccagagcgccgaggccgtggtcaacttcggcgtcagccaggcggcgtgagcaccgatcggcccgcgggccgaccgtcggtgatgtccatactccatgcgggcgtcgggacctcctcccggcgcccgcgttgtcgttggacccaagaacgggactgggcgatgggcgccagggcacgcacgcgcgggacgaacgacaaacgacgaacgacaaacaccgagcgccgaatgccgagcgccgagacgttgaaggagcgcgtcgaggccggctgaatgtgagcatctcgccacggacccgatgccacttcgaggaggccgtgatcctcgtggcgattcccattgcaccaaggcccgtcgtcgtccttcaaaaacaacgccgccccgcgagcgactcgcggggcgggtgaagtgaccccaatgggattcgaacccatgtttccaggatgagaacctggcgtcctggacaaggctagacgatg

SEQ ID NO: 3138 - DNA, 23414 bp, synthetic construct
  misc_feature 1..23414: note = Synthetic
  source 1..23414: mol_type = other DNA
gaagcgtgccgcggatgacgatggcacgcgctcgctggccgcagcggccaagctggaagggcaggctcgtgaggtcgctctgaaggccaagagcaaagtgcggtgacctcagctgatggccgctacaccatgctgcgcggcgatgtgcgattcaccaacgtcaccttcggatacaatcctgacaagcctgtgctgcacgatatcacttggttcgccaagcccggccagaagattgctttggtgggtgccaccggtgcaggaaaaaccacggtgaccaacctgatcaaccgtttctacgatattcaggaagggcagattctttacgacggcattgacgtgaagaatatccgcaaggctgatctgcgcagttccttgggaatagtgctgcaagacgtgaacctcttcacgggaacggttatggataatatccgttacggtcgtttggacgccactgatgaggagtgcatcgaagctgctaagctcacgaatgcggacggattcattcgcatgcttcctgatggttaccagaccgtgctgaaaggcgacggatccggtttgtcccaaggccagcgtcagttgatctccattgctcgcgcagccgttgccgatcctccggcgatgattctggacgaagcgaccagctcaatcgatactcgtaccgaagaagtggtgcaagcgggtatggatgctctgatggaagggcgcacggttttcgtcatcgcgcatcgtctgtccactgttcgcaattccgatgtgattatggttctggaccacggccgcattatcgagcgtggatcgcatgatgagctcatcgcattgggcggcgaatattaccagctctacacgggtgcggttgagttggaatagcctgaggtgttttgtccgtcaatagtggtgagtttccactgatttcaacgggtccggcagtttgttgccgggcccgttgtgcgttggtcgtgatttgactgttgcatggtctgttgaatgatctgtgcagtcaccagtgttcaccgtggacgaagcgcttgcctgtccacgacgaagtgttattatggccgcacatcaagcagtgatccgttatcagcggggagctttcggaagaaagggcaagtgcctgagtagaaccgacgggatcggcccgtcacagccggacacaagaggtcgtagtttcgttggaatctgcggcaatcgaggtggtaccgcggtggtatggcaatcatcgtcctcgtgcaggtaagtaatcacgccgagcgaggagcatagctgtggcatatcccaaggtaaccactgggtcgggcgtcaccccgagcccgaatttcccccagcttgaggaatccatcctctcgtactgggatgcagatgattctttccaaaagtccatcgatcaacgtccttcgggcgacaaaagcaacaatgaattcgtattcttcgatggccctccttttgccaatggtctgcctcattacggccatctgctcaccggctatgccaaggatgtgatccctcgcttccagaccatgaaaggccgcaaggttcatcgtgtatttggctgggatacgcatggcctgcctgctgagttggaagcacagaaagaactcggtatcgagtcagtggaccagatcgaggccatgggcatcgaaaagttcaacgatgcttgccgtgtcagtgtgctcaaatacacgaatgaatggcgagactatgtgcatcgccaggcgcgttgggtggatttcgatcacggttacaagacgctggatatccccttcatggaatccgttatgtgggcattcaagcagctctacgataagggcctggcctatcagggatatcgtgtgctgccttactgcccgaatgaccgcactcctttgagcgcacacgaacttcgcatggatgccgatgtctatcaggatcgtcaggatacctcggtttcggtggccgtgaagctgcgcgacgaagaagatgcctatgcggtcttctggacgacaacgccgtggacagtgccttccaatttcgcaatcgtggtcggtgcggatatcgattatgtcgaaatccgtccatcagaaggcaagtttgctgggaagaagttctacttcgccaaggcattggtgtcctcatatgccaaggaattgggcgagaactacgaagtcgttcgtgagctcaagggcaaggaaatggccggctggcattattggccggtcttcccgtattttgcaagcgaaaccgcgcaaagcgaaggcaatgtgcccggaccgaatgcgtatcagatcttcaccgcggattatgtcgataccaccgaaggttccggtttggtgcatcaggctccctacggtgaagacgatatgaatacgctgaatgcgcatgacatcaagagcattgatgtcttggacgagagctgcaagttcaccgcggcatgccctgattacgaaggtacgtatgtcttcgacgccaatctgcccattttgcgtaatctgcgtgcaggagacggtcctttggcccagatcgaagaggggcgccgcgcgctgctcttccaagagaagagctatgtgcacagctatccgcactgctggcgttgcggaaccccgctgatctacaagccggtttccagctggttcgtttcggtgaccaagatcaagaagcgcatgctagagctgaaccaagagatcaactggatccccggcaatgtcaaggatggccagttcggcaagtggctttccaacgctcgcgattggtccataagccgtaaccgtttctggggttctcctatcccggtgtgggtgagcgatgatccaaagtatccgcgcgtggatgtgtatggttctctggatcagctcaaggaggacttcggcgattatccgcgcgatgacaagggcgaaatcaatatgcaccgcccttatatcgatcagttgacccgcgtcaaccctgatgatccgaccggcaaatcccatatgcaccgtatctccgacgtgcttgactgctggttcgagtcggggtcgatgtcctttgcgcagttccattacccattcgagaaccgtgagtatttcgagcagcatttccccgcggattatgtcgtggaatacatcggtcagactcgtggatggttctacctgctgcatgtgatgtcgacagcgcttttcgatcgtcccgcattcaagaatgtgatctgccacggcatcgtgctcggatcagacggtcagaagatgagcaagcatctgcgtaattatccggatgtgaacggcgttttcaataagtatggttccgatgcaatgcgctggttcctcatgagctcgccgattctgcgcggcggcaatctcatcgtcactgatgaaggcatcagggatactgtgcgacaagtcatgttgccggtgtggagctcatattacttcttcacgttgtataccaacgcagtgggaaagggcaaaggatatgaagcccgtgcattgcgtgaggatgagatcgcaggattgcatcgcatggaccagtatttgctggcacgcacccgtcgccttgtcgaacaggtgcagcaatccctggatcaattcctgatcgccgatgcctgcgctgcagtgagcgagttcatcgacgtgctcaccaattggtacatccgcaacacccgagatcgtttctggaatgaggacgagacggcgttcaacacgttgtacaccgttttggaggtcttcatgcgcgtactggctcctttggctccaatggaagccgaagaggtgtggcgtggtttgaccggaggtgaatctgtccaccttgccgactggccattcctgacagatgagaagaccggcgaggcgactgaacttggcaaggtcttggtggataacgaagaactcgtttcttcgatggacaaggtgcgcgagatcgtatccggcgcgctgtcgctgcgcaaggccgcccagattcgtgtacgccagcctttggctgatatgaccgtggtcgctgatcgacctgctgcgctcgcgcaatatgcagatgttttggaaggcgaactcaatgtcaagaaggtcatcttctcgacattggaagatgccgctgaacacggattgcgtattgtgaacgagttgcgggtcaacgctcgtgcagccggaccgcgtctgggcaagcaagtgcagttcgccatcaaggcttccaagaccggtgcttggcatgttgatgcggcgagcggtgcgcctgttgtggaaacgccgaacggcgaggtttccttggtcgaaggcgagtatgagcttatccaccgcatagaagagcagaatggtgacggcaatgccgatactgtttcctcttcattgtctacaggaggattcgtcatccttgataccaagttgagcgatgacctcatcgccgaaggctatgcccgtgacgtggtgcgttcggtccaggatgcccgcaaggaaaccggactagaaatatctgatcgcatcgccttgcacttgcgcgtgccagaggctgacgcggccaagaccgagcaattccgtgatttgatcatggaagaaaccttggccacttcgctggaagtcattccggacgcaaacgcggccgagtgctcggtaagcgtggaaaagctggaggactaaaagcgtcgtaatggcactttgatgcctgtatacggcacaagcctgtgtaacagcataagcctgggtaggttggcagtatccacctacccaggctttatcatgtgacttgggcttaagcagtgcatacggcagagctgctggaatgcgacggtggcaggatccctgatagtgcatggctcatttcttatattgccttctgggcatggtcggttatgcggttcgggcattggtattcgagaattcgctcagggtaatatagccgctgcaattttattgaacggtaatatgtacgcgtgatattcggtattcctatgcatccctcaacgtgtgccgactgagctcggaacgtattcaggaagtgcatagtacacaacgtgtttatcagattgcatcagtagtacccgcttatagatgtttgtttgggataggaagttattacggaacgagaacaaggagaagtgcgccaagtcgcgtctcaagatcacaagagcaacagcattgacatgttgaacggtcctatttggaaccgtgtattgagatttgctctgccagtggccgcaacaggtgtgctggaacaattattcaatgccacaggtgtggccatagtcggcaacttttctggatctcacgatacgcaggctgttgcagcagtgaccgtgactgtagccttgacctggtagacctgtgggtcggcgccttctgccgttggcacggtcacggtgccgttgacctccgaaggttcctgcctgtgcatactggtcggcttgcatttcatcccatgttatggtctcgtctgtctggctgtcgtcgctccacgacacctttgtgctctcgggcagcacgggtgccgttcctgccacagtggatacattaaaggaatcagttattacacctgtcggaataactgcctctgcttccgtaggagctgttgtgttgtgaatggtacgtctggtccggaacccgcttccttggcagccacagccaaggcaatcgaattctctccattgaggttgaggaatccttgcgggatggtgaatgaggtctgcggacccatatcgccaatatagacaccggtgttctagccgttcacgaaaatcgcgacctgcgagtgatcttgcaaggtcttgaacttttcggactggagatctagtctgaaggccacatcctgatccttgggaacattcagcgtcaccttggaacggtaccatgcgatgccagtcttatctgcatggagatctgccgcctcagtccgattggaatcatcgacattctcggcataccatcctgcacgttcacctcctagtccaccattgttgtagatggtgccggaggggttgttcccatccttggcggagtcggtgccggcacccatgatgcgccattcgacagctccttgggcgttgagttcggcatcgtagagtcttcggttttccttggactgtgacttagtgccccatgctccgttattccaatcaagcgagagtcctaaagtatgcaccattacggcgagtaccgcaggttctccggctttgaccgaaccagtgggggctgagacgcttacccattttcctgcatcagtcgctggaacggaacctgcgtattgtccattcacccaaacttgagcgaatccggggttcttgccttgtcctggtgctccagctgatgcagtcgtcttgagacggattgttggatcgtcagatgatgcggtgtaatgcgcgcgataccacacagaaccggtgtggaaaccatagtgattggcgtcaagtacgacgccccgggttccatgcccttgttggttcccatcgcgattgttgtatcgcactatgccatcgtaatcctcactttgatgagaagtggtgtcgtcggccacagtccactgcgaatcatcgtaatccactgttgattcgccgtcatcgcgggcggtgacgaaagtgaatgtctgcggggtaatttcctgagggtctgcagtttcaccattggccacagaatcagtgatgctgcctagtgttgcaccgttccatgtgacagtggttactcctgctagagcgatgaccgttgccgaggatgcctgagacacagagccggtcaatgccagattgcttccatccaaggttgcagtacgagcgagttccacgccttcgacagcagccggtgtcgttgtgccatcggattttgctgcgtccaggatccaggtggttttcgccttcgtgcggtcactcagacgcaaagtaagcggcgcttcattgtcatcagcagctggcgtgatggtgatggactgcggattctccttgtaccggtaattcaatctcagttgtcctgtggcagcatcccatactttctctacgccctcgggtgcctcgacggtgggttccgccgagtagtgcaatacggtttctccgtcatcgccgttcacgccaacggcatattgcaacgtggcgttatccgtgaccatagacgcaccgaacagttgtgaggtggtgtaatacggctggtgtcctccaatgacggtgtctgcagtcaacagtaaggcgtcgcgaccgtgaagggtgagcgcagtgccttctttttgagggatcgtccagcttacagggcttcgcggctgagttgaaggatacgcaggcaatgatgctgcggtaaggtactggcgcactgcatccaaagagacgaaagtgtcggaagagccgacgaaactttgaccatccacagtgactgacactgtgtgttctgatggtgtgcacgtgtctgccgctcgccagctgaacatagttttctgcagttatgcgctgctggtgacttcctcgtgggtctggcccacgacttcatcgtcaacgcgaaccgttgcagaaccatggtttgtggaatatgcagataccagatcgaaacccactcctgtgaaggtgaaggaatacgtggagccgtcagtcttggaaaaaatgttcgtcgccattgatgtcaccggaagtccatttctttccagatgcataatcccagttgggtgagaaagttattgacgcatcatcgttattgactacctttggcgaggttgatgaggtgacttcaaatgcatccaaggagatcacgtcaccggtatcgccgccgagattggtgatgacgatcttgtggacgccttctgagagatcggataccgagaagacttccagttgtgcgggcttattctgctccgtatcgacggtagccttggtgatttcgaccgggtccccgtcatcgatgctaacggagaattttccatgatcgacgcctgtgccgaccaaaagtcgcatccctgtgcccacgaagctgaatgttgctgagtctccaagagtggaggaacgggtaatggtgccttcggatgccgttgcatcgtccacttgtgaccacgaacctgtgtattccacctgagaggagttgtgtcgtccacaagagtcgtcgaggatgcgggaccgcttccggcttgtggatccaaactcagtggcaaatggaatcgggtctcagtttcagaattggagttcttcagacgtgcggcaataatctgggaaccgttgccggtcgccgaaagtgtggcatcgctggcatactggtctcttctgtaataggttgacacttcgtcgccatcgacatcggtggcagcggcggtgttttgcggtgccatggcagcgacttgcggcaccgcacgcatatagtagcccctttctttctggacagaggacttcagcgtcatcgaacgatcttcggttgttcctgcaccgtagtcatatgaagtgaaaccggatgcgggagttccggtccatccccagtttgttccgccataggccatatagaagttgaaagccgttactccattgccgatattgttcacgccccattgacgtgtaaaagcttcatcagtgtagttgtagcaatccgaggtgttgaagcttgcaccccaagggatgaaggagccgccctgggattcagtgatgaagttggagctggtcgaagtgatacggcggaaattggcttccgaatcatcgattttgttgcggccagcgctgcaattaaatccgacgggatatttgttgtaggcgtagaaatccaaccctgttgcggtggtatttgctcaagcggccgcccatgccccagtcgttgtggaacaagaggactgtgatgcctgttgccttgacgtgcctgcccagttcggttaggaattcctgatcctttgcattgccttcagtcagctcattctctacttggtagagagtaggacggatccgccgccatcggtgacctgatgcttggaaatgattgcgtttgctactgtcagccatgattccgaggcggccagagccttggaatccatcgaacgcaatccgccgccgtaattggacatgtaggcaggaagaccgcccatggaaatctcggcgttgacgtatgggccagggcgtgcaatgacatacaacccctcttcttcggccaggctcagcaacagatcgaggtctttgacggtgccgggggagaagtcaaacggaccattttcctcgctctggtgcaatccccagaacaggtagagggagaccgcattgtagccatgggctcgcatcttttggaagatatcacaccagccatttacatcaagaagacgccaataatgaaattcgccggaccatatgttgatgcgctcgccgtcgattttgaaggaacggacatcaaaactgacttcatgaggttgcctgtcatttcctgggaaagtaatgcgggagggggtgtatttggttactgagtccatgactgaactttgagtgtcggctgcgatggtcgcgggcacgttcaacagccctgttgcagtgagcgccataccgcagattgctgctattgctctgcctaacagtcggttacgcctcggctgtgcgcgtgcagagtggggtgagtagaaatatcccgtcattgccacacctttgcagtactggaagggattcagaaagagtgttgggaggaagatatcgtcactgatatccataaaccaaaacacgttctgaaataaagttattaccacgttgcaaagactatttgttacctataaatacttgtgataaacgtaatgttcacacgagaatttgttagatatttcagtctaatgtagtagaggtttactggattctcatcaagaagccgtgtgccggaaatcagaccgttttggaggcatggtagaaatactcaatttatccgcgacatgccgagtagcgggacgtattgaatatttgaaatattagccggtcggttgcgttgttgaggaatagtgataccatgaaactgctaattcacagtaagagcggactagttagccgctttgaatgctaagcagaattctgcaggggaggcaatgcctccccgtttttttatatcatgacatgcaaaatgatgttcgcctgttcgggtgatatgattgtcgaatgggtattatgtatcgcgtcggagtagacgtcggattaaattcaacgggattggctgctattgaggtcgattcggaaggtaaaccaatcagaatcctcaatatgcaaagcgtcattcatgacgggggtgttgatcccaattccaataaaacaggagatactagaaagctaatttctggcattgccagacgaactagaaggatgcgtcgacgcaggcgggcaagactggctaagctcgatcattttttgtctgaactgggtctgcctatagaagagtatggagacgaatcatttgagccttgggtggttcgtgcaaagctggctgatgcgtatattgaggacgaggaaactcgtaagaggtttctttcgatagccttccgccatattgcacggcatcgtggttggaggaacccatataaatccgttcagtcactatacgatctgaatgttgatgatctgtccaagcaatacgagtctctgtgcagttcgggtggttgtgacaaggaagacggtctcacccctgcgcaaatcgctgtggaatatgtcagagctaatgccggtaatccagctccgagattcagaaagagcacgaatcagaagtattcgaacaaccaaacgctttttcctcagcgcctcatgcaagaggataacgcatatgaggtttcgtatatttgccagcaacaagggatagacgaggatacggaacattcgataataagcaagatatttgactctaaatcacctcgtggttcggccaaggatcgagtgggcaaggatgtgttaaccggcgaaccacgtgcattgaaagcttcgctggcgttccagaggttcagaataattgccgcactctcgaatatcagtataaaagttgatggggtcgtaagaccgctgaacattagcgaaaagcaaagagcattcaacgtgttggccgatatggatgtcaaagatcgacctacatggtcagatgttgcgcagagtctaggagtgacccgccgagaaatcaggggaatcggtggcattcaggacggtgaagatagggtttcgaatagggctcctgtcgtggaatcttattttgcgcttcgtgatgctgaaggtgctctgaaaaaactggtcgtgaaggtcattctcccatggtggaatgaagccagtgaccaggaacgggaacatcttattgaattgttgagcaataccatcgatatcgattctgtacgagatgatttggactatgcctccgcttttgatctcattgattcatttgacgatgaggctttggcacaactcgataatctcaaactgccaagcggacgagcggcatattcagtgcgggcctgccttgacatggcggatcgtatactcaacacatccgataacctgcatgaggcgcgcaaatacttgtatggggtcaccgataattggcgaccgccacaagagcccattggtaagcccgtgggtaacccttcggttgatcgagtcctgaaaatcgtgaatcgatatctcatgaatgtgacgaatcgatggggccgtcctgtcagtgttaatatcgaacacgttcgtgacggatttagctcgttgaaagttgctcgcatgtatcagcgtgatacagagcaaagagcgaagtacagggattcgatattccaggagatgaagcgcgaggatccgaagattgatagatatcaagattcgcagataaagcgctgggaagcggtccaacggcaggggagtaagtgcctgtattgtggatcactcattgacttctcaagctgcgaactagaccatattgtgcctcgaaagggagttggagccaccaataccaagacaaatttggctgcggtgtgcgcaaattgcaataggaataagtcgaatactttgttttcgaggtggtgccatagtgattatgcaagcgaacacggaataaccctcaaggctgcacttgagcgcgtcgatagcttcctctttcctgccggtatgtataacagaagggaaagcctgaactttatgcgtgcggtcaaggcgaggttgcaacagaagactgaggacgaggcccctgataatcgctcaatagaatcagtggcttggatggcggatgaacttcacaaacgcattgactggtattacaactctgaacgatatctttctcgagataccgagaatttgccggatcggcaagttgaagtattcgtgtatgcaggcaaggtaacggcaatggcccggcgcttttcggggattgaaaagcagattcattttgctggtccgcatggaaagacaaggcttgatcgaaggcaccatgctgtcgatgcagcggttatcgcgttgatgcatcatggcatggcaatgattctcaatgagaaaaatgaattgagaatggcgcagttctacacaaatcaacttaatcagaatgagatggattggaaagaatatcctgctgggaccagcaaaggccctcgttattttgagtgggttgacgacatgcactcattgcttgaactcattaacaatgctctggatgctgatcgagtaaaggtccttcgaaacattaggttggaactcggcaattcccgtgcccataaggacacgatccacaaattagtcaaagtgcgactgggcgatgctctggatgcgaagcaaatcaataaggcgtccacgccggcactgtatgctgccctcactcgtcttccagaatacaatccaaaaaacgggttgcctgaaaatagcgaccgggaaatcactgtgaatggcaaacattatgcggcagatgatgatgtactgttctttgcaaccgacgcggcacagcttatggtcaatggcggctcagtcgaaattggcgatggattccatcatgctcgtgtttataagtgtgcaaaattcaataaagcagggaagcaaactggattcttctacggaatgattcgagtctttgctgcggacttagtgcatgccgctcatgaagacttactctccgcagagctcccgccacaatcgctcagcatgcgatatggtgagaaaagaacagtggatgccattttgagtggccacgctgagtttgtagggcacttgtttataggtgacgagattcgattaaatctcgggaaagtcaactacacgggtcaagtgaaagagtacgaagaggtattgagggattcgagtagcccgcatatctattcaagctgggtgattgacggatattacagtccttcaaggctaagactgcggcctttgttcctctcaagtgagggcattgataagatgccgatagagcagcaaggcgtgttaggcaagatgtttaagcccggttggttaccagccgtagacgtattgtcaagctttgaacctgaagttctacgcagaaatggcctaggtgaacctcgatggtcatctaattctggattgcctgtctcgtatcgatggcgtgagtaaagaaggcagagatgcaaagtgcatggcgcatcgtggattgttgtgatttacatggttcattgaagtatgagcgtggcagattgctggtttatgactcggtcaaagacacatccacggatgcgccactatctgatattgctgttttgcttattggactgcattgcaattgttccgccggtttattgcatcaatgctctgtgtatggcgtttccgtgatgacttgcgactggcgaggtatccccatttcggctatgcatccatggtcaaatatcaatacgcgtattaacgtgcggtatagggcacagattgaacagacgatacctcggcagaagaatctctggggacgaatcattcagtcgaagatccgaggacaagcagcggtactggatgttttaggcattgacggtggcggtcatcttagaggactcgctgccggagtccgttcaggggatttaacaaatgtggaaggaagagctgcacgagattactggtcggcactgtttgcaagagactccgattttcatagaatccccggtagcggtgatcctaggaacgggcaactagattacgcatataccatactgagaggcttcacgatcaaagccgttatcgcagctggtttatgcccatgtttgggaatacatcatcataatggtggtaattatttctgtctggcagatgacttgatagaggtcttcaggcctacagtagacgtaaaggtttcacagctatccgaaaatgattcgttaattgacaaggaagtcaagcgatatctgatctccaacattaatagacaattcaatggcgaaggattaacgattccgagcaaaatcaatgatttcagccagcagtatgcactgtatgtggagcgaaagctagacaaaattgaaattccacaatatgtcaaggattaaccatgaaaatcgacgaggatagtggtggaatgtggtgtcttgttatgttcgatcttcctgttttgaccaagcgagaacgtcatgatgctgctgtgttcaggcatttgctccaggatatgggatattgcatgattcagttttccgtgtatgcccgttactcaccaacggcagatgggaaccgtacgactgttttgaaagtcaaagaaaatcttccacctaatggaaaagtgaggattttgcacataaccgataagcaatggtcaaaatctctccgatttgcaaatttaaggcctcaactagaagatgaaacacctgacactttgctgcttttttaaacgcaaaacaacctgaaaacgttgaaatctaccctcttggcgagattgatcaatcttatcaagagggtagaaagctaattcacagccacgtggcttcgtcgtgcgtggaagtctcaatcttatcaagagggtagaaagctaattcacagcgctttggaatccgtgaaatcacaaaatccaatcttatcaagagggtagaaagctaattcacagcaatcatcctcgcatgtgtcatcctcgttcaatcttatcaagagggtagaaagctaattcacagcggcttcgacgggctggatgccgttgatgcaatcttatcaagagggtagaaagctaattcacagcgctgggagagctgtccaaggaggaaatgcaatcttatcaagagggtagaaagctaattcacagcttttttctgctgtctcttgcagcactttcaatcttatcaagagggtagaaagctaattcacagcccggtagagcatgtcgaagatgtctctgcaatcttatcaagagggtagaaagctaattcacagccctcggtcaccgcatatcctttgtcgcacaatcttatcaagagggtagaaagctaattcacagcggcatccggccaagctctgattagtgctcaatcttatcaagagggtagaaagctaattcacagccgtgcccgtcgaggaattcctgttcgttcaatcttatcaagagggtagaaagctaattcacagccctgacggcgttcatcagtgtttccaagcaatcttatcaagagggtagaaagctaattcacagcaggttctcgaacatcaagaatggtgacacaatcttatcaagagggtagaaagctaattcacagcctgttcgggtggcttgcattgtagctatcttaacaattacgccgaatacatgataggtgctacttcttgttagctgatgatgtgcgctttacatcactccaggaaacgagaatcagctaaaacgtggaatcagaacgatggtgtcgtatttactcctatttgaaatggatcaatattcgagacttatctacagatattatgagaaatggttcgatggcactagccttaagagcatgtgactatataaaggcagggagggaagccatgtcacagaatataaatcaagcatcgcaaaatcaagggaacccacagtatcagaaaatgcaaactcaaccaccgatgcttaggaatgtggattcaaggtatggctttgggtatattgcgacagcaaaagtattggcgtgggtcggcgtaatactgacaattatcgtggtacttgttggaatttcggaaatgtctgactccgattcgagtgattacgtattcgtgatcatcgttggtatcctgcttggggtcattattttgcttccatatctgcttcttatcaaactattcgagaatgttgcacgcattgcacgtgttgcagagatgactgcagagagaaatggatatttcttgcagcctgttatgacacaacaacagggtcagcccatgacacctcaatcaatgtcgactcaaccaattccagcacaatcaaccatgatggctcagccagttcaaacaagtcggtctcaacagccaattcagacggcagttcggaaatcccagcaatgatttagtagaagttgaatttaccagactgcacttcaatatcgaaaatcttgcggtttaatattgaggtgcagttttagtatttgcagggtttgttagctctaataatgaacggtttagcctgaaacattccgtgaatctggtgtatcaggaggatgctcgaattcttagacggttgggtttaagtatctgaaatgttcggcgggcgagtcacagcgtacaataggaacccgttccaatttagtggtatctagtatcagttttaggagccaagttgacccgtattgttgcagggattctcgcgcacgtcgatgcgggtaaaaccacgcttgtggaagggctcatgcatgaatccggtcagctgcgaacactgggccgtgtggaccacggcgatgcattccttgatacggatgcgatggaaaaacagcgcggtatcaccattttttccaagcaggctcagctgaattatcatgacctgcagctcacactattggatacgccgggccatattgacttttcggcagagatggaacgaacgctttcggttctcgactatgccatcctggtgatcagtgcctcaggcggtgttgaggggcaagcagagcggctgtggcgtttgctgagtaatcgcaacataccaactttcatcttcatcaataagatggatgcggatggcgcagataaacaggcaatcctagacgagcttcgccaaaggctttcagagaactgcatcgactgctcaggtgtgagcagattgacgacagataaagtcgtccaagagattacacatggatctgaaatagatgaattaggcaatccaaatgctttgtcatccagcgtcaatgacagcgaatcggccacgctcccggaatttcaagaagatgttgccatgttgggcgatggggcaacgcaagagttcctcgataacggtgccatttcgacctcaaccattcgttctttgatcactcagcgcgcgatgataccggttttcttcggttctgctttgaagctgcaaggaatcgatacgctgctcaatggtctgcgacgatatgcagaagaacctgtgtatgctcaagagtttggggcgcaggttttcaatatttcccatgatccgcgcggcgagcgactgacctggataaaagttacaggcggcacactccaagtgaagtctcctctggatcctgcaaacaatccgacagagaagagcaaccaactcagagtgtattcgggtgccaaattcgaattggcaaatgaacttcctgccggctcgatatgcgcagcaaccggcctgaccagcacgcgggcaggagatgggtatggtactcagacgaatgctcctgccccgactatggaaccggttttggaatatacccttttgcctggcgaagtggatgtgcacaaggcattgcaagctctgcgaatcctcgaagatgaagatccgctgctgcatattcgctgggatgagcatgtcggtgaggtccgagtcagacttatgggcgaagttcatctcgaagtgatcagacagatgatgctggatcggttcggatatgcggtggatttcggtcccggaagcattttatacaaggaaaccattgaacagcctgttatcggtgtgggccattttgagccgttgcgacattatgcagaggttcatattttgatggaaccaacgggagaaggaagtggactcagctttgctgcggattgcgacgacaatattctagcgccgaattggcaacgcttggtgctgacccatctgaaagagcgcgaacatctcggcgtgcttacgggatccccgataacggatatccgattgacggtgatttcaggtcggtcacaccctcgacatactgaaggtggcgacttccgagaggcaacatatcgggctgttcgacaaggattgatgaaagcgcaaagcgtattgcttgagccatggtatgaattccatgcggaagtgccgcaggaattcattggccgtgtgatggctgatgtgcagcgcatgtcggggcaatgcgaggcgccttctgtggatggcgagtttgcaatggtatctggcactgcacctgtggaacagatgcgagattatgccataacagtgcatgctttcacacatggacgaggccgatttgattgccgtgttgcgggttataaaccatgccataatgctgaagaaataatcgagcaagcgcattacgatccagaaggcgatgcaaaccacacgccggactcagtattctgcgcgcatggcgctggttacgccgtggcgtggaaccgagttgaagatttcatgcatgtgcaggatgaacgctaattcgcttcctcatcaatgccagtaggccacatggtccatatgccggccacaacggtgatgattccagaaacgatgaatatccactcaatcggaacgaaatcggcaagaggcccggcaaacaacattccgaaaggcatggagaaggagatagacgcattcaccagtccgaatactcgaccctgcatagtgggagggacgtattcttggatgtaggtgaaggtcggcgcattcatcaatggaatcaaaaggccaaacagcacgaaggaaatcacataaacccacatcgaattcatcagggtattcgccgagagtcccatgatgatattggcaatacctgttcctgcaataccgatgcctagggatgccaaccgacgtttgaatccaccccaagcagtcatgatcataccgcctacgaccatgccgataccgaaggtcagttcgaagaatccgagtttgtcggttatggaggtcaactgaacaatcccaaggtcaaaaggtgtttcggcaaaattgcgattgacgaaaatcgaggaaagcatggtcggggacgcgcagatcaggcatgccaacgtaaaacctatgagcatgcgtcgcagcgtcgggtgctggaagctatacagaatgccatctcggatatccgcccaagcagattggtgctcttgatcggagccatcaatagttactgtgctgtattctgtctcttcgggtgacagcgttgccgtcgaatgtgaagtggcttggccttcttgtggggactctactcggatcagcagaatgcacccgatgccgataatcgcagtgaacacatcgacgaagagcaccgattgtagggcgaatcgtccgataagcacggcgctgatagccggcgccacaatattgagcaaggattgcagcgtgccgttcaaggaattcactcgcatcagatgttgcgacggagtgatctccggaataaacgcgccgactgcgggcgattgaatacctgccccgaccgaccggacgaagagcaccacgaaaacgaaccaggtttgcgcattgccagtggcatatgcaatggccaagcacaaggtgatacccgcaataaccgcatctggtgagacaataagcagtcgtctcgagaagcgatctgcccatgcccctccgaatatggaaatgaaggcttggggcaacataccgaatatggtggcccacataatggtgacgcctgaattggagcggattgccaaatcccaccagatcgcatattgcaccaagctggatccaaacaaagaaatgaattggccgcctatgagcaaaataacgttacgcaaccatgctgtttgaggcgtggttgaagataggttctgtgacattgcatcgctctcttctatttgcggtggtcagtgccttgggaggaacccccatctatcgcagatcagggcatcaatcacactagcatgtggcgccggagtagcgtcgtccttccctaggctgagggctgaaagcggtgcatatgacgaaagtgcggcttggcaaggtggtgggactgtgcgaatagctgctgctgggaatcaggttgcataacaatgaatgactatcggcacgtatgagttgggcccacgctcagcgagacgtgggcccaactcaacttaagccgtttcggtgatatatgcagccgaaacagcacagggactactttgcgatttcgtcgattgccttgagctccttatcgctgaaggtggtgttcttcaatgcggcgatattgtcaagaatctgctgtggcttggatgcaccgacaagcacgctggtcaccttgccatcatgcataagccacgccaatgccatctcggctagggtctgaccgcgctgctgagcaatctcattgagcttgacgatcttgtcatggacacgattgacggcctcctcattgaggaaacgcccgtcatgtgccacgcgggaatcggcaggaatgccatccaaatatctgtcgctcaatagcccttgattcagtggggagtaagtgattaatcctttgcccagccgatttgcggtttctttgaggccgttattttcgacagtgcggtcaaagatgttgtatcggttctgagcaatcacaaagggcacatgcagttcatccaaaatagccttggcctgttcgaggcgctcgccgtcgtagttggacaaaccaacatacaacgctttaccgctggaaactgcctgagccaaggctcccatggtctcttcaagtggcgtttccgggtcagggcgatgatggtagaagatatccacatattccagtccaagacgctcaaggctctggtcaaggcttgccaacaaatacttgcggcttccccaatcgccataagggccgctccacatctcgaagcccgccttggtgctgataatgagctcgtcacgatgatgcgagaaatactcatgcagaatacggcccgcgttcttctcggcgctgcctggttcggggccatagttattggcaaggtcgaagtgggttatgccgttatcaaatgccgtgaaacacagctgcttcatttgctcatacggggtgatatcgccgaaattgtgccacagaccgagggaaacggcgggcaacatcaacccgcttttgccgctgcggttatatgtcattgagtcatatcgtgacggattcggtgtgtacacgctggtaggttcaaacatgtcttagtccttcattggaaattcatggtgtgcagtcgtcatactagcaggactccgctatgagttctcagtgtattgaaaacagcttcgccgtgctcggtatcaattgcttgagcaacttatactaagcacggcgaagaggataactactgctgggttgcggctattgccacagcgccgatgaaattgatcggctggctgaagttcggctggaagagcagatctgcgccggccaaatcagcgatcgtgaacttgccttggatggcaacggagaccacattagcggccagggacacatcatgcttcgaaaggaactgggcaccgagaatgcggccattgctcttatcccacaccaatgtcgcggtcactggagtggtggtcagcatgaaatcaggacgataatcctgggtaatggttaccgtaccggcatcgaatccgcgcttgacggctgaggcatgggtcaggccggttgcgcacatcgtcagatcgaagagctgcactgcgctggtcgcctgagtgccgagatattcgtgggtcggttcgacaatattttcgccgatcagcagaccttgacgcacggcattggtggccagcgggatgtaatcggctacgtcggtagggttgtaatgcactgttgcgctatcgccggcagccagcacatcactcagcacggtgccgtctggggcagaggcgcgcatgtacttgtcgatgacgatggctccgttgtcaatggtctgcaactgatcacggaagagatcggtgcgcgggcggaatccagctcccatgattgccagatcggcagtgtattcacctttttcagtgacaacggtgattcccttgccgtcctccgcaggacggaatgcggtgaccttctggcccaaagccagagtgacgccgttatcggtatatgctttttcgacggcttcgctaacggcaaggtcgaaattattctccaaaacatgggggagtgcgtcaataagagtggtctttacctcaatgctgtcgagttgctcagccagttcggcaccgatatagccagcgccgatcactacggcggtctttgcatccttgaccttttccttgatcgtcagcgcgttgtcccagttcttgcacaggagcactgatcctgcttcgactgcttcgtgcaacccctcgataggaggcagaaccggtgcggaacctgtggtgaccaccagcttgtcgaatgtgtattcagtgacctcgccggtcttcatatccttggcatgcagagtctttccctgaacgtcaacgtcaagcacatcatgctgcatatgcattgtggcgccagcctcggtaagcgcttcaggagaggaatagaacatacgattcggatcgctcacatgattgccaacccacagtgcaatgccgcaagagaggaacgataaggagtcgttacgctcgaagacatgcacagtccaatcaggatggttattcagaatagaagtggcggcgaatgtacctgcgtgggtgcagccgacaatggcgacagtagtcatgtgagctcctttgctgctcgtatatggcatcatgcggggcggcgaagccatattcggaacgtttccgaaccttggcatcgttacctgcgtgctcaagtgtaatagatgtaccttgttcgcggaacggaaagttaaacatattttcataaagttgttggtattggcgatatttcggcaaaaatatgtggtattggcacgaaggtgtttcagaatgtaaccaattttttggaatattcggcgttttgccaactggaaatcagccgtggaatcgcatcggtgagtatcgcaaacatgaataatcgcgcaatgctagactgaaaactgaatctaagccatggacggctcggatcacagtcctaagggggccagagatgggagccacaatggtatctatcatcatcctgattgctattcttattgcattcctcgctgcatcggtgttcatcgtcccgcagcaacaggcatatatcgttgaacgcttcggaaaattccagtcggtgatgttcgcaggaatacatatgcgcattccattcgtggatcgcattgccatgaagacgaatatgcgagtttctcagctcaatgtgaagttggaaaccaagacattggacaacgtattcgtcactgt

SEQ ID NO: 3139 - DNA, 23405 bp, synthetic construct
  source 1..23405: mol_type = other DNA
  misc_feature 1..23405: note = Synthetic
gcgattattgtcaagagcactaatcgaatctaaatctagccaattccacgcaccatcggacgaacctccatctgccgtcaacgcgcgcgccaccgtggtagtgcgatacgaattaagtaaccttgcaagattagccaaaaccgtcatcttaccgttcaaaatattgatgcgcaccacatacgtgcctacttctttcgttttatcgaaagcgttaccgttggttgcaatagcaataatattaccgtttgaatctgtggtgtaatcgctgaataaagagtagcgttcatcaaaattaaagaagtttttcacagcgcccaacttgtctacacacgcaaactgggtagtgctcaccgcataacacgtctgctgaccaatagtaataaatcgcgttcccttcacatttttcaaaggaatttccccacgcaaaatgccgctgctgtcatacaaaaaagcaaaatgtgtggagcttccctcagcagcctcaggcataaccgcatagagaccattggtcagtttagtgctgttatcggcaaaaaacgtagcgttcacgcgcacaggctcattgcctaatacgtcacccatggtgtatgtgtattggcgtgtaatagtatgttcgtccacatcggtgagggtgaaagtaactacattcttcgtgctaggaatcagccctgtaacctggaattcatgggtgcgaccacgctgagcttgagtggtaacaacccgtgtgaaatcagggaaattcgtttccggagcactaaccgtgtacgacacactcatgagctgatcagtgacaaaaaatacgtagagagacgtggtattcgtaccgaaggggttcgcctcaacaagcatatgatcaaccgtgtaattgcctgttttctttttcttctcaagagtagcgctagctcgtttttggtatccgattgtataaatacgctcaacagtatgcgccaaaacgcttgatggcgagtttctacgcgcattgtaataggtgagtgcgctccacgctgttaacgcaacaacaacaagcatggcaacaataatgctggctcggcgaagctgttcacgccatgtaggttttgcgctatcatcttccgttttgcgctgaggaggaacagaacgataacccgaacttttggtgcgcgttccagtagcatgatgcacgagttcaggtgttgccatacgttctccccacgatttttttgagctgacacaattatacgaaagtcacgcaatctttctccattgaattttctcggttacttttctggaacgttttcggttgcgtttctgttacgttttctcacgacttcgttgcttcgttcgttctcccgtttttctggctcttgtgattttagcggggtttagaggagagcgttgcccagtaggttccagttgattcctcgggatgttatgtgttaagacatcgcttgggtgtgaatgtggtttggcttcataagtgaagtcgatacgcgcaaccgatgtgacagttttgaagccatttttgcgcatcaaaaccggcataacaggtgtattaatcggttaagcagcagagtcgatagtaacagatcttcggatttaacgtagcgtgaagcctgattgcccggaacagctgctagtcatgcacgtgcagactccaaaaccccactaaaatcttatgaacggttttctgattgccttatcatcagcagtctcgcgtgctcatgaacgtgagctggatcacatctttctgggtctacgcgctcgccctgccgattgctgtgttcttctacttccaagttccagaaattcgcgtggaagcgcagtctcagaccgcgaaagaaaagatgaatcctgccgtgtacgcgctggttgtgtttgcgattattctcgtgatgaacagcatcgccatttccgtgcgcttctcctcgattgcaacagaactgatgggtgcaagctttaacgccagcaattacttggctctgatgcctctgctgggtattgccgccggtttcgccttcggtttcgtgaacaagctgtgcggcaagtttacgctctacttgggtattgcctgctttatcgcttcgaacctgctgattgctatgagcggctccagcttctggctcttggttgccggtctgttcttatcgagtatcccgggctcgtggtgcttcccatacatctttagcaacctcgataccttgacgacgaagaacaccgtaaccttggccacctcgctcatctttatcggctgcaatattggcaactttattgcgccgcttgccatgagcgctattcagttgatgaccggtagttccgctctgaccgctccgttctacattttcgtcggcgtcctcgtggctgtgctgattgtgttggtcgcggtgaaccgcaaagctaccgcttagctagcgctttcttgttcctttctctgcgcgcaaacccttctttctcgtgattgctgttcttggtaatgcgggggaggagggtttgctgttgtggtgagcaacttctgactggcgcgttgctcagcaaaacacggaatagtagatttcgaaggagaatccagctgtggcgagcaattcgttacctataagttgctcaccacaacagtttgtaatggtgtgcggtaaccgaaatctgaatactcacacagatgcagccgctgtgactattgctgtgactatttcgtttttttagctaaagaaaggttgtagagggggggggagttcgtcgcctataaacgttgaaaataaaggctttctgttttgtgcctcggatgcgattcgaacgcacgacacccgctttaggagagcggtgctctatcccctgagctaccgaggcaaataggagtacctgcattaaaggcgcagtacccgtaaaaagtgtacacggttttacgcaattgcgcacacaagcgttttatcgtgtgcgtgcgcaagaatacacagaacttacgtaaacttactcgtttccctgcgttcctgcattagcttggaactgggcttgagattcctgaacttcattaagttttttagctacttcatcgagcagagattgcgcgtgcttagcgagtgcttcacccaactcccattgatacatggaatcgttaagttccaagccgcccgcttccaacttctgcacaacctgaacaagctgatctcgagcttgttcatacgtcatattttctattgctgagagctgttcgtcagttaaatgtgtattgtttgccatgttagtcctccattattgtttcgtttacggtagcgttgagtttgccactcttaagcgttacgcttatgccctcgccagctgtcaatgcgtttgcaacatcaataaccgttccatctgctttttgcacaacagcatagccgcggttcaatgtggattgaggagatagagcggtaagtgtagcgtgtagtttatcgatagtcgatgtggcttcagccgtcataaagttcattgcagtattcagtcgcgtgcgagcttccttaacaaactgctgaggtttatcgagaatagactgaggatgcgtcaggcttggacgttgcgtgtaggcagataaacgttgctgttcagtagaaaccttattgtgcagagcgccaaatatacgggttcgtgcttcagaaacaagcgataattcctcgcgcacatccggaacaatccttttagctgcatctgttggggtagaagcgcgcaaatcagcagccaaatcaatcaaggtccagtcatcttcgtgtccgatagctgatactaaaggtgtaacgcagtctgcagccgcacgaacaacgccttcgtccgaaaaaccaatcaaatcctcaaaagcaccgcctccgcgcgcaacaataataacatccacagaagggtcagcatctaactgagctatcgcagtaatcacttcactcggacaggacggaccttgcacatgcacatgctgcacagaaaactcaatacttggccagcgcaaacgagcgttagtaataacatcgccttcagcgcgcgctccaggagcacaaatcaaaccaatgcgttgcggaaaagcaggaagaggaaccttgtggtcatcgtcaaacagtccttcacctttgagtttcttgcgtaactgttcaatctgctccatgagaccgcccttgcccacatggtgaatctcgtcagcgcgaaaactaagcgaggtgcgaggctgatacatattcgctttgccgtgaataacaactaaatcgccttgggtaaatttagctgcttcataggcaggggcaccgaagaaaaccacgtccatctgcgttgtggtttgattatcgcgcaaagtcatatacacctgacctgcgcggcgtgcattaatctgatgcacctgaccagtaatccaagcagcaggccaacgatccacagcatcggcaaacttactgctgataagcgaaactggccacggattatctttcgtagtatctcgtgccatagcaggcaagggctgctgaggcgatgagctgtgcggatctaactgctcgtaactgttcatcatgcttctaggatattagagcaagctgacacgatggcaaggtttatgaatggttgagaagcgctcaaagatcgtgaaaagagatgcgcgtgtttcgtgagcattgcgtgcagtagaatcaacaaacagaaaattgcatgaatgtttaagaaagaacgcatatgagcgaattaacacagccgagccagaacctcatcttacgaccaaccgagcgtggagatgtgcctgcaatcatggttatggtcaacgcggctaaagctatgcttaaagccgataatagctcgcaatggcagagcgggtatcccaacgaatactcattttatgcagatattgatgctgggtcgagctttgttttatgtgaagaaaatgctgggcaagtggttgctacagcaagtatttcttttggtgaggaggccggttacagtgcgctgattagcggagaatgggcatatcctgaggaagagtatggtgattatgctgtggttcatcgcgtggcagtacatcctgattattgcggacagcacgtggcagatcaactatttttagcgctttttgaggttattattcagcaaggtattcgcacagtgcgtgtagatacacaccgcaaaaatcagcggatgcaaaacgtactggctcgtttaggctttagcgtgagcggcgaaataacagtagatcatgatccgctcgacccgaaacgcttgtgctacgagaaattactgcggtaggtgttatatgaagcgcgctgagagagcgttctgagagagcgtgctgatagcttatagtaagtgcgcgcgaaagttccagagaaaagtttcaaagaaaaacgcgcagtatcttaaaatcgctcggctttgctatcatatgcaaccagaagttagttctgctaagtaaaacgctcggcagaagagacagctaacgaccatgatccgttatcagcggggagtcatcggaagaaaaaccgtgcttgtgcggcttaacgaacagaacaaagcgatatgcttgaacagttcgttgctcaaagcttcaaaagcggttgattagacccgacggagcagaccggattctgtgaagaggtactgtgcagtctcggcgcagtgcaaccgaggtggtaccgcggggtgtaaaagttgaagctggcataagcagaagctttcgcacatcgtcctcacgtgaatacaggtagcgaaatttcgcaccacatatgaagtgaacaaacacgagttttcacgagaggcgaggcgcatgagtaatcgcgtttatcctaaggcagtgactgatagggaatttgaaactatcactcctagccctcatttcccagctatggaagagtctgttctcaagtattgggatgtagacgatactttccgtcgttctattgcacagcgagacagcggcaatgctaacgatgaattcgtcttctttgatggtcctccatttgctaatggtctgccacattatggtcatttgctcaccggctatgctaaggatgttattcctcgtttccacactatgttgggcaagaaagttaaccgtgttttcggttgggatactcacggtttgcctgcagagttggaagctgaaaaggaattaggtattaccgataaatctcagattgatgagatgggtattaaagcttttaacgaggcttgccgtcgttccgtgctgaagtatacgcaggaatggaaggattacattcatcgtcaggctcgctgggttgattttgatcacggctataagacgctgaacgtgtcgtatatggagtctgtgatttgggcttttaagcagctttatgatcgcgatctcgcttatcagggcttccgcgttctgccttactgctggaaagatgaaacacctctgtctgcgcatgagttgcgtatggatgcagatgtgtatcaagaccgtaccgataacacgctgtctgtggctatgaagctgcgcgacgaagatgcctatgttgttatttggacaacaactgcatggactattcctaacaacttagctattgttgtgggtaaagacatcgattatgtgctggtagagcctgttgagggcgcttttgctggtaagaagatgtattttgctaaggatttggtagctaacttcgccaaggaactgggcgaagactacaaggttgtgaaggaacttaaaggttcggagcttgtgggtcgccgctattatcctgcttttgattacttcttggatggttccttaactgatcctgaaggtaaagctaacgaagatgaaaatgcctttactatttatgctgctgattacgtggcaacaacagaaggtaccggtttagttcatcaggctgtgtatggtgaggacgatattaatacattgaacgctcaccgtgtgcgcacatacgattacttggatgagcacgctcagttcttggatgttattcctgattacgcaggtctgcaggtgttcgaagcgaacaagccaattacccgcgatttgcgtgctggctctggtccgcttgagcgcgtgccagaagagcgtcgtgcttttattgttcaggaaaagtcacacgttcacagctatcctcactgctggcgttgcggtaatcctttgatttacaagcctgtatcgtcttggttcgtttctgtgaccaagattaaagagcgtctgctcgaactcaatcaggatgttaactggatcccggataacgtgaaagacggtcagttcggtaagtggcttgaaaacgctcgtgactggtctatttcgcgtaaccgctactggggaagcccaattcctgtgtgggtttctgacgatccgaagtatcctcatgtagatgtttatggttctttggaagaacttaagcgtgactttggtaagtatccaactgatgacgagggcaatattaacttgcatcgtccgtggattgatgagctgacccgtccaaaccctgcagatccaaccggtaagtcgcacatgcgccgtattgaggacgtgctggactgctggttcgaatcgggttccatgccattcgcacagttccactatcctttcgaaaacaaggattacttcgaagaacacatgccatccgacttcgtagtggagtatattggtcagacccgcggctggttctacgtaatgctcattatgaacggcgctttgttcgataaggctccgtttaagaacgtgatgtgccacggtattgtgctcggcgacgacggtcagaagatgtcgaagcatttgcgcaactacccagacgtgaacggcgtatttaacaagtatggttcggacgcgatgcgctggtttcttatgagctcgccaattttgcgcggcggaaaccttattgttactgcagacggcattcgcgatactgttcgtcaaattatgttgcctttgtggtccacgtactacttctttagcttgtacgcgaacgctgcgaacggcggtaacggtttcgacgcgcgtacgctgcgcgcagacgaggtacacgatctgcctcatatggatcgctacctgctggctcgcacgcgcaccctcgttgagcgcacgcagaagcacttgcaggagtatgcggtagcagatgcctgcacagacgttgctgattatattgacgttctgaccaactggtacgtgcgcaacactcgcgatcgcttctggaacgaagacgagaacgcgtttaacacgctgtacaccgctttggaagttttggctcgcgtgatggctccgctggctccaatggaagccgaaaccgtatggcgcggcctgaccggtggcgaatctgtacacttggcagactggccattcctcgtggacgaagaaagcgaaaagtctactgagctgggcgacgtgctcaaggctgacgacgctctcgtacgcactatggataaggtgcgcgaagttgtgtccagcacgctcagcctgcgcaaggctcagaagattcgcgtgcgccagccactggcacaactgaccgttgtggccgacaatgtggacgctgttcgcgaatacgaagagttgctcgagtctgagctgaacgtaaagcagattcagtacacgacgctcgaaaacgctggcgaccacggtttgcgtgtagtaaacgagttgcgcgtaaatgctcgcgccgcaggccctcgcttgggcaagaacgttcagtttgcgattcgcgcttccaagtccggcgcttggcacgtagacgaaaacggaacgccagtagttgatgccgaaggtattgacgacggtatcgctctcgttgaaggcgagtatgagctgatttcgcgcgtagaagccgcagaaggtagcgcagatgaatctagcagcgtatctgcagcactgccaaccggcggtttcgttctgctcgacactgcattaaccgatgatttgcttgctgaaggttacgctcgcgacgccatccgcgccgttcaggacgctcgaaaggcagcagacctcgatattgcagatcgcattagtctgacgttgaccgcgccagcagacgatgcagcaaagctcaagcagttcgaagagctgatttccacagaaactctcgccaccagcttctccgtgaacacgacagatgttgatgagctccaggtgaaggtggagaaggcttaggatttaggtctggtatccgaataaagcaagtcccgcgctcgctgttctttctcggtttttgtttttggctgggagaggggaacggcgcgaggctttgttttttagaagaatatattcgagaatcgcggattacgcatcttcgaaaaacgtgatacactaaaagagctaattcacagtaagggcggacttgttagccgccttgaatgctaagcaggaaactgcaggggaggcttcgcctccccgttttttattcacggttggttgcatacagctgtacgctcgtcggtgcgtatgagtagctgaaaaaaccggtatcttgaatttctgttgggtcgaaccatacagtaaaacgcagtccatccttatctaatgaatgcgatgaatacaaatcgtggtttcgtgggtctgggaatttgtctactaagcaagaataatcgctgagtccatcttgagtatcacggaatgttattccgtctgtttcatgaacaaattctgatggagatccaaaaggatattggaatttaaagtatattgaattgccatcgtaatgattggatttaatgttgcaagtttttattatttaatgcaagcgatcacgtggcgtcatgaagaaacgatagcaggatatataaagtaacctgcgactaggagtacaattacaatccatgcactaactgctatttttcaccagcgcttaacaaaaggctcgaattgctgactggtaaacggtgttttgttgaggactggcggcggaggaagaggaataaagcgtgtttcgggttttggagtagtgctctcattaactgaatttgtcattttcttctctctattgtgaagttgtgatactagtcagtaaaacagtcaaaatgcaggtcggcgtggaagtcgcgtgttaaaaatttgtttaacttgcatcatgtggcatttgtatgatgtactattttcatggcactaaaaagaatatatagaattggcattgatgttggtctgtactcaacgggcctttctgctgtcgaagttgacagcaatggtacacctatccgcatccttaacatgcaaagtgttattcatgacggtggtgtggatccgaactcaaataaaactgcggacacgcgcaagatgatttcgggagttgcacgtcgaactcgtagaatgcgtcgccgtcgcaagtctcgcttagctaatctcgataagtatctggaaagcttaggcttcccaattacgaattatggagatgacactttcgaaccatggatgcttcgagctcgcttagcagacgggtacattccagatgaagagcagcgcaaatacatgctttccgttgcgttccgccatattgctaggcaccgtggatggcgtaacccatacaaatccgtaaaatcgctttatagcgttagtttggacgatttatcagaacgttacgatgatttatgcgatgcatgtcaagtaaatcctgaggatggattaacgcctgctcaaataatcggagattacgtagccagtaaagatggtcaggttgctcctcgtatacggcatagtggcagtaaagcggaagcatttgcacctttacctcagaagttaatgcaagaagataatgcctatgaagtgcgttatatttgcgaacaacaaggaattgatgagacaacgcgtagaaaactcatcgacaagattttctatgcagtgtccccacgaggttctgcaagtgaacgcgtagctttagatgatttaactcatgaaaaacgagcgacaaaagcatcgttagcatttcagaagttccgtattgttgcggctttgtcgttcttacgtattgcgattgatggtacagaacgtcctttaactatcgaagagaagaatattgctttcgatattttgactagtatggaatcaaagagtcgtccaacatggacagatgtggcagatgctttaggagtaaatcgccgcgatattaagggcattggtggtattcaagacgacggcgatagaatctctaatcgtgcgcctgttatggacagctattttgctttggctgaatctgctggggctcttggaaaactggtgaagcaagttattatgccatggtggcgcgatgcttctgataatgaccgtgaacgtttactcgagttgcttgggaatacaattgatattgattctatccgtgatgatatttcatacagcaatgcattcgaattgattgattcgtttgatgatgatcagcttggagcaatagataatataaagcttcctgctggtcgagctgcgtactcaatacgagcatgtcaagaattaaccgatagaatgctcagcacctccgacaatctccatgatgctcgtaaggcggtttatggtgttactgacaattggaagcctgctcaagaatctatcggagcgccaattggtaacccatctgccgatagagttcttaagattgtaaatcgctatttgatgaactgcactgcacgatggggcacacctgtcggtgtaaacattgagcatgcgcgagaaggattctcatcagctaaagttgctcgagcttatcagaaagatgcagaagcttatgcaacgaatcgcagtgcaatcttcgacaagattaaagatttgtatccagacttcaaccgctttagtgattctgctatgaagcgatgggaagcaatccagcgacagaatggcgaatgtttatattgcggggcaacgttaaagtttacaacgtgcgaactcgatcatatcgttccgcgcaagggtgttggtgctactaacacaaaaaccaatctagctgcggtgtgcactgactgtaaccgtgcaaagtctaaaaagttgttcagcttgtggtgtcatgatgattatgctgtgtcacgaggaattacagtagcgaatgctgttgcacgtgtggaaatgtttaatttcccagccggtacactcaacgctgcgaatgctaagcgttttaagcaagctgtaatatctcgtcttactcaggtaacggaagatgaagcacctgataaccgttcgatggaatcggtatcttggatggcagatgagcttcataagcgtatcgattggtattacaattcgcaacgatacattgccaccgaagatgttccagaacgctctgtgaaggtattcgtctactccggattgtctacttcgctggctcgacgattctctggtattgaaaaacgaattcattttgctggtccagaaggcaaaactcgtttagaccgccgtcatcatgctgttgatgctgcagttattgctcttatgcagcataatgttgctgaagtgctcgtggataaaaatgagttacgaaaagcacaactctacagtcaaaaagatgatggtactgattggagagaatatagtggcaaagatgatgatcagcgtttcctttacggacgttggttggggaacatgcaggctctccttgacttacttaacgaagagcttgacgatgatcgagttcagatattgaggaatctgcgtcttgaattagggaactcgagagctcatgaggacactatccataagctgtcgcgcgtacgattgggagataagctcgatgcttctcttattcaacgcgcatcaactcctgccttgtatactgcattaacacgttgtgatgattttgatgagaaaacagggttgcctgagaatcgtgagcgtcacattgtggttaatggagttcattatgggcctgaagatgaaaccttgttcttcgagaagaatgcagctcagattatggttcataatggatcagctgagattggtgatggattccatcatgctcgcatctatgtctgcgataaagtgaacaaagcagggaagaagacaggtgaattctatggaatgatccgtgttttcgctgctgatttagctaaatctcgaagcgaagatttgctgaatgtaacactctctgattcatctttgagtatgcgatacggtgatccgagaactgttaaagctatacgtgaaggccgtgcgcgatttgttgggcatctgtttgttggagatgagcttcgacttgacttgagccaaacaggctacacgggtcaagtgaaagagtttgccgacttcttgcaaccttggtgcagtacgaaactatatgctacctggacagtcgaaggatatttttctccatctcagttgaggttacgaccaagctatctttcagcggaaggattagaaaagcttgatatgcctatttccgaggatgttcagaaaattttcaccagaggatggttgccatctgtaaatgctgtttcggcgttcttcccatcggttattcgccgtaatggtctaggagaaattcgatggaagtcgaatgctggattaccagtgtcgtacaggtggcatgaataagtgaggtaatcatgaatagtgcgtggcgcgtggttgactgtacgaaccttcatggttcactaacctatgatcgtggcagattagtcgtacgagatagggataaagacatgtcaaccgacgtgccactcacggatatagcagccttgctgattggactacgatgtaattgttcagcaggattgctacaccaatgcgccgtctatggcgtatcggttatgacttgtgattggagaggtgtaccaatctctgcaatgcattcgtgggcagaaaccaacactcgcgttaatgcccgttttagaggacaagtttcccaaacgttacctcgacagaaaaatatgtggggaaagattgttcaatctaaaataatgggacaagctgcagttctcgatcaaagaggaattgagggtggcggaaatcttagaggactagctaaacaagttaggtctggagatttaaccaatattgagggtagggcagcacgcgaatattggcaatgtcttttcaagacggatcgagattttcataggcttcctggagatggtagaggaaggaatgctcttcttgattactcgtatatgattttgcgaggattcactataaaagccgtgatttctgctggtctatgtccttgcttaggaattcatcatcacaatggcagtaactactactgtctagctgatgatttaatcgaagtgtttagaccagctgttgatgtgaaagttgctgaactcagcgaatcagattctcttgtagatagggaaacaaagcagtttcttattcaaagtattaacagacaattcaatggagaaggtttaactataccgagcaagataaatgattttgctcaacagtacgccctctacgtcgaggacaaagttcaacaaattgctattccgcaatacgttaaggattaaccatgaaagtcgatgaggacagtggtggaatgtggtgcttggtaatgtttgatcttcccgttaaaacaaaaaggcaaagacataatgcagttgtattcagagatttattgctggatatgggatattgcatgatccagttttctgtttacgcaagatataccccaacagcagaaggaaatcgttccacagttcggacaattaaggagaatctgcctcctcaaggcaaaattcgtgtcttacatatctcagataaacagtggtcaaaatcgctcagatatgtcaatttagagcaggaagatgacggagaaactccggatactttggtgcttttttaatcgcgaaaagccttgaaaaggctggaatctaacccctcgatcggattgctccattttatcaagaggttagaacgctaattcacagcccaatgaaacaaacagtgtcaccgtaagccattttatcaagaggttagaacgctaattcacagctctcctccctcttattctcgctatcattccattttatcaagaggttagaacgctaattcacagctaccttttaatctccctttttgtacctttccattttatcaagaggttagaacgctaattcacagctctgcaccgggcaatcgtaggcggtctgccattttatcaagaggttagaacgctaattcacagcgataatcctgtaggattttaagcgcgtaccattttatcaagaggttagaacgctaattcacagctatataaggcaattatcttagcggtatcccattttatcaagaggttagaacgctaattcacagccgtggcgccggtgatgccttgtgcaaggccattttatcaagaggttagaacgctaattcacagcaggcgttaggtgttaagcctgaagagttccattttatcaagaggttagaacgctaattcacagccaaaaagagagactgagctttacgatacccattttatcaagaggttagaacgctaattcacagcggcgaaatgtgcgcgctattatctcaatccattttatcaagaggttagaacgctaattcacagtaaatcttgcatgccgagtggaacttgtgctaatcagtcaaagtagatggttgctaattcacagctaagaatggtgtaattctagacaacgtgaattgtatcggaggttgagagatttttcgatcctgagtaggtattgttctaaatgaaattcgtttgttgtcatcatgtttttgggtgcatcaatcattttggtaagcgaggtcttatagctatcggagatagcccacaccccttaaccgattaacccccatatttcccaacgctcccacacaatcaaaaaatctcgaaaatatcgttaaatttttctcctttttcagcgtgttgcacttatatagagcacccggttcgcgttaaagtagtgtacgcgcgaaaacacgaaaagagagtgcaaacagcacgacgataatcaacgtacagcacagaagacaggccaaggcggagagcgtgtacgaaacgcgagaggggagcggcgagagcgaatcagcgccgcaacgcgaaacaagaaaaagcaaaaataaagaaaacaaaacctcaacaaaccgaggtaatgctgcgcgaccagaaaactaaaacgcgcaaacacaacaaaaccaaaaccacatagagacacaacaaacacacgacgaacagagagagcactgattgccttatgtcacagttgacgagcagcaataagtatggaaagtccatcttccaacgcattttcggtggttacggagaacttctcacaatcccaggcactgcacgctatgctattggcgctgttgttgcctcaatgccatttcctatggtgggtatgtgcatcactatttccgtgcagcgtatttacggcagctacacgctggccggcacgttaagcgcggttcaagctatttctttggccatccttacaccaattttcggtcgccttgtcgatcgttttgggcaaacgaaggtatctattccaatcgttgccgtgtggatgatagctgcaacggtgctgattacaagcattgaactacacgtacctcaatggctgctgtactgcctcgtgccttttatggcgtgtattccgccgtggggtgctatgagccgttcgcgctggacgtatctgcttaagaacaaagagaacagctcagaaaaaattgaccgagctatgggcttttcttccattttggatgaagccatgtggatgattggcaatccgctctcatccatcctcgccgtcgcttctggtgtcttgtcgttctctgctaccggtattttcgtgctggttggcgctatcatgtttctgtctgtacgctcagccgagccgccaaatcaaacggatttagcgcgcgaagcaggtataactcgtaaagagttccgtctgcaggaagcgcaacgggtagcggcagccagcggtcagaaagtagcaggaaagaaagcgtccatcttttcctttggttttattgctatctgcatcacatggtttggtctaggcgctttccaaagcgcgtcaggtatttctatcttggcttttgctaaagaacagaacgtgcaaagcctgaccggttttatctttgcttgcttctcgtttagctcgctggtaggcgctacgttgtacggcgcgaagtcatggattatcccgctgtggaaacgcttctacttctgtattgttgtggtggcgcttggcttgagctcgtttatttttgtgaagagcatttgggtggtgatgattatttacttgcttattggcgtgtgccagtcaccaacgtggattaatggtaaccagattgtgctccacctcgttccgcctgcacgctttaccgaagcagtgggaattatgggtgcgatgaactcgattggcggttctattggtaattctatttccggctattttattgatcagtacggtgctcacggcggcttcgttactgtagcaattttggcgcttattgcgatggttattgctttcgcaggcgtaaaacagattaaagacgctacgctcaaaccaatgctgacgaatattgacgtgtaaaacagaagggctgggatttctcccagccctttgcattagacgagcaaagcgataataataaaaatcaaacttagcagcggaagagttccttgtttggctgatgcttgagcatacgagctgtctttgagtactaaaccgagagcagcgcacaacatagaagcagttcccgcaatcattaaagcagaaccaacagcagtgtatccgcacacggttaacgcaataccaacaaaagtttccgcagctaagaaaccgttatacagaccctgattgtatgcgaagaaagtaaaagggcgagcttcctcagcagtgccaccgaaagttttgcgcgctaatggttcctcccaagcaaacatttccatgtaggcgatgagcacgtgcaataagccagcaagagcagcaaaaattaaaccaataatcaataaaatattcataacattttattatacgggcgctagttgcgtggctaagaacgcgcgataaaaaatggctataagcgagcagagcgtttttactgttttacgctgtttcgggcggtttcggcttgatactttggatacatgacatattttcaatactcaactcgttcacggtcaggcggtgggcaataactcaacgcgcgctgtaaatccaccaatctacaattcttcgactttcgctttcgaaacagttagcgaatatccgcgctgggattacgcgcgttcgggcaatcctacacgtgaagctgtgggaaagcaggtggcgttgctggagcacggcagtgctggttttgctttctcttcgggattggcggcgattcacgcggcgttctccatttttgaaccgggagatcatattattacaggcgacaacatctatggtggtacgtattcgattattcatgagtattttgaacactggggattaagcttttccgaggcagataccacccgtgaggaagcgttggagcaggcttttgacgcggctttctcgcagggcaagcgcgtgagggctgtgtattttgaggtgctcacgaatccgctgcttaaaatgtctgacgtaacagttgttgctcgtgtagcgcatgcgcatggggcgctggttattattgacaatacttttgtgacaccgctgggtcagcagcctttggatttgggagcggatattgtgctgcattctgctaccaagtatttgtctggtcattccgatgtgactgctggggtagcggtgacgaagagttctgagctcgccgagaaactctactttgctttgaaccgtgtgggcggagcgttgtctcctcaggactcgaatttgctacgtcgagggattcaaacactggcgttgcgcattaaaatagacgccgcgcgctagcttagaagtatgaccgatattgctttaaaacgcgcttacgctcctgctactcctgagattgatggctaccgtattttggtagatcgtctctggccgcgtggcgtttcgaaaactaaagcgcagctggatgaatggttaaaagatatagctccttcacctcagctgcgcacatggtggaatcatgaccgcgctcgctacagtgaattcgcagctcggtatcgtgcagaactcgacaataatcctgctgttgagcgcttgctcacacttatgcacgagcacgctgattcgcgcattactcttgtttttggcgcaaaagaccttgtgattaatcatgcccacgtactgcgcaactatctgattgagcagaccacaccgcgcgaaaacacggtgcttaactcacaaggttttactattgctacaattcctaccagaccaaaacattcaggcaacgcacaacataaaaagccaaatttagacggtttagaatacagcactctagagctaaaagatgcacaggctttgcaatgggttgaagcgcttacctttgaagatacctttttgctcacgtctacgccgcgcgataacgatgactatattgcgcagacgtatactcttgagaacacgcagagcgagctagctgacaaccatagcgtacacactgcgcttatcgatacagccagcggtgaaatagctgcttttatgaagctgaatcgtccaggcgcttttagcgagagcaacccgaagattccgcaagacagtattgaagttcagcgtttatacgtaatgcctcgtttcaaacgtcgcggtttaggaagtttccttatgagcaaagctgttgattttgctcgcgaagagaaagttgattggctgtggctaggcgtatggcaatacaatttcgctgcccaagaattctataaaaattggggatacgagcgctttagcgagcatatttttgctgtaggagaggatgaacaggtagattttctgctcaagaaaaaattacagtgaccaaaaataattcgataactccatcatgcgcggatcatccgatgagttgagcaggataatagtaccttcattattattgcttgccagctcatcgcgctcagccaacacatcgcgaacatgccgtgctgtgccctcattgccatccacaatgcgcacatgctggggcacaagagcgcggaaataatcgcggtaatacgtaaaatgtgtgcaaccaagcacaatagaattaacgctgtctaatggataagcatcgagatagtggtgaagcgtagcatttacgcgatcagcatcttcaaaataaccgttttcaataatatctaccagctcagggcaaggctgtttttcaatagtatgcgtctgagcaaaacgctccattaacgcagcaaatttcttctcacgcagagtaagttctgttgcagtaacaattacgtgctgaggctgaccagcccctaaatcacatgctaatttaagagctggttccatgccgataataggaatggaataggatgaacgcattaattcagcagcagcacttgtagccgtattacacgcaataacaatggcttttgcgccttgttctataagcgtattagccacattcatacttagtttttgcacatcttcagtcgaacgcacaccatacggggcatgtgcagaatcaccgtagaaaataatgttttcgtgggggagcagagcgtgaatttctttagccacagaaataccgcctaaacctgaatcgaaaataccaataggagcattactcgtcatacgaacctgccaaaaattccacaatcttctgtgcttttcccacaccgtcattgtacatatcgagcagtccttgacgtgttttgctcaacgtatctaaaccatacgtatcatcagggcatacaataagaagccgaccttcagcagcatactgacgagccacagtcatctcatcattatacactttcgcgcggttgcgtaaagcctgcgcagcttgcggatacgagcgttgtagaacgcgcgcaggagccgcatctttatgaggatcgcgcacaaaatcatcaggatgagtggtaatcaaaacaacacggtcgcaaccatcgtcaaaagctctctgcacaggaatcggatcagtaataccgccgtcataaaagggaacgttatcaatctgcataggcttgttagcaacgggcacgcaggaagatgccataataatggaataatcatcctgatgcatatgctctttactaaaatattccggctgaccagtaagcgcattacttgctaccacggtaaactcggcagggttagcagcaaaagcctcgtaattgagcggatattcgccatcgctattcgacagcgtgccgtaagcataatctaaaccaacaaaattgcgggtcgtgagcagattgcgcatcgaagcgtaacgatgacggaaagcatactccatatagaagcgatagttgcgcttatactgacctgctaaaaacgaggtgagatttccactgccagcagaaataccgtaacagcgatcaaactgctgttcagctttgagcagaccatcgagcacgcctgctccaaaaatatcgcggtaaccgccgcctacatcaataattcccgtaaccataatcttttagtttagtccctcgtatgacgtgcgtagagctcgtagcataactcgcgcaaaactgcggtagcgagcagagcttcataattttcttgacacattgcccgctaatatagtgagtatgacttttcctcgcacagttcttaaagcacatggcacaggcaatgatttcgttatttggttcgatgagcacggcgaatacgagccgacccctgaagaagtacgttctcttgacgaccgccattttgggttgggtggagatggcattatccgtttaactcctcctgaacatgtgtctgatgtgagcgctgagcaggctcaggcttttcacgatgcaggagcacattggtttatggactaccgtaatgcagatggttcgttagcagagatgtgtggtaatggtgctcgcgtaactgcagcgcttgctatgcatgttggattgactcaggcgagtgaagatgagccttttgctttggctacccgtgcagggattaaatatattactttcttaggagctgtggatggtttgggtacgcatgtgttccgtattgatatggggccgtggcgtatgggcatgcgtgaggaatatatggtgaaggttcccgccaataatgcacaggggatgggaactttcgtggatatgggaaatcctcatgtggtaacggttgtggggcagcagcttgatttaactacgctgtctgtgggaatgccgttatctattcctgtgcagaccatgccggatgtgtctgagcttgatttaacaattactccgcgagttgaacctgaattgcctgctggtcaaaatgctgagtttgtgcgtattgatgatgtgaatgcacaagaaaatgctggtctggcaaccatgcgagttaatgagcggggagcaggagaaacgctttcttgcggtactggtctgtgtgcaactggagtagtgctcagcgagcgtacaggagtgaacaactggcgtattagcgttccgggaggaactttacttattgaagttgaagttgagcgtgtgttactcaccggtgatgctgtgctggttggacaggtggaactgtttaacgcgtagtaagagcagcgctggtagcaatcatgctttcaacctgctcatcgggaacagttccatctaaaatcacagaaatccaatgcgttttattcatatgataagcaggagcaaaacctggctgtgattggaagaaatcaacatcaaaaggtgacgccttgagattgagcacatcaatcatgttctcgctatcactaatgcccaaggtatgctctgaaagagtcatagctaagccaaaccatgtttttgtatcagtgtgacgaataaccgcaaaactcgggtgtgaagcccacggataatcaacgatgcagtcataataactgcgcacaaaatcaagtactgcgcgtgacgaggtaaaacgagccatcatcttatcccaacaaagcagcgccatacttgacgaaaataatgcctacgaaaagcgcgaaaataagcagatcaacaagcaaatcaatattcagatgataatacatgtgcacagccttattcttgcgaggtatctcttgaacagcaaaagttgcatgcgaagctgccataaactgcagcaagcttgaagctagcagacctaagcaccatgggcataatgcctgaataacaaacacagactgggtaaacagccatacagcgtagagaacagctaacagatttcccgcccatgcagccacagcaaaccagcgagggaaagtgatgcgagctaagcccataactgccacggtaacgaagaccgattcggcagcaataccaaagaaggcgttcggaaagctcaaagctccaacgcgaataaactctgattgccaggaattagcaacagttgaacaagagataactgaattaacatcgcaggctaaagcagcgccgggatgacgtgccaattgcagtgtttccgcgctcagcacgaaggaaacaaggagagctgaagctgaagcgataagcatgaccagatatgtccacgatgtggtatgacgccaaccagtgagtttcatattatgc

SEQ ID NO: 3140 - DNA, 23402 bp, synthetic construct
  misc_feature 1..23402: note = Synthetic
  source 1..23402: mol_type = other DNA
gagaagacgttaacaagctcaaggacttgaatgcgttcaacgagggcttcctcacaacccctgctcagcaaggtgcaagttcttcagctggtttgattgctaatcatatggccgcaatggagttaatgggcggatgggatcctggcgttatccgagatcttactcctgataagaaagatttagctgatttgggattctttgctttccctcagttagatggtcaaaagggtaatccgaaagctattatggggggaaccgatgcgatggctgtgggggagtctgctccagacgaagctgttgacttccttaactttattgctcaaaaagagtatcaagaaaaatatgctcaagcattctctaccatacctgccgcacaatatgctcaagatattgtcgaaaatcctgccttgctagaagtgctacctgtatataaggaatcaagctctgtatcgctgtggcttgacacagtcctaggtcaaaacgttggaaacgctttgaacgaaggcgtagttaatcttcttgcagataaaggaacagctcaagatattctcaagagcgtccaatctgctgcacaaaagggataaaagttacagccatcacaatcctaaggtgtagaacgttcgataagagcggactatgcacagtttttacacggtgagggtgaggcaagttattgctgagctccccctcacctaggtacacatacaatcgtcacttacagtcaggggagacatattatgagtgtgagtgcatctttagcggcgcagtcccgcgttaaaaagagcgatacggtcaggaaaaatatagaaattgcagtgctgtctgctccagcacttctcatgtttcttggctttgttattttgcctgtttttatggcagcatattacggttttttcaagtggaaaggttatggcaagccagaagttaacggacagtttgttggtttgcataattacgcagttattctttcggatactaactttcaagaagcctttatacacactatgtgtgtggttgttgcttctcttattattcaagctccactggccattctattcgctttgctactcaatcaaaagtttaagggacgagccattattcgcacacttattttcgtgccatatgtggtgtctgaagttattgtgggcacgggctggtctcttatgctgcaaacaactggagcagttaatgcagttctgaaaagctggggtattccgggagctgattggatttcagatccaaaagttgctttctggacgctgatggttattatcacgtggaaatatattggttttgctgtcattttgatgattgcaggcatgcagtctatcccagaagatctgtatgaagcagcacgcgttgatggcgcgggtttctggcagcagcaatggagtatcactcttcctctgcttgctcctacaattcgtatttgggcatttatgtccattatcggttctttgcaattattcgacttggtctacattatttggggacaatacgtttcatctactgctggaacatccacaatggcaacctacatggttcgtgaaggccgcttagcaaataactatggttatggctcggctgtagccgtgctcatcttcctaatttctctggttatcgccttaacgtatcaacatttcgctcttaatcgagatttagaaggggcaataacaaccaaacgctcgcgcgcacaaagcaaagctgcacacaaaaaagtagatagggctcgtaattctgagaagaaagcgatggtggtctaaatgagtgcacgtccacagaccttagcaatgcaaggcatccgtaaatcgcacaaaactccgtggggtcacccggttgtctatctgctttcggtaattcttgttctcatctgcattgttcccgttatctacattattattggcggttttagaacgaattcgcagattacaagatatcctgcgggcttacctaagccgtggaacttcgagaactataaaaacgttttcgcatcgaatatcttctggaccgaattagtgaattctcttattgttggcgttgctaccatggtgggaattgttctactcagtcttatggttagctttgtgcttgcccgttatgagttccgcgctcgcaattttatgtattcgttgtttgcagcaggtatgatgttcccgattaccgtagctattacgcctttgtatttactcttaaagaatttgcatttagtgaattctcacttgggaattattctgcctcaaattgcttttggtcttcctcaagccattattattatggtgccatttttgaagtcaattccaacagagctagaagaagcagcaatgattgacggttcttctcgattgggattcttctttagaatggtgttgccattaagctggccgggtgttgctactgtgggaattctcgcatttgtagctagttggaatgcgtatatgcttcctttgttcttactcaatgattccagtaaatataccttgcctcttggtgtgcaaatgtttagttcgcagcattcagttgatactgctcaggttcttgcttttacggctttgagcatgattccagcacttatatgctttacgattttccaaaagaagattgtgggtggcctggctggggcggtcaagggctaagaattacgaacatgttcgggagaatgttgtctccctgcattctcccgaacgcttgaaaacagtacttactaatacttaacttttatatccccgcagatctacggcagatagaacaggatatgacgatgaaaatcaataacccagtattgcgtggatttcacgctgatccttctattattcgtgtagaagatacctattatattgccaactcaacattcgaatggtttccaggtgttcgtttgcacgaatcgaaagatttagtgcattggaatcttctgcctagcccactaacgagaacttcgcagattgatatgcgctcaatcccttcatctggaggagtgtgggcgcctgatttgagttatgcagacggtcgtttttggcttatttactccaatgtgcatattgttgaaggcgcatttaaagatgtagctaattaccttatgactgctgaagatattagagggccatggtctgaacctatccgcttaaatggtgttggttttgacccgtcgcttttccatgatgacgatgggcgcaaataccttgtgcagcaaacatgggatttccgcgaatatcgtcattctttcgatggtattacactcaccgagtttgatcatgaacgtatgcgtttacttcctgataccgaacgaaccttatggcagggcacagaaacaaaattggtagaaggtccacatctgtataaaaaagatggcgattactatctgttcgcggctgagggtggaacaatgtatacacaccgcgaatctgtggcgcgttctcgtactttagatgcactgagttttgaatctatgcctcataacccattgatttctaacttcgattcgccaacttcctatctccaaaagcaaggacatggtgctttggtcgataccccgtcaggcgaatggtattacgcctccttatgcgctcgtccatggcatcacaccatagaatcggcttatgatccgcgtggctggtgcactttagggcgtgaaacatctattcaaaaactgcagtgggatgatgatggctggccatatattgtgggtgggcaggcaggctgcacaagcgttgatgctccccgagatgctgtgttgaatgatgatgactgcgctaatgagcagaacaataatcagcatgatgattttgaagacaatcaacttcacggtgattggaatactcttcgagttccgtttagtgatgaaatggggtgcgtaggagatggagttttaactcttaacggtcaaggatcgctcagcaatcttcgcgagctatcactagtagcaagacgttggcaagcttttaacttcgatgcaagtgtggcaatagaattttctccaacccgctaccgtgagatggcaggtttaacgaattactacaacgacttatgctggtcatgggcatttattacgtgggatgagaaaagacaatgtcgagttattgaagttgctcaaaacgatttcaatacctacacgagctttcttcaagataatgccattgttgttcctgaggatgttgaacgagtgtggttacgcacgcgcgtgcgcacgcaatactacacatatgagtactcctttaatggtgtagattggcacaatattcctgtgcaattagatgctaaaatcctctccgatgattacgtgaaccagcgttatggaggcttctttacaggagcttttgtggggttagcgtgtgttgatttagccggttacggtaaacaggcacgttttactcattttgattattgcgagttgcccgattaactcagtatgcgctgaacaatatgcataaaggtgttggagtatgcttcaacaccttttacgtattgtgcgctaaggttgaggtatgactcaactttcgcaatattacgtgcctggtttgcacgtagaagaccatgtagtgcaggttcctttgcattggaattgggctgccggagcagctcaaccagatgtttcaagtttcgcaggcgagcatattgacctgttttaccgcgtggttagttctgcacagaatgtgcatgctgacttacctttgttacttttccttcaaggcggtcctggcggcatgggacctcgccccatgagcgctcagtccattccatggttgtctgaagcagtaaaacatttccgcgtagtgcttattgatcagcgtggaactgggcgttcctcacgtgtcgattctagccttattcgtcgtcgtggtcagaatgctcgagaaactgcagatttcttaaagaacttcctagcggactccattattcgtgactgtgaatttttgcgcaccacagttttcaattccgcacagtgggtaactttggggcaaagctatggcggattcttaaccatggcatatgtgtccttgttccctgcgagtattgcagctagctttgttactggcggtattcctcacattcctatgaatgctcgtgaagtctatgagcatactgtgccacgtatgatggcgaaaataaaggaatactacggtttatatcctgacgatgaagccgttgttgggcgtattgcagactttttatcttccgaaaaggttcttctgcctaatggggatccagctagtgttcgacgcctgcaaatgttgggtggcgatttcggtatgaaaccaagtttcgaacgcatgcattggacggtcgatacggcttttaatggagagtatttaagcgatgggttcctcatggaattattcagctccactacatcgtatggcagcgaactatattgggttctccaagagtttatttatgcaaataaagagattgaaccaatcaactgggctgccaacgatgtgctccgttctactaaacagttcgatgaatcctctcgtcctcttatgttgattggtgaagctgcactgccagaaatttttgatgaagactctgctttacgtgcttttagaccagcaatggatgaactgatgagcgatacgcagtggggaactgtatatgatgaagaccagttagcgcgcaatgacatacctattcacgcagctgtgtatttcgacgatatgtatgtggactccggcttgcagcttgatactctctcccgtgtagggaactctcatgcttgggttaccaatgaatttgagcatgacggtgcacgtatgggggcagtcttcgagcatctttatacagaagcgctcagccgaggtcatctcgaaaaactattccttaaataatcaatcagaaagaaaagaatgacaacactaggttttattggcttcggcaatatggccacagctattgttgatggttggcgtcatgcaggcgttgcagctgacgcacagattattgcgtgcgcagcacattttgatactttaacatcaaaagcacagcagcgcggggtcgaggctgtacgcagtgccagcgaggtagcgcaacgcagcgatgttcttatcgtcgcagttaaaccgtatcaaatcgaaaatattttctctgaatttgttgcggacattgattggtcacacaaaatagtcatttctattgctgccggaaagttcaacgttttctggaacgaggtattgtctgccgaagcgcatcacatctctaccatcccgaacacgcctattgctattgctcaaggtgttgttgtagcagaagaaacgcatacgctcaccgaagcacagctcacaaccttccatgagcttttcgaaccaatctctacagtcgaatttgtagatacacagcatttatctgttgcaggaactgtggcagggtgtgctccagcatatgcagcaatgtttatggaagcattagctgatgcaggtgtaaaatacggtctgactcgtgctacggcataccgtttagctgctgcgatgaccgccggcacaggtgctctccaactggcaacaggtttagctccagcacaaatgaaagacgcagtatgctcaccaggaggaacaacgatccaaggcgtagctgctcttgaacaaacaggtttccgcggtagcattatcagtgcaatcgacgcagttgagggctctaggtaggattacacattatggcattgactattggtattgttggcttaccaaatgtgggtaagtccacgctttttaacgctttaacgcgtaataatgttttggcagaaaactatccttttgcaacaatcgagcctaatacaggcattgttcctctgccagatccacgtttggcagcattagctcctatcgtaaacacaactaaactcgttccagcaaccgttaccttcgtagatattgcaggtatcgttaagggtgcgtcaaaaggtgaaggtttaggtaatcagttcttagctaatattcgcgaagcagatgctatttgtgaggtaacgcgcgtatttagtgatgacgatattgtgcacgtcaacgggacagtgaatccaacagacgatattgaaacgattaatactgagctaattctcgctgatttacaaaccattgagaacgctattcctcgtttggaaaaggaactgcgcggtaagaagattacccctgcatatcttgacgaggtaaagaaagcgcaggctgtgcttgaagaaggtttgactatcgatcaggctgcaaaagccggaaaagttgacccagcagaaatccgcgaactccaactgctgacggctaaaccatttatttatgtgtttaacatggacgatgacgagcttcaagataatgctttgaaagctaagctttccgatatggttgctcctgcacagtccatcttcttgaacgctcagtttgaagctgatttaacggaactggacgaagcagatgctcgagaaatgcttgctgacgctggtttagaggaatctggtcttgatcagcttgctcgcgttggtttcgatacgctcggtttgcaaacctatttgactgccggcgaaaaagaagtacgtgcatggactattcataaaggatggactgcacctcaagccgcaggcgtgattcactctgatttcgagcgtggatttattaaagctgccattgtttctttcgaggatttggtagaagccggatcgtatgcaaaggtgaaagaagaaggcaaaatgcgtctcgaaggtaaagattatgttatgcgagatggggacgtggtcgaatttaaaagtgggcttgcgtccggagggaagaaatgatttgtgccgaatgtgggcagttagtcaagcctcatcagaggttctgcgggattgtggagttcgtttgactgacgtcgcagggcataatgtgactacaggaggtggggatgttcgcggggacatctaccaggctgggcgcgatgtggtagccaactttgcccctactaatcctcctaatgccacgtacgaggcagtaccgaagtggcgcagctcgttcacctagggagtcctttcatggttggtcttgtattgggactagccggaattctcccactctggaagataggacggtctgctcttaatctcctaagcgggagactcgatgtttcctgcaagcgcctgggcaaaactggtggatttgggtcttcatcgccgtatttgtgatgtttatcttagtcatggagctttgcagattgacgaagctccagttgaggcgaccactctttctgggatgggcgttgagtggtgtcgggcgttgtatcacgctggaaaagattcgggcaggagcttgccctcagtgcggtggaaatatgcgctactacaacaagccgaaagaatggatagactatgtcgatgcgaacgggaagaatcgacgcgaggcaacagagcatgttcccgctcttgagtgcaggcggaattccgagcactggtataaggttgatccagctgaggttcatgaggagtgaccaccgagacaaggtgccaggcgaggcgatgtcgcttgtgtatagagctgacgtctggcggaaagaagtagtaatcccgagagagcagtgacaaataatcctctaaatctggatgagtcagccgagtgggctggtctgtggtggttgccagaagagcctgacaaacgggttccgagcaccttgcggtatgacggtgagggtcatgttatgcttccgataatcggtgcattcgaggaccgcataacctccagtccagctcctagtctaaccctctaccacgagggcaccgggatgtgggatgtaatccacggtgtggccgaacaacgtgagattacgcttctgggttgtgttcccaccaaggggaagcgatccatattctcatgagtgaagagccccgacactcagactattacagctatgatagcaatcataggtgcacacatcagcggcgaagatgatgcggcgttcgcgacggccgaggtttcgattgaagacttgtggctctgggctgcatcgcctgtgttcgaggctttccttaacacttctaaaggtaaaattgacggtagctgggctctctcatcgaagccggtcgaggaacagttggtgacggtcgatggtacggagtatagccttgcgcacactcaaatcctgccattctttgctcagtgcaagagtggctcgtagtgccaaagcctagctcgtcagagatatagacgtcatgattctccacactaagtcgagcaatctcctgtacctgacttcggattggcatgtagtgacgcttccatcatcgctagcgagttctagttcaaaatctgatttatcggtcgattgagttgtgaaaaaattcgctagcaatccgaccggaggttactcatagattctcaggcacgacatcaaattcaaaatcaatgtgtagcctcgtatagactctttgaaacgataactagggtagcagtattgggattaattgcgcaaaagtgtgtatagcttcggcatagtcgtgccggtaagttgaggtgctttctcgatcatttgttgtggtgtaacttatgaggatttatatcgatagaccagcaaaacacgagtatatctaggcaattatagggcggacaaacatcttcacccatcggtgtatagattcatgctattttcaaaatatgcgcatttaatatcaaatattgttcgtttgtacaactgtgattatgcgttatagcctcacactaaattcaccacgagacacaccttgaaaaacaacggctaagacacaatttatacacactttttggcaattaaccccgtaaacttctacgggtaaacagcgttttcgttgtaaaacatgctcgtcaacaccgacgtgacgcaataatgtaacagtgtgatggttcacccatttccttgaattttgaatcgataaatacacgtgtatccaaccctagaaaaacaactactaccccccgtagcaactcatttttggtcaataatctgagaacagatatacgacataagttgttgtgattataaatgtaacttgctctatagagcatttttgtgatataccattcttatgacactaaataattataaaatcggaatcgatgtaggtctatactcaacaggtcttgcggctatcgaagtagatagcaatggagaacctgttcgtatccttaacatgcaaagtgttatacacgatggtggtgtagatcccaattcaaataaaacagcggatacgcgcaaaatgatttctggggttgctcgccgaactcgtagaatgcgtcgtcgtcgcaagtcacgcttagctaatctcaataagtatttagaagaattagggctcccgcttgagaattatggggatgatactttcgaaccatggatgctacgagcgcgtttggcagatggatatattcaagacgaagagcaacgcaaatacatgctttccgtcgcattccgacatattgctaggcatcgtggatggcgtaatccatataaatccgtgaaatcactgtataacgtcaatctagatgatttatccgaacgatatgatgatttatgtgaggcatgtcaagtcaatcctgaggatgggttgacgcctgctcaaatcattggcgattacctagctagtaaagatggtcaggttgctcctcgtattcgacatagcggtagtaaatctgaagcttttgctccattgcctcagaagctaatgcaggaagataatgcttacgaagttcgttatatttgcgaacaacagggggtagatgatgaaacctgcagaaaattaattgacaagattttctatgcagtgtccccacgtggttctgccagtgagcgtgtagctttggatgatttaacccatgaaaagcgagctacgaaagcatcattggcatttcaaaaattccgtattattgccgccttgtctttcttgaagcttgcggtaggtggtcaacaaagacctctaacggttgaagagaagaatactgcgttcgatattttatcaagtatggattcaaaaactcgtccaacgtgggctgacgtagcagctgctcttggggtgaatcgccgagatattaagggaatcggtggtattcaagacgatggagatagaatctccaatcgtgctccggttatggatagctattttgccttaattgaatcttctggtgttctcgggaagctcgtgaaacacgatattatgccatggtggcgtgatgcttctgaggatgatcaagaacgtttacttgagttacttggcaataatgttgatattgattctattcgtgatgatatgtcatacagcaatgcttttgaactcattgattcgttcgatgatgatcaacttggtgcgatagataatatcaaactacctgctggaagagcggcttactctgttagtgcatgtcaggcattaacagtgaggatgctcagtacaactgataatcttcatgatgctcgcaagactgtctatggagttactgacaattggaagccagctcaggaacctatcggatttccgattggtaatccttcagcggacagagtccttaaaattgtcaaccgttatttaatgaattgcactgcaagatggggaacgcctgtcagtgtaaatattgagcatgcacgtgagggattctcgtcagctaaagttgctcgagcgtatcagaaagacgcggaagcctatgcaactaaccgcagtgcaatcttcgataagattaaagatttgtacccggacttcaatcgctttagtgattctgctatgaaacgctgggaagcaatccaacggcaaaatggtggatgcctgtactgcggagcaacattaaagtttactacgtgtgagcttgatcatattgttccacgaaagggtgttggtgctacgaatacaaaaacaaacttagctgcagtctgtactgattgcaatcgagcaaaatcaaagaagctgtttagtttatggtgccatgaccaatatgcggtatcgaagggaattactgtagcgaaagctgtcgcgcgcgtggaaatgtttacttttcctgcgggcaccctcagtgctgcgaatgctaaacggtttaaggaagctgtgaaatcgaggcttactcaaatgactgaggacgaggcgcctgataaccgttctatgggatctgtctcttggatggcagatgagcttcataagcgtatcgattggtattacaactcgcaacgatatacagctacttcggatatcccggagcgagctgtaaaggtattcgtatactcaggtttgtctacatcgttggctcgacgattctccggtattgaaaagcagattcattttgctggtccgtctggaaaaactcgtttggatcgccgtcatcatgcggtcgatgctgctgttattgctctcatgcagcacaacgtagctgaagtgctggtggataaaaatgaattacacaaagcacaacgctacagccagaaagaggatggtgctgattggagggaatatagaggtaaggatgaagaacaacagttcctatacggtcgttggctggggaatatgcatgtccttcttgaccttatcaatgatgcacttgatgatgacagagtacagatattgaggaatttgcgtctagagttaggaaattctagagcgcatgaggatacgattcataaattgttacgtgtacgattaggggataagattgaggcttcacttgttcagcgcgcatcgactcctgctctatttaccgcgttgactcgttgcgacgattttgacgagaaaacaggacttcctgagaatcgtgaacgtcacattgtggtaaatggagtccactatggttctgaagatgaaatcgcgttcttcgaaaagaatgcagctcagattatggttcataatgggtcggctgagattggtgatggattccaccatgctcgtatctatctatgcgataaaatcaacaagtcaggaaagaagaccggagaattctatggaatgattcgcgtgtttgcagctgatttagctaagtctcgaaatgacgatttgctaactgtgccactttcggagtcctcattgagcatgagatacggagaccctagcaccgtcaaagcgattcgagaaggtcatgcacgatttgtggggcatttattcgttggagatgagcttcgacttgatttgagtcaaacggattacacaggtcaagtgcaggagtttgcgcaagtattagcgaatgtggctgaagctgaagtatatacaacctgggttgttgacggtttctgtgatccggcgaaactacgtttgcgtccttcatatgtctcgagcgaaggagtgaaaagttttgacgaagctgaacagtcgagattgttaaaagttattgataaaggatggcgaccagcgataaatgctctttccgcgtattatccaacagttgtccgtcgaaacggcctcggcgaaattcgatggaagtcgaatgctggattaccaatgtcttataggtggcatgaataaagtgaggtaatcatgaacagtgcgtggcgcgtagttgactgtacgaaccttcatggttctctcacctatgatcgtggcagattagttgtgcgagatagggataaagacacgtcaaccgacgtgccactcacagatatagcagtcttgctgattggattacgatgtaattgttcagcaggattgctacaccaatgtgctgtctatggtgtctctgttatgacctgtgattggagaggtgtcccaatctctgcgatgcattcttgggcagaaaccaacactcgtgttaatgctcgttttaggggacagatttctcaaacattgcctcgacagaaaaacatgtggggaaagattgttcaatctaaaattatgggtcaagctgccgtattagatcagcttggtatcgatggcggaggaaatttaagaggtctagctaaacaggttcgttcgggagatttgactaatatagaggggcgagcagcgagagaatattggcattgcttgttccaaacagatgcagattttcataggctcccaggggatgggagagggcgaaattcacaactagattattcctatatgattttacgcggttttactattaaggcggtgatatctgctggattgtgtccatgtttaggtattcaccaccataatggcagtaattattattgtttagctgatgacttgattgaagtatttagaccagctgtcgatgtaaaagtagctgaattaagcgaagaagattcactaattgaccgagaaacaaagcagtttcttattgaaagtgttaatagacagttcaatggagaaggtctaacaattccaagtaaaattaatgattttgcgcaacaatatgcactatatgttgaagataaaattcagcagattgcaattccacaatacgttaaggattaaccatgaaagttgatgaggacagtgggggaatgtggtgtttagtaatgtttgatctccctgttcaaacgaagcaacaaagacatgctgctgtagtatttagagatttattactcgatatgggttactgcatgattcagttttctgtctacgcaagatatacgccaacagctgaaggaaatcgttccacagttcggacaattaaggataatttgccaccgcaaggcaaaattcgagtcttacatattacagataagcagtggtcgaaatcgttacgatatgtgaatctagaagaagaaaatgatggtgaaacaccgaaaactttaatgcttttttaactgcgaaaagccttgaaaatgctggaatcatcccctttgattagattactctattttaccaaagaggatgaaagctaattcacagcagaaatcctaaatcaacaagatgagcgtctattttaccaaagaggatgaaagctaattcacagctcaatatactcatcattacggcttatccctattttaccaaagaggatgaaagctaattcacagcgatggaaggaagttacgttgctaaaaagctattttaccaaagaggatgaaagctaattcacagcagcgttatcgggtacgtgagtgtgggtcctattttaccaaagaggatgaaagctaattcacagcctacaaaacgggtagccttaaccatacgctattttaccaaagaggatgaaagctaattcacagcttgatttccagccattttacgacgtaatctattttaccaaagaggatgaaagctaattcacagccgcagtccttgagggttttacggtgagactattttaccaaagaggatgaaagctaattcacagcctcaaccccgtaataacttaagaaggtactattttaccaaagaggatgaaagctaattcacagcttcactccgcttgtgtgcgtattttacgctattttaccaaagaggatgaaagctaattcacagccagtaaagaaaatcgtccctacgattacctattttaccaaagaggatgaaagctaattcacagctccgcccaggtagattacgataaagctgctattttaccaaagaggatgaaagctaattcacagcttataagtgtgttactatataagtattgctattttaccaaagaggatgaaagctaattcacagctactgtttgcttcagcggtgataatcttctattttaccaaagaggatgaaagctaattcacagcagactcctacgagagctttaaggaggtgctattttaccaaagaggatgaaagctaattcacagcatagtcaaagtcataaaactgattacgtctattttaccaaagaggatgaaagctaattcacagcctttcttttgcggggcgcgcaaatcgccctattttaccaaagaggatgaaagctaattcacagcgtgagacgcttacgtatgataagatggactattttaccaaagaggatgaaagctaattcacagccttccatatcatttttatcactaagaaactattttaccaaagaggatgaaagctaattcacagcctctaaaggcaaggctaatatctaatggctattttaccaaagaggatgaaagctaattcacagcattttgtaaggattgggacgaggacggcctattttaccaaagaggatgaaagctaattcacagcaatagctgttcgaatagattgttaggtactattttaccaaagaggatgaaagctaattcacagcttacacacctgatgaaatgcacgatatgctattttaccaaagaggatgaaagctaattcacagcttacacacctgatgaaatgcacgatatgctattttaccaaagaggatgaaagctaattcacagcatcgcgttaataattgctggattagcatctattttaccaaagaggatgaaagctaattcacagccaatcatgggaacgtgtccagctatcgcctattttaccaaagaggatgaaagctaattcacagccttgcaggcgcgaagattatcgtgcaaactattttaccaaagaggatgaaagctaattcacagcggctggttggattacagctttccaatccctattttaccaaagaggatgaaagctaattcacagccctgaacgcctgttgtgcacttgcgtggctattttaccaaagaggatgaaagctaattcacagcccggcgttataaatctcataatttttaactattttaccaaagaggatgaaagctaattcacagcatcagctctaggcactactctcgtacctctattttaccaaagaggatgaaagctaattcacagcctgataccacgcggtcacctctattcagctattttaccaaagaggatgaaagctaattcacagcattactaaggagttaactttaggtaattctattttaccaaagaggatgaaagctaattcacagcagctgattacggcttggcgcgagcagacctattttaccaaagaggatgaaagctaattcacagcgctggattgccgcttttcagaccgcttgctattttaccaaagaggatgaaagctaattcacagccctatccgttggcgctttgatatgggagctattttaccaaagaggatgaaagctaattcacagccggttggaactgtgacgttttccgcttactattttaccaaagaggatgaaagctaattcacagctcacgctaaccttggtaagataacccgcctattttaccaaagaggatgaaagctaattcacagctcacgctaaccttggtaagataacccgcctattttaccaaagaggatgaaagctaattcacagctttacctattcgatgaaaaaaccgcagtctattttaccaaagaggatgaaagctaattcacagccagtcacgtaagactttgcgcgtggaaactattttaccaaagaggatgaaagctaattcacagcaagacttgggctaccaggtcacggttggttattttaccaaagaggatgaaagctaattcacagctgattatttaatttccgcttacgtcttcccattttatcaaaggatgtaagagctaattcacagcaagaatggtgtaatcctagacaacgtgaattgtatcagaggttgagagatttttcgatcctgagtaggtattgttctaaatgaaattcgtttgttgtcatcatgtttttgggtgcatcaatcattttggtaagcgaggtcttatagctatcggagatagcccacaccccttaaccgattaacccccatatttcccaacgctcccacacaatcaaaaaatctcgaaaatatcgttaaatttttctcctttttcagcgtgttgcacttatatagagcacccggttcgcgttaaagtagtgtacgcgcgaaaacacgaaaagagagtgcaaacagcacgacgataatcaacgtacagcacagaagacaggccaaggcggagagcgtgtacgaaacgcgagaggggagcggcgagagcgaatcagcgccgcaacgcgaaacaagaaaaagcaaaaataaagaaaacaaaacctcaacaaaccgaggtaatgctgcgcgaccagaaaactaaaacgcgcaaacacaacaaaaccaaaaccacatagagacacaacaaacacacgacgaacagagagagcactgattgccttatgtcacagttgacgagcagcaataagtatggaaagtccatcttccaacgcattttcagcggttacggagaacttctcacaatcccaggcactgcacgctatgctattggcgctgtcgttgcctcaatgccgtttcctatggtgggtatgtgcatcactatttccgtgcagcgtatttacggcagctacacgctggctggcacgttaagcgcggttcaagctatttctttggccattcttacaccaatttttggtcgccttgtcgatcgttttgggcaaacgaaggtatctattccaatcgttgccgtgtggatgatagctgcaacggtgctgattacaagcattgaactacacgtacctcaatggctgctgtactgcctcgtgccttttatggcgtgtattccgccgtggggtgctatgagccgttcgcgctggacgtatctgcttaagaacaaagagaacagctcagaaaaaattgaccgagctatgggcttttcttccattttggatgaagccatgtggatgattggcaatccgctctcatccatcctcgccgtcgcttctggtgtcttgtcgttctctgctaccggtattttcgtgctggttggcgctatcatgtttctgtctgtacgctcagccgagccgccaagtcaaacggatttagcgcgcgaagcaggtataactcgtaaagagtttcgtctgcaggaagcgcaacgggtagcggcagccagcggtcagaaagtagcaggaaagaaagcgtccatcttttcctttggttttattgctatctgcatcacatggtttggtttaggcgctttccaaagcgcgtcaggtatttctatcttggcttttgctaaagaacagaacgtgcaaagcctgaccggttttatctttgcttgcttctcgtttagctcgctggtaggcgctacgttgtacggcgcgaagtcatggattatcccgctgtggaaacgcttctacttctgtatcgttgtggtggcgcttggcttgagctcgtttatttttgtgaagagcatttgggtggtgatgattatttacttgcttattggcgtgtgccagtcaccaacgtggattaatggtaaccagattgtgctccacctcgttccgcctgcacgctttaccgaagcagtgggaattatgggtgcgatgaactcgattggcggttctattggtaattctatttccggctattttattgatcagtacggtgctcacggcggcttcgtcactgtagcaattttggcgcttattgcgatggttattgctttcgcaggcgtaaaacagattaaagacgctacgctcaaaccaatgctgacgaatattgacgtgtaaaacagaagggctgggatttctcccagccctttgcattagacgagcaaagcgataataataaaaatcaaacttagcagcggaagagttccttgtttggctgatgcttgagcatacgagctgtctttgagtactaaaccgagagcagcgcacaacatagaagcagttcccgcaatcattaaagcagaaccaacagcagtgtatccgcacacggttaacgcaataccaacaaaagtttccgcagctaagaaaccgttatacagaccctgattgtatgcgaagaaagtaaaagggcgagcttcctcagcagtgccaccgaaagttttgcgcgctaatggttcctcccaagcaaacatttccatgtaggcgatgagcacgtgcaataagccagcaagagcagcaaaaattaaaccaataatcaataaaatattcataacattttattatacgggcgctagttgcgtggctaagaacgcgcgataaaaaatggctataagcgagcagagcgtttttactgttttacgctgtttcgggcggtttcggcttgatactttggatacatgacatattttcaatactcaactcgttcacggtcaggcggtgggcaataactcaacgcacgctgtaaatccaccaatctacaattcttcgactttcgctttcgaaacagttagcgaatatccgcgctgggattacgcgcgttcgggcaatcctacacgtgaagctgtggaaaagcaggtggcgttgctggagcacggcagtgctggttttgctttctcttcgggattggcggcgattcacgcagcgttctccatttttgaaccgggagatcatattattacaggcgacaacatctatggtggtacgtattcgattattcatgagtattttgaacactggggattgagcttttccgaggcagataccacccgtgaggaagcgttggagcaggcttttgacgcggctttctcgcagggcaagcgcgtgagggctgtgtattttgaggtgctcacgaatccgctgcttaaaatgtctgacgtaacaattgttgctcgtgtagcgcatgcgcatggggcgctggttattattgacaatacttttgtgacaccgctgggtcagcagcctttggatttgggagcggatattgtgctgcattctgctaccaagtatttgtctggtcattccgatgtgactgctggggtagcggtgacgaagagttctgagctcgccgagaaactctactttgttttgaaccgtgtgggcggagcgttgtctcctcgggactcgaatttgctacgtcgagggattcagacgctggcgttgcgcattaaaatagacgccgcgcgctagcttagaagtatgaccgatattgctttaaaacgcgcttacgctcctgctactcctgagattgatggctaccgcattttggtagatcgtctctggccgcgtggcgtttcgaaaactaaagcgcagctggatgaatggttaaaagatatagctccttcacctcagctgcgcacatggtggaatcatgaccgcgctcgttacagtgaattcgcagctcggtatcgtgcagaactcgacaataatcctgctgttgagcgcttgctcacacttatgcacgagcacgctgattcgcgcattactcttgtttttggcgcaaaagaccttgtgattaatcatgcccacgtactgcgcaactatctgattgagcagaccacaccgcgcgaaaacacggtgcttaactcacaaggttttactatcgctacaattcctgccagaccaaaacattcaggcaacgcacaacataaaaagccaaatttagacggtttagaatacagcactctagagctaaaagatgcacaggctttgcaatgggttgaagcgcttacctttgaagatacctttttgctcacgtctacgccgcgcgataacgatgactatattgcgcagacgtatactcttgagaacacgcagagcgagctagctgacaactatagcgtacacactgcgcttatcgatacagccagcggtgaaatagctgcttttatgaagctgaaccgtccaggcgcttttagcgagagcaacccgaagattccgcaagacagtattgaagttcagcgtttatacgtaatgcctcgtttcaaacgtcgcggtttaggaagtttccttatgagcaaagctgttgattttgctcgcgaagagaaagctgattggctgtggctaggcgtatggcaatacaatttcgctgcccaagaattctataaaaattggggatacgagcgctttagcgagcatatttttgctgtaggagaggatgaacaggtagattttctgctcaagaaaaaattacagtgaccaaaaataattcgataactccatcatgcgcggatcatccgatgagttgagcaggataatagtaccttcattattattgcttgccagctcatcgcgctcagccaacacatcgcgaacatgccgtgctgtgccctcattgccatccacaatgcgcacatgctggggcacaagagcgcggaaataatcgcggtaatacgtaaaatgtgtgcaacccaaaacaatagaattcacgctatctaaatcgtaggcatcgagatagccgcgcaaggtcttgttcacaacctcagcatcttcgaactgaccgttctcaataatatccaccaaagcagggcacggctgcttctcaatcgtatgcgtggccgaaaaacggtgcataagcgcggcgaacttcttctcgcgcaaagtaagttccgtagcggttacgataacgtgctgaggctttccgccgcctaaatcgcaggcgagcttaagcgctggttccatgccaataataggaatatcgtaggtagagcgcatcagctgggcggcagcgctggtggccgtattgcacgcgattactatagctttagcgccgcgcgcaataaaatcatccgcaatgcgcatacttaaggcttgcacgtcctcagttgagcgcacgccatacggagcgttggcggagtcgccataaaaaatcaagttttcagacggcataagcgtatgaatttctttcgccacagaaataccgcctaaacctgaatcgaaaataccaataggagcattactcgtcatacgaacctgccaaaaattccacaatcttctgtgcttttcccacaccgtcattgtacatatcgagcagtccttgacgtgttttgctcaacgtatctaaaccatacgtatcatcagggcatacaataagaagccgaccttcagcagcatactgacgagccacagtcatctcatcgttatacactttcgcgcggttgcgtaaagcctgcgcagcttgcggatacgagcgttgtagaacgcgcgcaggagccgcatctttatgaggatcgcgcacaaaatcatcaggatgagtggtaatcaaaacaacacggtcgcaaccatcgtcaaaagctctctgcacaggaatcggatcagtaataccgccgtcataaaagggaacgtcatcaatctgcataggcttgttagcaacgggcacgcaggaagatgccataataatggaataatcatcctgatgcatatgctctttactaaaatattccggctgaccagtaagcgcattacttgctaccacggtaaactcggcagggttagcagcaaaagcctcgtaattgagcggatattcgccatcgctattcgacagcgtgccgtaagcataatctaaaccaacaaaattgcgggtcgtgagcagattgcgcatcgaagcgtaacgatggcggaaagcatactccatatagaagcgatagttgcgcttatactgacctgctaaaaacgaggtgagatttccactgccagcagaaataccgtaacagcgatcaaactgctgttcagctttgagtagaccatcgagcacgcctgctccaaaaatatcgcggtaaccgccgcctacatcaataattcccgtaaccataatcttttagtttagtccctcgtatgacgtgcgtagagctcgtagcataactcgcgcaaaactgcggtagcga

SEQ ID NO: 3141 - DNA, 23207 bp, synthetic construct
  source 1..23207: mol_type = other DNA
  misc_feature 1..23207: note = Synthetic
gaaaaaaatcagtgagaggacacgaaagctaataactattcttgaagacagtggtcatcacgaagcggcgcaggatattcttgaagatgaattagctggagaagggtcgatagcgcaatacggtggcatattttatgtatgcaaatttggactcgatgttccgcacaatattattgatgaggtcctttatcttgcggagcaggatgagaatgaacaggctattgaggactgtcagtatctactacaacgtatttcttgaattcactatattttattcgctcaagtaaggtagcgtgtgctatggattagcgttgggagaaggcaataatggtgggttttcttataagagcggtagaggaagttgcatttttcatagagaaagaaggacttccgacagaggcagatgatattagaattactgctgattgtgattctgaagttctcgctttatttatggcgatacaagttttgcgtgagcacgatttaacgtatcgcaaaagttttgtcgcatggatatatgagatggcagtggataacgatgaagaagaaatcgctgaagactgtcagtacctattacaaaaaacagtgtagaagcatcccaaagttttctgaaagattatttggatactcgttcttgacatggtttgagggaaaatgaatgcatttgtttctaaggaaaaagaagtaatcgatttctatattgctactctacgttctcacggtttccctgaggaagctgaagaggctgaatatgcctattataaggctaaaaattcaaacacagggcgaatagagtggggatacaaaggagggcattcgaacgggtatggatggattgcagacaggcctgttttccctccccattggaacgcacaagacattctcaacgtacggagcaggttattcgtaataatacaggcaatggcagcaaagtagtcaagggattctatcataacgtgaagatgcgagtatctacatccaagggtagaattactagtatatatccagaagggaggcaagaatgataagctttcttaaacaagatgtacacgatatagtgtcgttccttgaacaagaggggctgacagaagaagcggacgacgtagatgtgactgcagactgtgattcggaaattcttgccttgttcatagctgttcacattttgcgtattaataatttatcttatgacaaaaacctgctcaaacgtgtgtacgacatggcagtagacgacgaatatgaagaagccatagaagactgccaatatcttctgcagaaggcagtttagcatcgcccatttttactggaccatccatattggatggtccttttgtgttaggaggaagtgtatgcgtcgtgatatggatcatgtgcgtcatattctcaggattgttgctcagtcttcgggtgctgtggatgcgcgtgttttggttgattcgtctcatgattttaggatggctgtgtatcatgtggatttgcttattcaagcaggactggtcaaggggacgattgtgcgggatatgagtggggatattcttgacgcgtttattaagtcgttgacgtggaagggtaatgattttctcgatgaggttgaaaagtggggatgaatccagtcagcagatagcatgaattatgaggaaatgccgaatttagtattcggttagacattccatgggtgggaaccgttggggtttgaagagttcgattcttttcattgttgcgttttaaccccgattagccgcagggctgtcggggtattttcatgcccgcaggggcgaaatagtaaaggagttgccactatgacagacgaacaagtcactactactgaaattatagagccggcttctacagagaatgcagagtctacgccgcagggagcagacactgattctactgattggaaggctatggctcgtaaatgggaggaccgtgcgaaaaagtcggataaggagctgtctgtgctgaaaaagcatagtgaatcctcggacaagagtgtgcagtctttaacgagcgagaatcaggagctgaaaaaccagctcaataagattgtcttatgcggaaaacttgggtttggagtaacctaacgttcctgttgtattttgaaaaacaacctccgagaagttgtatagtattaaaaacttattgcatagttctagatgctgagggaaaacgaagcacataaaaattcaccatcagataaataaccccatatcggaatactcaatttctgcacagtgttggatatagcgaaaacacttatacatacttctgaaagctgtgatgcctcgacattgaatgctttatagagagcagtgctgtgagaatgccgatacagagaaggggttgcatattatggacgaacatgcacacaaaaatatgcatgatatggaaatgaatcatgagatgcacgggatggaggagatggatcattccgagcatactcatatggatcacgacgtgcacgatatggacacagcggatcactcgaagcggatgaatcattcagaaatgagccatgctgagcattcgcaccacatgcatatgaaccacgcagaccatggcatgaacggtatggctcacatgagccactccagccacgacatgcacgacatgggtcacatggaccattccatgcacatgggaaactttaagcagaaattctggctgtcactggtgctggctattcctattattattctttccccgatgatgggcatggagctgccgttccaattcaccttcccaggctctaactgggtagtgctcattgtggcaactattctcttcttctacggcggtcagccattcttatcgggcgccaagatggaattgacgcagaagcgccctgccatgatgacgctgattgctatgggcatttcggtgtcctatatttacagtctctatgcgttcgtggtcaataatttcttccacggtcatgtgatggacttcttctgggaactcgctacattaatcgtcattatgctgctcggacactggattgaaatgagcgccgtgtctaatgcaagtgatgcgttgcacaagctggcagagctcttaccagatgaggtgacgcgcattcgtgaggatggcagcgaggaaaaggtttctctgcaatctgtacaagccggcgatcttctcgttgtacgtgcaggtgacaaaatgccggctgatggcgtaattgagcagggttcgtccatcgtcgacgaatcagcgattacgggtgaatctcgcggtgtcaccaagaatgccggcgataaggttatcggcggttcggtaaacggcgatggtacgatgcagatccgcgtaacgggcacaggcgaaaacggttacctggctcaggtcatggatatggtacgccgcgcccaggccgaaaagtccagactggaaacattgtccgacaaggtagcgcagtggttgttctacgttgcgctcgctgtgggtgtactggcgtttatcgtgtggatctttgcggacgatgtgccaacggctttggaacgcatggtgaccgtttttattatcgcctgccctcacgcattaggcttggccattccactggttgtggcacgttccacttccatcgctgcgcgcaacggtttgttgctaaagaatcgcaacgctttggaaaatgcgcataatattgacacgattttgttggataagacaggcacattaactcaaggcaccttcgcagtcaccggcgtagaagtggtgcatgatgccgaccatacaatcgaccgcacggagttgctcaagtatattggcgcgctagaatccacagcaaatcatccgattgccgtgggcgtgatgaagtacattcacagcgaaggaattgaaccttatacctcgaccgattccaagaatctcgcaggtgtgggcttgcaaggcactgtcaacggtaagcaggtgcagatagtcaatgccaaagaactgcatcggctaaatctgcacgtggagacgagcgcaacgtccacgtatgtggatgagggcaatacgatgagcttcgtactcatcgatggccaattggttggtttcatggcgttaggtgataaggtcaagccagaagctcggaagtttattgcatcactcaaggaaatgggcattacaccggtgatgctgacaggcgataacgaggaggccgctgccggtgtggcgcattacttgggcattgaccagtatcacgcagcccttttgccagaaggcaaggaaggcatcgtggcatcgctgaccagccaaggaaagcgcgtggccatggtgggcgatggtatcaatgatgcgccaagcttggctcgagctacaattggcattgccatcggcgctggtacggatgtggccatcgaatccgcagacgttgtgctgacggaaagtaatccggacgatatcgtgcgtttcctcgatctagcgaagcaaacgcgccgcaagatggtgcaaaatctgtggtggggagcaggctacaatctgattgccatcccattagcagctggtattttggcgcccatcggtttcatcctcagcccggcagtgggtgcaattttgatgtcgctgagcacggtgattgtggctattaacgctatgaccttgcacattaagaagtaacgcgcataacgacaaaggcgacctgagcggatgcttgggtcgtctttttattcctcaaatccgttataccagctcgaaccatacaatcgagttgttattccgacatcggtggattcacggataatcatcggacattccaccgaaattgtgccctgataaggcttcccatgaagggcttggaacaaataatcggcagccgttttgcccaccagttgaatattattgtcaaaagtcgtcagcgtcggatgtgtgcctgtgctgtacacttcccaattatcatgcccaaggacggcgatgtcgccaggcactgttttaccgtgatgcataagccctatgatcatgccgcgtgcaatttcatcactcagacagtagattgcatccacttcaggatggtcggcaaggagcagtccggccgcgcgctcgccccattcctcactccagcggtcattaataatgcgtataggctgcaatccatagagtgaaaatgctgattgtgcccccgtgatgcgatctttcgccgcttgataattctcgccaccgccgacgatggcaatggcggaccgtcctatgccaatcagatattcgatagcttgacgtccggcgcctacattatcgcatacgatgctgcagtcgttagcgtccgtggaaggagcataggcatacacagtgggaaggcctccgagaatccgaggatcgatgggcgggcgcgggttagtggaatcgccgacgacgattaatccgtcaattccgcgtgaagtgagctgtgcaatatgctgtttttccagctcataggatttatgcgagctcatgagcagagccgtgtgatgcgcggcacccaaagcctcctcaacaccggtgagcagcggcaaggcgaaacggccattgagatccgaggtaatcagaccaaccagccccgtacggtccgaagtctgagaagttcgtttcgtcgtatatcccagtttctcggcattaagttgcacaatcctgcgcgtttgcgcactaatgcgacccgtaccattcagggctttagacgcagtgctaacggaaacatgcgaaatctccgctaactgagcaagggttgggcgctgtgacatacatataattgtatgaaaaggatcacaaagaattctgttcatgcgcaaaactgggaaaattttcccaaccgatggttctgaaaattcgataaaatcttttttcttacactcgagtatgcacgcacagcaatgtgctgaatgtcactatcaatgaggaaaggacaagaatgcatgcacgagtttcggtgacatcgccattttggaagcgctaccgtgaaaatgtcgccacagaagttatcccctatcagtgggctgttatcaatgatgagcaacgcattgatattccgctagatccatccggtgtagaggtcgaggccttatctcacgagtggagtcacgcagtgcgcaatttacgcgtggcggctggcgatgagcaggccgattttaatggtatggttttccaagattcggacgtatacaaatggctggaagaagccgcatatgtgctgaattactcggataatccggcactgcgtaaaacttgtgatgagctaatagatctcattgcccgagcgcaggatacagatggctatttagacacaccgttccagatccgttcgggatcgtatgcgaaacgacctcgttttagccaaattcagcaaagccacgaaatgtatgtgatggggcattacatcgaagccggtgtggcgtatttcgaagtcaccggcaacgaacaagccttgcagattgcacgaaaaatggcagactgcctcgatggacattttggtgcggatgacggcaaaatccacggctcagacgggcatccggaaatcgaactcgcgctcgcacgcctgtacgatgccacacgggaagaacgctatctgaagcttgcagaattctttattacggtgcgcgggcaggatcctacattttatgacaaacaaaatgaggctgcacgcacggctggagcaacgccgattttccctcaaatgctgggatggagtcatgaatacacacaaacggctcgaccaattcagcagcagcaaaccgccgaaggtcatgccgtgcgcgtggcgtatttgctgaccggcgtggcacatgtggcgcaactgactcacgatgagggattgcggcaggctgcggagcgcttgtggtcaaatattgtgcatcgtcgcatgtatatcactggtggtgtgggctccacacatgtgggcgaggccttcacctatgactacgatttgcctaacgacaccatgtatggtgaatcctgcgcatccgtaggcatgagtttctttgcgcggcgcatgctagagctgtccttgagcgaaggagcgcctaagggagaatacgcggacgtgctggagaaggaaatcttcaatggtgcgatttctggcatagccttggatggtaagcacttctactatgtcaatcctttggaggcagaccctcaagcatccgaacataacccagaccgtgcacacgtgctgatgcatcgcgcttcttggtttggctgtgcctgctgcccagccaatattgcacgcttcatcgcatccatcgatcagtatttatatacggtaaacgcagaaacgcgcacgattgcggcgcatcagttcatcgcaaataatgcagaattctttgagggcgtgcacgtggagcaggagtcgaatttcccttgggagggcgatatccgattccgtgtgaccgtgccggagggtgcggatgcagtgaacttcctcgtacgcatcccacaatggtcagctgcgcagtatgcgctggtctgcgatggtgaggatgtaactgcttccgttgccgtgaaggacggctttgtgggttttgtactgggcgctggtgagcatacgcttgagctgagcctcgacatgtctgtgcgctatatgcgctctacctctcacatccgtcatgatgcgggtaagattgccgtcatgcgcgggcctgtggtgtattgcgcagaagaaagcgataatgctgcgccgctgtggaattaccgcatcgcacgggggagtgtgggtgaagcggtggcttcgtatcacgccgacgagctcaacggtattgaacgaatcgaacttcctgctgtaaagcgagccgaggatgcccagggttcttccttatatatggatgccagtagcgcttctgaagacaagccggcaaccctcaagatgattccatactatgcatgggcgaatcgagagattgggcagatgcaagtgtggtttgatagcgatttttaggatttgcgagctgttcggtgctgatatttctactttagacgtgttaggctatacacaataaatcattgcgatgaagcaaggagaactatggaaaagcgagaagccgctcgactgggcacagccatttcggaaatcggtttaggtacttggcagctgggtacggattggggcgatgtcagccctgagcaagcaaacgaagtccttgaaacggctgtacagcagggcattaatttcatcgataccgcagacgtttatggtgatggtaggagcgaaaaattcattggtgaattccgccagcgccatctcgaggacaatcttttcattgccaccaaaatggggcgtcggtcacctcaggttttcgaagagtacacgcaagagcatttcctcgcatggaacgaccgctcacgtgcaaatttgcaaatggatactttggacctcgtgcaattacactgcccgccaaccgatgttattaccgctcagcgcacatacgattatctggacactatggtggatgaaggacgcatcgcacgctacggtgtgagcgtggaaacatgcgagcaggctctgcttgccatggagcgtgacaatgtcgcttccgtacagattatcctcaatatcttccgcagaaaaccacttgaagaggtattgccacgcgcacttgaaaccggcacagccatcatcgtgcgtgtgccgctcgcctccggactgctgagcggaaagtatacaaaagacaccaccttcgccctgacagatcatcgaaactacaaccgccacggcgaacatttcgatgtgggtgaaaccttcgctggtgtgccttttgaggtgggcgtagaagcggcacaagaatttagcgctctcgcagccaaattcgtgccagatgcaacgccggcgcaggcggcactacgttggattttgcaacaaccgggcgtcaccaccgtcattccaggcggacgcaatgtgtctcaagtgacgggaaacgcgggagcggccgcgctcgctgagctaccgcaggaactcatggatgcgctcgaagacttgtatgattcgcgcattcgtgagcatgtgcatgataggtggtagaagaattaaaccgaattgtataaaacgttagattcagtattatactaaaattgctaattcacagtaagggcggactcgttagccgacctgaattctagcaagttctatgcgggattccgcatagttcatctgcaggggaggctcgacctccccgttttgttaattgtgagtcttaccagatatgaagaaaaataggaacaatacatgtagcattagcgtgctaatagaatatgcctgagtatgctcctgaaatgtcaaattatgccggtcgatgagggtgtcgcatttcttatgcccgtctgcccagtttgttcgtatgaggcaagtcagtgtggcaagatttctaggatggagtggatgtgttttattcatctgcaacgtactgatagtgattgtggacgcttatttatgcataactgcatcaatagtgttgcgatgctccgggtgtcagaaagcatcatcaaggctataagcaacattttagtcccaatacgtcactttgcgtcgatgtttcatcccgattgggttttctgagtgggactggtcagacacttcgcattattcttacatcatttttatatgagggaaacagcattcctcttgattgcgactagaatatgaacatattaacgatttcctgagggggtttgcttcggttatattcgcttagacacacacattggtgacgaattttctcggctaaacgataagggttgtataaaactcaagtgtcttaaagataccagtagctccatgcggtactccttgtctaggataccagttatgaatttcgatatgatttgaagagttatattttttgacttttttaaaatgcccattattatataaatatgaaaagaatgagaataggtattgatgtcggtctctcagggattggattatccacaatcgaagttaactccgttggacagccagttcgtatattaaatatgcaaagtttttattcacgatggcggtgtagatccgaataacaacaaaaacggtaatacgagaaaacttgtttcgggtattgcccggaggactaggaaaatgcggagacgcaggcgtgctcgtttagtgaagctcgataagtatctgcttagtctcggtttccctcttgtagaatatggtgacgaaacttttgaaccatgggtcgctcgtgctgaacttgctgatggattcattgcagatgaaaaccttcgtatccgtaagctttctatagcttttagacatattgctcgtcatcgtggctggatgaatccgtataagtcaatacaatctttgtatggtattagttccgagaatctatctgagcagtatgaggaaatgtgcgctcaccttgggtttaagaaagcggatggattaacgcctgctcaagttgttgcagagtacttgaatgaaaatgaaaataagcctgcacccagattaagaaaaagtacaaaacacacagataggtttgcactctttcctcagaggttgatgcaagaggacaatgcatatgaggtggagtatatctgcaaacaacaaggaattgatgaaaaaactacccgagaaattataaataaaatattttatgcgatttcaccgcgcggctctgcaactgattcagttggtaatgatgtgctcactggagaggcgcgtgcattaaaggcttctctagctttccagaaattccgcattgcatctgcaatagcgaatctcagccttcatatcaacggtgtcgagcgtccgttaagtataaaggaaaagcagattgcgtacgatgttctaacagatactgatacaaaaaatcgtccgggctgggcggatgtagcgcaacaattgggtgtaaatcgtagggatattaaggggattggtgggattcaagatggcgaagatcgtgtttctaacagagctcctgtgattgaaacttattacgcacttcttgattccgatggtggtcttaaaaaactcgtgaaaaaagtaattcttccttggtgggacaattcaaaggaagacgataaagaggcacttattgaaatacttggaaatacactcgatattgaatccgcgagagacgatatcaaatatttatcagcatttgatctcattgactcattcgatgacaacgaacttgctctgctagataacattaagctgcccacgggtagagctgcttactcagtgcgagcgtgctatgagctaacggagcaaatattgactacatcagataacttgcacgaggcacgtaaaaatgtctatggtgtcacagacaactggcgtccgcctcaggcatcaattggggaacctgtgggtaatccctcagtagatcgtgtcctgaaaattgttaatcgatatatgcttaacacaacaaaacgatggggcaagcccttatctgtaaatattgaacacgtgcgagaaggttttagatccgaaaaagtagcacgcatgtaccagcatgatacagagcaaaaagctaaatataggcagtcgattttcaatactatgaagactgaaaatccatctgttgacagatatcaagattctcagattaagcgttgggaggcagtacagcgtcagggatgcaagtgtttatattgtggaaagacaatcacatattctacttgtgagctggatcatatcgtcccccgaaaaggtgttggtgcggataataagaggactaaccttgcagcggtttgtgcggactgtaacagaagtaaatcaaatattctattctctaagtggtgtcatagtacgtatgcaatggatcgtggtatatctgtcgaagctgctgtagaccgtgccgagtctttcatattcccaacaggaatatatagcaagaaagcaagtgcaaattttattggtgcagttaagaatcgactgcagcaggaaactgaagatgatgctcctgataatcgatccattgagtccgtagcatggatggcagacgaactcagaaagcggatagattggtattacaattctgagcattacacttcgcataagccaaagaacgataacaaacaagtaaaaatcggtgtatttccaggtaaagtcactgctttagcacgcaggttatctggaattgagaaagagattcattttgccggtcctcgtggaaaaacgcgtctagatcgacgtcaccatgcagtggatgctgcagtcatatcgatgatgagtcgtgaaattgcggtaattctcaatgaaaaaaacgaattgaggatagcgcaaatgtatgtttctcatccggaaaaacttggtcaaccattttggaaagattacccattagatataggtaggtcattgcaatttcgtaagtggattgacaaaatgaaggacttgcaggtcctggtaaacgatgctatggatcacgatagggttagtgttttacgtgattatagattgaggttcggaaattccaaggctcacaaggatacaatacacaagcttgtaagaatgcgtttgggagatagattgagtgctgagttaattaacaaggcctctacgcctgcattgtacatggcattaactcgttgcgatgattatgatgctgaaacaggacttccagagaacaagtcgcgcaaaatcgtagttaatgggcaacatttctctgcgaatgatgtagtgttcttcttcgacgatgatgctgcacagctaattatcaatggtgggtcggtagagcttggtgatggtttccatcatgtgcgcatttataagtgtccaaagttcaactcggctggtaaacaaattggtgtgttttatggaatgattcgcgttttcacagttgatttgcgtcataatagtagcgatgacttactttctgttgagttgccgccacagtcattaagtatgcggtacgctgaacctcgaactgtagcggctgtacttagcggtaaggctgagtttgtggggcatctgttcattagcgatgaaattcgtttggatttggatacatccacgtataagggtcaggtcgcagaatttgctgaaattatgagaaagatttccaagccggagatttatagtacctgggtcgtcgatggtttcaaaagcccatcccgatttagactaaggccatcgtatctcgcctcggaagggattgaaaaattaccagaggagcagagaactatgttggataagtttttcaaagatggttggactccatctgtcgatatcgtttccaagttcaagccggttgtcattcgacgaaacggtctaggtgagcctcgctggaagtcgaaggccgggctgccagtatcctaccgatggtgtgactaagaaggtgtgaaatgcaaagtgcgtggcgcatcgtggactgtactgagctgaaaggctcactgagatatgaacgtggtcagcttcttgtttgtgactcagtaaaaggcatgtccgctggtgtgccacttactgatgtcgccgtgcttttgataggtctgcattgctcgtgctctgcaggccttctgcatcagtgttcagaatacggtgtctcggtcatgatctgtgattggagagggatacctatttcggctatgcatccgtggtctgtgattaatacacgcataaatatgcgttatcgtgctcagattgagcaaactattccccgtcagaaaaatttatggggcaaaataattcagtccaaaatccgaggtcaggcagctgtgctggatcagttaggtattgatggtggcggtcatttacgcggtcttgcctctgaagttcgttcaggcgatttaaccaatattgaaggcagagcggctcgagattactggaaagcattatttgcctgtgatacagattttcacagaattccaggagaaggagataccagaaatgggcagttagattatgcatacacaattcttcgaggatttactataaaggctgtgatttcggcaggtttgtgcccgtgtttaggtattcatcatcacaatggaggaaattacttctgtttggccgatgatttaatcgaagtatttcgaccctcggttgatttcatggtgtcacagctttcggaaactgattcgttaattgacaaagaagtcaagcaatatttggttcagagtatcaatagacaattcaatggagaaggtctaacgataccgagcaaaattaacgatttcagtcagcaatatgctctctatgtggagaagaagatagataaaatagtcatcccgcaatacatgaaggattaacatgaaagtcgatgaggacagtgggggaatgtggtgcttagtaatgtttgatctgccggtccaaactaaacgcgaacgacacgacgctgtggtttttagaaatttgctcttggacatgggatactgcatgattcaattttcggtttacgctcgatacacaccaactgcagacggtaatcgtacaacggtcatcaaagttaaagaaaatcttcctcctaatggaaaagtaagaattttgcatataactgataaacagtggtcaaaatcccttcgtttttgcaatttgaaggaggaagcaaacaacgaaacgcctgacacacttatgcttttttgaacgttaaagtgcttgaaaaggtttaaatctacctctttgatcggattgctccattttatcaaagaggtagaaagctaattcacagcacatcgagcgctttttgatgtggggattgccattttatcaaagaggtagaaagctaattcacagctcatcgctgccatcaccttcctcgtcatccattttatcaaagaggtagaaagctaattcacagcaagattttaaacgcctcttagacgtgccccattttatcaaagaggtagaaagctaattcacagcttcacggacgcatggagcgggctcgtggccattttatcaaagaggtagaaagctaattcacagccaccgtacatccacagtcaacgaacacgccattttatcaaagaggtagaaagctaattcacagctgtctgctgtacgtatggtagccgtgtgccattttatcaaagaggtagaaagctaattcacagctgaggaggaaagcgtaatccgctttcgaccattttatcaaagaggtagaaagctaattcacagccacaatagcaaatatgattgtcgtatgtccattttatcaaagaggtagaaagctaattcacagcaatcacacccgaatagccctccacaggaccattttatcaaagaggtagaaagctaattcacagcattccatggagtatcctgatagcctgtcccattttatcaaagaggtagaaagctaattcacagcctgggcacggtataatccgcaactacttccattttatcaaagaggtagaaagctaattcacagcgccgtgaaacagtatctagcgcaagtgaccattttatcaaagaggtagaaagctaattcacagcttcgtcaacgaatccttgtggaatgcaaccattttatcaaagaggtagaaagctaattcacagcttctgtcacggttttgacgagcgcattaccattttatcaaagaggtagaaagctaattcacagctattatataaattagaatgataatcgtatgttaccaaaggaatgctaatactacaataatattttgtattaccgctaatttcttttgaatctgactttgagttctgattgaactctttttcgtttcgtttaacgaataattggtcagattgtgccgaattcaagcgaaattatctgtgactaatgcaacgctatgggcctaccgagtatgagagtataaaaacgcatttttcaagtcattggtccatacagaacgaaaagagtaatgtatatgtatagaaaacgggtgatatcctgacattggctagttaagcagggtatagttatttgacctagaacaaccctttaaaagccgagtacccatcatccaccatgacggtggtaccattcacagcaaccgcttcctccagcgagagtaaataaatcacattcgccacttcttcaggggagatgatgcggtcgccgcgcatgtggaaagtcgctccaagtttgacggtgtcatcgtcgaccatggcggtctttacccagccgggagctacagaaaagacgcgcacgccttgaggggagagttctcgggcgagggcctgtgtaaacattttcacgccgcccttggaagcgtgatagccgatagtttccgagttagcgatgaaaccgcagatggatccaacgttgatgatgacgcccgcatgctgtccgaccatgacttttgccacagactgagccatattgatgctacccatgaggttgatgttgatggtgtttgcgatgtcagaaagatctgcgtctaggaaggatgtgcggcggccggtcacgcctgctacgttcgcaagtacatcaatgctgtcataggtatccaaggtggtctgcactgctgcgcggcaatcttccacgtttgctacattgcagtgcactgcaatgacagggccgagaggggagagttctgcaagtgcagcttcgactacttctgtgcgatccacacttgctgcgactacgctatagccttttgacaaatactttttagctacggcaagtccgataccgctggtgccacccgtaaccaatgcaactttagacataaaaactcctttgtttgaaagaatgcatggttattatacaacgcgcttgaatgggcatcgctctggataaaaaatgagaacggctagagatttatccctagccgttctcaatatgtaccaatgtcaatctaatatacgcctatggcaatggttctgagagtgttcagcgtgccttcacaaccactgtctaaaacgaagaacaactttgtgcttggagcgctcactaccccccactattatatataccatatttgtgtacacgtttacaaaatagccaatgtgcactgtatagttgcgcgagtcctcacataaaatgaagcacgccaactcctctcggatgaagcaaacgaaagaaatcagcgtttccacttcagttacgtcataagcgcctaaaacttaaacccatgcagcgcctttacaaaatgcggatcgaaatgatccacaatctcgctgtgtcccaagtccatggttgcaatttgtgccatgtcctcatcgcttagctcgaagtcaaacacatcgaagttggcttggatacgctcttcatgcacagactttgggatgaccaccacgccacgctggatattccaacgcaaggccacctgagctgcactctttccatacttggcgccaatcgacgtcaaaatcggattgttgaagaagtcacgatgtccctcatcgaatgggccccatgcttcgggcacgatgtcgtagacgttcatggtgtcgatgttgcgctgctgctggaagaatgggtggatttccacctggttaatcattggcttaatctcgaaagtttccgccaaatcagcgatcacatgtgggtagcagtttgccatgccgatagcgcgtaatttgccatccttgtacagcttctctaaagccttccatgcgttgatataatcgcccattggctggtggaggagcatcaaatcgatgtaatccacgcctagacgttccagcgagcgctctgtcgcggccaatgcgccatcgtaagaaaagtcctgaatccacagcttggtggtgatgaaaatatccttacgtgggatgccgctttccttgatggcttcgcccacagcagcctcgttcatatatgcctgcgcagtgtcaatgaggcgataacccgtgcgcagcgcggtcaaaaccgcttgcttggcatcctcatgctcaggaatttgatacacaccaaatccgagcattggcattttaacgccgttataaagttctctaaattccatgttttgcattccttccggtagccttcaatagttcttcaattaatcgtttgcatgcacatcgaaagcgttgataagcatgtctgccacgcccggtgcgtcgtgatcaaacgctggcttgcccttatccaaagcgcggatagcatccatctcggattcgctcagctcgaagtcgaagatatccatattgctacgcatgcgttccaccttcgtagacttagggaatacgatggcaccttcctgaatctcaaagcgcaaaactacctgtcctgcattcttgccgtgagactgagcaatcttagtaatcacggcattacttaaaagctcagcattaccctgacccaatggagcccagccttccaaagctacatttgcagcatccatgcgcgtacgcagttctttttgctggaagtatggattaaattccacctgattgaccgaaggcatagtctcgaacgatgggatgaaatgatcccaaatcttaggagtcatattgctcacgccgatggagcggatcttgctcgcagccttcgcatctttcatagccttccaggcgcctggtacatcgccataaggctggtggatcaaatacagatccatatagtccatatcaagcttgcgcaaagaagtctcgatagccttggtagccggttcgtagccgtagtcctgcaaccacagcttgctggtgataaacagatccttgcggtcgatgccgctatcgcgcacagccttgcccacctcttgctcgttgaaatatgccacggcggtatcgatgtggcgaatgcccaaatccaatgcctcgcgcacagccttataggtgctgccgtctgctggaataagataagtaccgaagccgtacacggggatgtttacgccgtcattcaaggtttttgtaggaatagtagtcatgtgtgttccttaaatagtgaattgattaatgtttgggggaaagcatataaggggcaagcatcgggtgcagaaatagtgcacagaattcttgcgtgcgatcggtgaagctgtatgcgccatcggacatgtcccagcacagcatctggccataaatcacatccattaacgtgtgtgccagaattttgaccggagtggagggttctagttcgccgcgttcaacgccatcttggatgagttcggcggtggagtggatgtcgaaagcgagcttattgcggtccgcttcattttccacaagatttggatccacggtgttgcgcacccattcttggcagagctttaacccactgccttcaatactgcgcgcgtaacccacaaggaaaaaagtcatgcgtgcttcaaaatcgcccgcataggcgagagcatcgtcgagtacttgttggtaggtgtcgtggctcagtgcatacacaatatcctctttacgcttgaaataggtgtaaaacgtgccattagctacaccgcttttctgcgtaatttcagcgatggacgtatttgccaagcctttttcattgataatttcttttgcggccgcaataatcttgcgtcgcgtttcttgagcggctaactgtcgtttattcatgtcatcacctccgttcgtaatctaactgtaccacattcattgaatcatattcaatgaattatgctcaatgaaaatttgagtataaaaaactctgcacaaaaagagtacagagactggaaaattgccggaatttaggaatgttagaggcgtttgagccatacgccacttttgacgcgccataaaaacagactgccacaaatccaccattggatgacgcaggcgagccagtagccattaatgcccatcaaagggcagaagattacggataaaggcacgcgaatagcccaaatcgtgccggcgttaaataagctcgaggcaaaggtgtcacccgcgccgcgcagggcagcggaggagacgattgatgcagcaaagaacggctcggcaatcataccaatgcgcagcgcagtcccacccatgtcttgaatcgccaggtcaggggagagcaggccaatcatttgaggtgcaaagataaaaagcaccacagcgccagctgtcatggtgagcatgccgagacctatggaaagccatgcaaaacgacgcgccatgcgtttttgatgagcgccaatggattgccccacgatagcggtagccgccgtgccgataccaaaaccaggctgatagcaaatgctttccgcagtgacggcaaaggagtttgctgcaatagccgtcgtgcccaaaggtgcaataatcttcgtactcatgacctgagcactattggtgaccgcattttcgatggccactggtgtgccaatgcgcagagccgtcatcagcgtgctgcgtcgaaaacgtacgcgctccccagtacgcagtcgaagcaaatcattgtgcgtaaacatgtaccacagataaatcagcgcacctaccagctctgctaaacctgtaccagccgcagcgccagccacgcccatattcgcgccgaaccaaggaatgctcaggccgaaaaacgtgtacgtggtcggcggaaaaataagccaagaattaaacagcacatcgcataaacacatgacgacgctgacaaaaccgggtagcttcatattgccagagctttggaccatggtgctgcccatggttgtcacctgcaaagcaaaaatggagattccaaaaatgctcagatactcggtggcaccttggcgaatctccggcgcaccacccagccatgtcggtagcacaaaagacagacttacgatgaccgcgcataaaaaggcagaaaacacagcaccgatgataaagccctgcttcatgatattgcgcgcttctttgtcattttgagaaccgaaacgctgagccatttgcacgctaaatcccgcagtcagcgcagcgcacaaaccttggaaaagccacgtcacaggcgaaataagcccaatggacgcggaggcctgtgtactcagatgtcccaccatggctgcatcgatatactgcatgacaatgtaggaaaactgtgctgcaatcgtaggcaacgacagcaaaacgaccagtaaaatactgcggcgaatcgatagtgcattgccattttggagctgatgtaaaagctcggcagaggtgggaatcttctttctcattatgcgctcatgctagcacactacgagggatagaatgcttcctagcaggcgcggcactggacggaagctagatgagaaactgctgagcagaaaactgcgttgtccacacgttagattgaacgcagggtttgcctttgcgatgtgcacgtcgtggtttcaccgcccagatgtataggggcaacgcgtttaatgcatattcatgtgcggcgactccacaggaggtccctcatatggcgcacgaatagaagagacgccatgctcgagtagccgacctaaaagtcgagctgcgtcttccatgggtatctgcttgccagacatcacccaacgacgccaaacgtttacggaggaatacacgacgaaggtgttaatcaattcctgctcggcttcggagaaattgcgatacggattgtacagactgcggctatgccgagttgtacccgtaatgatggtatcggcaaaagttctgtagtgtggattgataaaaatccgctcgatatcttccgtggacgaataaaaacggaacatattcagcgataaatcgtagtaattaaacggctgaggcagcgcatctaaagattttgcaaagtcagaaacgagttcttcgatgcgggcttcgtacaactcttccacactcgaataatgcaaataaaaggttttgcgatgaatgcccgcatgctgcgcaatagaagaaacagtaatctcatcgggagaatgatgcgcagacaatgcataaaaggcgcgctgaatggcataatgcgtgcgcatccaccgctctgaatggtcgtgttccgtattatgcgttaccactcgtcctcaattctctgggtctttaccgcactagcgttctgcaccccttacgcggtatagctcagcgaaacgaagcatgtctcgcaagccgccgatgtacctatacgcgctgtgcaagcacggcccttgtacgtactgtatcccgggtgcttccaatgtatccaattatagccaaaatgtggcattgccacagaaatcgccgatgtggtcattgagcgcgtgtcagaagtcttttacgctcaatctattgcgtagtaaatcttgtcacaggtgacttgatcgcaacaatcgcaaccaatggaggggaaagatgctggaactcaacatcgatgatgttcttgctgtgctgggctctatccgagtctatctaatcgcaataggcgtagtgctcgcgctcgctttaattgcaactatgagcgtaaataaggccacgataaaaaatggtcgtgtccgcaaactcactcattcgagtgcatggattgtggcggccattgcagccgttgtttctatcaatatgatgctcttggggccactgagcagcgtgattacgttatccaccagcgccaaactggcattgtcggatgcaacgatcgaaaaaacaaacaatttagccgtggacatggagcgcgaaggctctgtgcttctgcaaaataatgacaatacgttgcctatcgcaaatccgggcaatatcaacgtctttggctgggcttccacaaacccgatttatggtggtactggttccggcgctttgtctgatgcctatccaactacgtcgattttggattccttaaacgatgcgggcttcaaaaccaacgaggaactgagcaagttctatacggattactccacgtctcgcggcgaaattgctgtgacaaaggctgattggaccttaccggagcctccagccacgcagtacagccaaagcttgatggataatgcaaagaattactcagacactgcagtcgtcgtcattgggcgagtaggcggtgaaggcttggatctgccgaaggatatgaatgccgaaggtgtagtttacaacaataattccaccgaatacaaggatttcgaggatggtcagcactatttggagctggaccgcacagaaaaggatatgttggacctcgtcacctcaaactttgacaaggttgtccttgtgtacaatggcgcaaacgcctttgaaatgagcttcctcaatgattatccacagattaagtccgttgtgtggacgcctcacccaggacaggcgggcttcaaggccttgggtgaaatcctgaatggcaccgtcaatccatctggcaagacagccgataccttcatcaaggacttcacagcttcgccaagtttcaataacttcggtgattttaagtatgacaatgtgcaagaatttgccatcgaatctgcacgtggtgtacgttccccacgcttcgtcaactatgtggaaggcatttatgtaggctatcgcttctatgaaacggctgcggatgtgggcgctatcaactatgacgacgtcgtgcaatacccattcggatacggcttgagctacaccagct

SEQ ID NO: 3142 - DNA, 6782 bp, synthetic construct
  source 1..6782: mol_type = other DNA
  misc_feature 1..6782: note = Synthetic
ttttcttacgacccctacactaagcaaaccgcaactaacacagtctaccaagaaagtcaagcacacccaagaacaagcctcaaaaacttaacaccaccccgacacacaagacaacacaacccctacacccaaaataaagacacactttccttccagatacccgaaaatcaacacataaatatcaaatttcttcgacgtgtctttatcagaggagctgaatttttctgataagatactgccatgaagaagcaatatgaagtcggcatcgatgtcgggcttaattctaccggaatagcggctattgaaattgatgagaataacaatcctgtgcgtatccttaaggctataagtgtcatccatgacggcggtgttgaccctggacagcagaaaaaggctcgcagccgcatgaaacaagccggtatagctcgtcgcaccaggcggatgcggcgccggcgtcatgcccgtttgcagagattagataatgtgctcgaacaactgggctacccgttgacgagtcttgtctctgcagaaggtgattcattcgaaccgtggttttgcagggcaaagcttgctgattcatatatagaaaatgaggaagagagaaaggaagcattttctattgcaattcgtcatattgcaaggcatcgtgggtggaggaatccatataaacagattaggacgttgcatgatgataatcctctgtcagaacaatataacgagttagccaaacgcttttctgaaaaggtcggcagaaaggctgacgttttaaggacacctggacaaattatcagagactatatccaatctacctcaggcgcagcacctcggttacgtatgagtactaaggaaacaaaagacgaaggtatgctgccggctcggcttatgcaggaggataatgccttcgaaatcaaaaaaatatgtgaaatacagagagtaccaaagaaagatactaataccatattagatgcggtctttgaccgtgtatccccgaaagggtccgcacaaagccgcgtcggatcagacccattgacgcatgagcccagggcttctaaagcatctttggcatttcagaaatttaggatcgttgctactgttgcaaatttatgggttcacactgctgatggggacagggcacttaccgtagatgaaaaacggaaggcatttgataagcttgcagatcagaatactgtatctgagtctttaacttggattgatattgctgatgagctaggtatcaatagacacgatttgaaaggtattggcggcatccaggatgatggcgagcgtatctcaaaccgcccgccccgccttgatagtataaaggcaatctctaaaatttcaaacaagagtttcaagaaatccctatttgaatggtgggggaaagctgatgaatgttcacaagaagctatgcttgaactgttagggaattcagttgatattgatgccgtcagggatcggcttgaatatgctgatccgcttgatttcattgatcagcttgatgatgcacagcttggtgaattggataaagtttcgttgccatcaggcagagcgtcatattcgatggcagcattaaagaaattgactgatcggatgctgagcacaaatgacaacctgcatgatgcgcgaatccatttgtataatgttcctagtacatggcgcccatctgcagctcccattggagagcctgtaggcaatcctgctgtagaccgtgtgctaaaaattgtaaaccgatttttaatgaattgccaggatcgttggggctcgcctcaatctgtaaatatagagcatacgcgtcagggattccattctgcatctgttgctctgaagcttcagcgagagacagaggctcgtgcagaacatcggcagagcatttttaatgatattaagggtattaagggtaaggaaggggaaacgaattcgagagagtatgatatccgtcgcatggaggctgtccagcgccaaaatgggaagtgcctgtattgcggaggcaagatttcttttggcaactgcgaaatggatcatatcgttccgcgtaagggaatcgggtcaacgaacacccgtactaatctggctgcagtatgcagtaagtgcaatcgcttgaagagcaatattccatttgcctcatggtgtgaaatggatgctgcaaaagagcgtggtgtggatttgaaggaagctattgatcgtgtaaataattttatttttactaacgagtactctgcacaagctaaaaagaactttaaaaaagctgtaatctccaggcttaagcaaacgactgaagacgaagggatggataaccgttcaatagagtctgtggcgtggatggctgatgaacttcacaggcgtatcgactggttctttaattcgtcaaaatatatggatacgacgggtgaagagtcaggtaacttagatactaaagtaagggtttatgctggtttcgttaccggtattgcgcggcggtattccggtattgatgggagaatccattttattggtgcacattataaaacccgtttagaccgcaggcatcatgctgttgatgcttgtgttatcgcgctgatggagcataccgttgctgaggttctggtcaataaagctcagcttagaagatcccaagagtttatgaaggatcctaaagctggtgatccttactggaaggattatcctgggcagcaagataaagggttttattcttatcagcagtggcagggcaggatgtattcactgcttggcctaatgaatgatgcgctagataatgaccgtatacctgttttgcgtgataagcgtttgcgtcttgggaattcccgtgcgcacgacgatactatccaaccattagataggataagacttggtgagaagatttctaatgatcaaattaggaaggcatctactcctgccttgtacactgctttagtacgtgagaaagattatgacgcttctagcggattaccaaaaaacccgaatcgtgtaatacatgttaatggacgtgttattcattcggatgaagaaattgctttctttcgaggaaaagataaggctcagattaaagtgggggatggctctgctgagattggtaatagtatccatcatgcccgtctttaccgttgctggaatgaaactaagaaaggtaggaaagaggaattttttgggatggtccgtgttttccaggtagatcttctaaaagccaggaatttggatttatttgcatttcccttagctgagtcctctgtatcaatgcggtatgctgaggagaaaacagctaaggctatcctgcaaggcagatctaagtttgttggagtattacttgtaggcgatgaaattagtatcaatactgaaaagaaacagttatctggtattgcaggaactgctgatagaagtcttcttaagggcggcaaaagccaactgcagcggtggactattgatggctattattccacagcgaaattgcgtcttcgtcccagttacctttctgaggaagggcttagcagacttgacgtggatgaagattccaaggaggcattgaagaagactataaaagatccgggatggcttcctgctgtgaacgctttagctgattatgacccgaccgttatccggcgtaatgcctttggtgaagaacgatgggattccaggaatggaatgctaacttcttacagatggaaggaatagatgtagaaagaggcaactatgcaaaatgcatggcgggtagtcgattgtacggatctgtcagggcaactgaagtattcgcgtggccatttagaggtgcacaacgatcataataataaaaccagtgtaattgcattatcagacattgctgttctacttataggcctgcgctgcagctgcagtgcaggactgcttcaccagtgtgcgcaatatggtgtgagtattatgccatgtgattggaagggtgttcctgtggcagcgtttcatccttggctggaaactcatacacgaatagtagccagacaaattgctcaatcgtatatgacgatgcctcggaagaaaagcgcatgggcaaaggtggtaaaaaataagattgccgggcaggcttcctgtcttaggatccttggcaggcagggtgaaggaagtctccttgaattggcacgtagcgttcactcaggcgacactactaatgttgaaggtcgtgctgccagagaatactggcgatatttatttccaccagcagagggtttcaagcgtgttgcaggagctggatatgggaggaatgcgcaactggattatggatatatggttttgcgcggttttaccgtaaaggcggtaatatcagctggtcttaatccggttttaggtattaatcatcatagtggaagtaattatttctgtttagccgatgatttaatagaagtctttaggccggcgattgatgtccgtattgcacagcttggattccaagactctttggaagacaaacagacgaaaaaatatattattgaatctgtcaaccggcaatttaatggaactggacttactattcccagcgttattaatgattttgctcaatcatatgggatgtatgctgaagagaaaatagaaaaattgccggttccacaatttgtgagggactaatgaaagttgatgaggatagtggtggcatgtggtgtttagtaatgtttgatttaccggttaaaacaaaaaaagaacgccaaatggccactgattttaggaacatgcttttagatatgggctatgcgatggtgcagtattctgtgtatgtaaggtataccccaactcagtcggggaataggtcaacggtcaaagcaattaaggagaacttaccgcctaaaggtaaagttcgggttgttcatttgagtgatcatcagtgggcaaacgcattaagatattcaaatcttatgaaggaagaggaggaaacgcctgacttgtgtgtacttttttaagtgtaaaaagtacacacaagccttgcaatacctctcttgtatggattgctccattttatcaagagaggtggaagctaattctcagcagttttgacaacgcttgtatacaggacaccattttatcaagagaggtggaagctaattctcagcctgctgtcgtgggctggtttgttagtccccattttatcaagagaggtggaagctaattctcagctggctgccggcctctttttttatatacaccattttatcaagagaggtggaagctaattctcagcttaaaaactagttcatgcgtatccaaatccattttatcaagagaggtggaagctaattctcagcgcggctggtgcttggccccgtgggtaacccattttatcaagagaggtggaagctaattctcagctgaggcccgtgtcgaaaaaattacggcaccattttatcaagagaggtggaagctaattctcagctgaaaaaacagaaatcgccttacgattaccattttatcaagagaggtggaagctaattctcagcatacgcttatcctcaaaaaagcctttctccattttatcaagagaggtggaagctaattctcagcatttcttgggcgagttcgttgttggtcaccattttatcaagagaggtggaagctaattctcagctcaacacgttactgataacattcctgacccattttatcaagagaggtggaagctaattctcagctttatttcaacgactcaaggagtatttaccattttatcaagagaggtggaagctaattctcagcttgaggttgtatgtgtagctggcgtggtccattttatcaagagaggtggaagctaattctcagcgtctcatcggctttaagtctaagaagaaccattttatcaagagaggtggaagctaattctcagcacgaatcggtatcgtttgccgtaccgttccattttatcaagagaggtggaagctaattctcagctagtcacgccgtcctcatttcggtatagaatgcctcctttatatatttggataagtgttgtccagacttttcgtattggacgtttatagcatatatctcgtacctctgatcgactagagatcctatcatatgtatagcagattttactttactgagagcactacacttagttgtatccacgcaggtattaatcgaatttcgaggtgtgatagatcagtagcggacaactttaagtttttatctcgatgaatatgcgtaaaagagcatttttgtgcatccttgttttgataagcatagaactaaccgccataacggctggttctatgctttgtttatgtgtccaagatgaatagtggtttactactgaattataaggtgcttagtgaacggttgtttattataaaattgctggtggtaaaacacgcaaatacaaaaaataaaaatgtggaaaaccggtaaaacgaattttgtatttgcgtgttttaccaccaggagccaagatgaggatatataaaagatatatacatgtattagaggttagtttcctctcctctgtgtgctatcctaacaaataggatccggtgatcgtcccgtatggggacttttaccggatctcttttttattacatatgaaggcagaaatgtggattaatgggtaattagagtgctttaagccggtgctggtatatcatctggttagtaacgcttatcagaggggcatagtgggaacctgggtaagcgttattcacacgcggaggttcttgtgatacatggtttattcgtaatctttattattggattttattattagattattggaggagggggagagagaaccgcgaagaacgtgcgatgcagtatctgaaggccgatctcagctttgt

SEQ ID NO: 3143 - DNA, 4820 bp, synthetic construct
  misc_feature 1..4820: note = Synthetic
  source 1..4820: mol_type = other DNA
aaggtacaacagcgattcgtggagagtctgtgaattgaattgagctatatctatatgggaaactgagaattgaaaaaggcggaaatgataataggtaataagattataacggataggtgagtgttacatttaatttagtgttatactaaaagtgctaattctcagtaagaacggactagttagccgttttgaatgctcacggtttaataccgtaggggagagtctttgggctctccccgtttttatactctaataaagcttattgaaacgaaaatcaacacataaatatcaaatttcttcgacgtgtctttatcagaggagctgaatttttctgataagatactgccatgaagaagcaatatgaagtcggcatcgatgtcgggcttaattctaccggattagcggctattgaaattgatgagaataacaatcctgtgcgtatccttaaggctataagtgtcatccatgacggcggtgttgaccctggacagcagaaaagggctttcagccgcatgaaacaggccggtatagctcgtcgcaccaggcggatgcggcgtcggcgccatgcccgtttgcagagattagataatgtgctcgaacggctgggctgcccgttgacgagtcttgtctctgcagaaggtgattcattcgaaccgtggttttgcagggcgaagcttgctgattcatatatagaaaatgaggaaaagaggaaggaagcattttctattgcaattcgtcatattgcaagacatcgtggatggaggaatccatataaacagattaggacattgcatgatgataatcctctgtcagaacaatataacgagttagccaaacgcttttctgaaaaggtttgctctgaaaaggttggcagagaggctgacatttcaaggacacctggacaaattatcagagactatatccagtctaccccaggagcagcacctcgattgcgtacaagtactacgaaagaaggtatgctgccgactcggcttatgcaggaggataatgcctttgaaatcagaaaaatatgtgagatgcagagagtatcaaagaaagatactaataccatattagatgcggtctttgaccgtgtatccccgaaagggtctgcacaaagccgcgtcggatcagatccgttgacgcatgaacccagggcttctaaagcctctttggcatttcagaaatttaggattgctgctactgttgcaaatttatgggttcacactgctgatggggacagggcgcttaccgtagatgaaaaacggaaggcatttgataagcttgcagatcagaatactgtatctgagtctttaacttggattgatattgctgatgagctaggtatcaatagacacgatttgaaaggtattggcggcatccaggatgatggcgagcgtatctcaaaccgcccgccccgccttgatagtataaaggcaatctctaaaatttcaaacaagagtttcaagaaatccctatttgaatggtgggggaaagctgatgaatgttcacaagaagctatgcttgaactgttagggaattcagttgatattgatgccgtcagggatcggcttgaatatgctgatccgcttgatttcattgatcagcttgatgatgcacagcttggtgaattggataaagtttcgttgccatcaggtagagcgtcatattcgatggcagcattaaagaaattgactgatcggatgctgagcacaaatgacaatctgcatgatgcgcgaatctatttgtataatgttcctagtacatggcgcccatctgcagctcccattggagagcctgtaggcaatcctgctgtagaccgtgtgctaaaaattgtaaaccgatttttaatgaattgccaggatcgttggggctcgcctcaatctgtaaatatagagcatacgcgtcagggattccattctgcatctgttgctctgaagcttcagcgagagacagaggctcgtgcagaacatcggcagagcatttttaatgatattaagggtattaagggtaaggaaggggaaacgaattcgagagagtatgatatccgtcgcatggaggctgtccagcgccaaaatgggaagtgcctgtattgcggaaacgagatttcttttggtaattgcgaaatggatcatatcgttcctcgtaagggaatcggggcaacgaacacccgtactaatctggctgcagtatgcagtgagtgcaatcgcttgaagagcaatattccatttgcctcatggtgtgaaatggatgctgcaaaagagcgtgatgtggatttgaaggaagctattgatcgtgtaaataattttatttttactaacgagtactctgcacaagctagaaagaactttaagaaagctgtaatctccaggcttaagcaaacgactgaagacgaagggatggataaccgttcaatagagtctgtggcgtggatggctgatgaacttcacaggcgtatcgactggttctttaattcgtcaaaatatatggatacgacgggtgaagagtcaggtaacttagatactaaagtaagggtttatgctggtttcgttaccggtattgcgcggcggtattccggtattgatgggagaatccattttattggtgcacattataaaacccgtttagaccgcaggcatcatgctgttgatgcttgtgttatcgcgctgatggagcataccgttgctgaggttctggtcaataaagctcagcttagaaaatcccaagagtttatgaaggatcctaaagctggtgatccttactggaaggattatcctgggcagcaagataaagggttttattcttatcagcagtggcagggcaagatgtattcactgcttggcctaatgaatgatgcgctagataatgaccgtatacctgttttgcgtgataagcgtttgcgtcttgggaattcccgtgcgcacgacgatactatccaaccattagatagggtaagacttggtgagaagatttctaatgaccaaataaggaaggcatctactcccgctttgtacactgccttagtacgtgagaaagattatgacacttctagcggattgccagaaaatccgaatcgtgtaatacatgttaatggacgtattattcattcggatgaagaaattgctttctttcgaaaagacgctgcccagattaaagttggggatggttctgctgagattggtaatagtatccatcatgcccgtctttatcgttgctggaatgaaactaagaaaggtaagaaagaggaattctttgggatggtccgtgttttccaggcagatcttctaaaagccagggattcggatttattcgcatttcccttagctgagtcctctgtatcaatgcggtatgctaacaagagtgtaagcaatgctgtgaaagggggtagagcagaatatattggttcattttgtgtaggtgatgagatcgcattaaatctgagtgcgattagtcgagataacgaaagtatcaatgattatcgtgactttattttaggctttggcggttttaacaattacacgctaaagcattgggtaatatctggttatgaggatacttctagaattaatctgcgtccttcacaaatttctgcggaaggcttatcttcaattagtatttctaaaaaggtggaaaaaatattaaataaatcatggcgaatttcaataaatacgttagctaactatgatccaatcgttattcggcgtaatgcctttggtgaagaacgatgggattccaagaatggaatgttgacttcttacaggtggaaggaatagatgtagaaagaggcaactatgcaaaatgcgtggcgggtagttgattgtacgaatctgtcagggcagctgaagtattcgcgtggccatttaaaagtgtgcaatgaccatgataataaaaccaacgtaattgcattatcagacatagctgttctacttataggcctgcgttgcagctgtagcgcagggcttcttcatcagtgtgcgcaatatggtgtgagtattatgccatgtgattggaggggtgttcctgtggcagcgtttcatccttggctggaaactcatacacgaatagcagccagacaaattgctcaatcatatatgacgatgcctcggaagaaaagcgcatgggcaaaggtggtaaaaaataagattgccgggcaggcttcctgtcttaggatccttggcaggcagggtgaaggaagcctccttgaactggcacgtagtgttcactcaggtgatgctactaatgttgaaggtcgtgctgctagagaatattggcgatatttatttccaccagcagagggtttcaaacgtgttgcaggagctggatatgggcggaatgcgcaattggattatggatatatggttttgcgcggttttactgtgaaggcggtaatctcagctggtcttaatccggttttaggtattaatcatcatagtggcagtaattacttctgtttagctgatgatttaatagaagtttttaggccggcgattgatgtccgtgttgcacagcttggattccaagattctctggaagacaaacagacgaaaaaatatattattgaatccgttaaccggcaatttaatggaactgggcttactattcccagtgttattaatgattttgctcagtcatatgggatgtatgctgaggagaaaatagaaaaattgccggttccacaatttgtgagggactaatgaaagttgatgaggatagtggtggcatgtggtgtttagtaatgtttgatttaccggttaaaacaaaaaaagaacgccaggcggctactgattttaggaacatgcttttagatatgggctatgcga

SEQ ID NO: 3144 - DNA, 20288 bp, synthetic construct
  misc_feature 1..20288: note = Synthetic
  source 1..20288: mol_type = other DNA
ctctgtcagggaatctagcgatcatttcgctataagcaacggtcttcaaaccgccgggataacgagagtgtctgatatattccttgctggtggcctttgaaccagtgagcaccactttatcggcattcaatactataacaaaatcgccaacatccatatgaggtgtaaatgtaggtttgtgcttaccgatgagcacgcgagcgatctgagtagccaaacgacccaaagttttgccttcggcgtctactacgtaccaatctttttttacctcgttggccttgacggcatacgtcttcactgccagtcctccacgtcgtgccggccagacccgaacctctaaaagcggggccaaaaaaagccggtctctaaaatctaaaatctaccaacttgctgcaaaagcaaaaaggcagttccaaatcatatgcggcatagtaatgccacgccgctttctagtcaaggaactctgcaaaatcttcctaacggggacaagaaggcttcgaaagatctaaccttaacaaaaagttacgattcagctaaggcattatactaaaaaaaagctttaaagtgaaggccctttaagcctatttttcatttttttcttatatagaagcaggcaacttaataaatagccaaacaaatagcccaatgagaacgagactatacgactacagagtctgaagaaaacgctttttccagctttagcaaaggctgaataaaaaggattacgtgacgctttctacaaataccgctcccagtagcaaggcgttttggggctttttttattaaaaattagccccccaaaaaatgctaaaagacaaggggcattggggagtggatattctttctgcaccgattagcgatatactgtcaggttcagcctatgcaagctacagagcagctttgctaagcatgcagaaagttatggctgagtctgtgtctgcttccctaggggtaatatatacaaacggagaggaaatatcccattattcgttaccttacgacgaagtccatcaagcgctcttttcctccgacaaactgagagctgaactagctgagcgcttgcaaaaaagcaattataccgagacagcctttatttttaccttagttggtaatttattcttctctgtttgcccagtttttagcaaagctgacgctccacctttagcctatgttttgatcgggcccttctggcaaaattttcccaatgaataccaaagccagaaaatacagagttattttagttggagcaatgagcaactagctacagctttttacaacaatcctcctaccagatgcatacctcaagaaagctgtaccaacttagccaattctatggctaattttatagctcaaatgagtgaaatgcatactaagcagcaagaagctgtcaacactttaagttgtctttatgacatgagcaccgatataggccgttctttagatgtaaatgaaattctgccttctatactggacaaagctatgcgtgttcttaaagccgagtcaggttgtatttccttgcttgatgaaagcaaacaaaatcttcacctctatataaaggaaggccccgataaaccgttcagttgcactcacaatgtacctataggtaaagatttgcgcgattggcttaacgaagagaattgtgaaagcatcaccaacagctccgactcgtgcactctcaaggtgcccttaagtgatgacagctcctgcctaggtagtataagagtggtttcaccttttaaaggccactacgactctaacgatttgcaaatcttacgcattattgctggctattccagctcttctttagctaaggccatcgtataccaaaaagccatgcgccaatacgaagaattgcgggctttgcaggaaataggcaattccttaaattctagtatcgacgttcccaaaacgttacacaaagtgctagatcatgcttgctcactcctaggagccaaaaatgcttctcttatgcttttggagccagatcgtcagcatttgcgtatccgtgaagccaaaggtttaagcgaacaagtaatagccaacactagagttaaattgggagagagagtttctggcaaagtagccttacaaggtcaccctgttagtttgccacgtggtctgagttcttccggagaagagctggaagcagccctttgcgttcctttaaaagtttccgacaaagtgatcggcgttttaaatgtgcgcggccacaacgattccaacgaatttaccgatgacgatattgatttagctactcgcttagcttccatgtcggcagcggctatcgaaaatgccgaattacacaacaaattacaaaatttatttgttgaatcaattacggccttggccaacgccatagatgcccgcgatccctatactcgcggccattctgaacgtgtagcagctttctctgtactcattgctgagcgtctgaattttaccgctgaagaaatttggaatttacgtaatgcagctttattgcacgatataggtaaaatccgtattcgcgacaatattctcaataaaccagacaagctcagcaacgaagaatacgaagagatgcaacgccatgcggtctatggcgccggcattatgatgcctgtaaagagcttccgtccgctcattccttatattttgcaccaccacgaatggtataacggagcaggatatcctgatcgcaaacgtggcaacgaaattccactttgtgcccgcattatttgcgttgccgacagttttgacgccatgacttcagatcgcccttatcgcaaaggaatgcctatagaaaaggctataaaaattatccgcgaaaacagaggttcccaatttgatcccgacatcgccgatatttttatagaactctactatgaaaataagttgcaaccaattatgaaaagcctcaatagcacaggctcacacgacgctttggaaggtgacggacagcatgacgtcatcacttcagacgttggaggcaaagctgttgtctggcgcagcgccataaaagaggctatagaagctgtaaagcacaaaaggaataactaaaagaagactagccttcaaaaattaagcttttaatttgtaagcaaaaacagtcaaagctaattcgcgagctaattcggccgccaaacgagaggtttgagctacgtctcttgtttcctgatcttgcacatatactccgcacacttgtaccaaaggaacgggggcaccttccaaagagcgcaaagccttcaaaagctctctgggctcatagccaaaaccagctggacgttgcacagccggcgcccacacaggatcgacaatatccatattcagaataactctgctttgcactccgttaagttcggctaaagcagtttttatggcaatatccagatctacttcatgattggccaataagcgctgattatatctgacccaatcgcactcttctgaagagaaattgcgacttcccaaataccaaacggtacgttcttctggcaaaactccctgattgtaggcatcacctatagacatgcccatatagggaacattgacagtagctcctatatatatagtgggaagttgaaaatcggcagaagtatcgccaagcaataaatttacgccatcaaggcgctcgttactgtcataagctgagaaattggtgaagctgcgtctcaatttgggcgaatagggagagatacctagggaatattctctgattgccgcagcagtatcgtcaatgccgtagataagtaaatcgcgctgcaggtcaacttcctgttcataaagtgcctcagtacctaaaaaaccgaccatctcagctttccaaccctttgtttaaatgtgaacatacttttcgccgagcgagttcgccacgccagccgacgaatccgccaccccctttccacaccagttatcctttctccccttcctttttccttgccaatatcccaaagaagataagattcatgcataaaatagcattcttaatctgcatataatatatggcaagaaggatcaatttatggtcatgtggtataatacaggcgaatttttttatgtgttctgatcaacgcagctttttcaaaaatttagttgccgtttttgtgtgtcttacagcagtaagcgccattattttttgtgtcaaagcggctccggtatgtgctgaagaagggcgctacccggagaacttagcttggcgcttggttaccgagcgagagttgtctttaatcactcagtgcccagaagctttccatgagcgagagcatagcgctcctcccctttttgaagctccttccgtccctatggacggcctggaagtttttaccagttccgcttcaaaaagcttcacctcaagtacagtaccttctacctgggaagtgcctccttttgcagttatcggccctccgcttcccgagcaaaaaaagagctcttcttctcaggttcaaagtacttctgaagcttctagcaatttcaaaaatgcttttcgcccttcggatcctgtaattgtacctgccgtttttggcgaaatttcggccgattccggtcgagcagagttgcccgatcctaatttgcgccctttaaaagcacaatatttggacaaactcaatcgaccagacactcaaatgcctacgccctttagtctgcgtcgctaccacactaaaagcttaggatttttccaaatagctctctatggtaacgacaagggactgttgacagaacaaacttataacacacttagagcagcagctcccaatttgcgctctctcaaaggctttggctccaaagcttttatatctttcctccctgctccagagccagaaaagcctttcaatttagagacagccaaaggtgaatttactttttctgcacttgaacctgaaggagacgttcgtttcgatcagctcgatccggggctgattaagtctagaaccgctcccagtttcaataaaattcccgtcacttctcttcctgaagggtttgatgaggatttgcgccgtcagttgacggcttctcaatataaaaatatcaggatcgaagaagatcctgcgtctggccagtcactttacgctggagtcagctctggtaaagaagaccagtcggatagtaaatctgacaaatctaacgaccaaactaacaacagtaacagtgctggggatctttttgccggcaatttagcaacgtctgccaatgacgctgattctgcggacttaaatccctttgctgtgaagactaacttctccaaagaccttaagggtatgtacgttatggaaatctattatccgcagcagagcctagtttgcgaattagctgccgataccaggtttgccgatttacgcgccatgctcgatatagctcttttagtgcaagcacgtatgcaaaggtggtaattatcgtccaatctccataagcccgaagcgacaaaataaaacgttttacgtcttcagtggtcaataaaggcattttttagtgagaacggccccagttaagttctgttgttccttctaatgtaggaactcctgtttcttgttgtctttttttgtaaaaaggggtttattttttgtgcaattgtgttaatatagcgcttgcatgagaccacgtatgtctgccagcaacacagggaggtcagtagttggacgattcggtcgtggagttccgagacgtaactcggcaatatggctctgtgacagccgtcaaccggatgaacttatctattcatcgcggtgaatttttttctttgttgggcccgtcagggtgcggcaagacgacgaccctgcgcatgatcgcaggttttgatgaacccgataacggggaagtctttataaatggacaggaagtaactcatcttcctccatttcagcggcaagttaatactgtttttcaaaactatgccctgttcccgcacttaaacatttacgagaacatagctttcggtttgcgccgcaaaaaagtaccggaatcggaaattgccaaaaaagtcaaatgggctttagaattggtacagcttgaaggtaccgaaaaacgccaggtgaatcagctttcgggagggcagcagcagcgtatagccttagcgcgtgccttagtaaacgaacccgaagtgctccttctggatgaacctttagccgctttagatcaaaaactcagacgcgagatgcaatttgaattgaaacgtctgcagcgcgagttgggtattacttttgttctagttactcacgatcaagaagaagcccttactatgtcagattcagtagcggtcatttgcaagggtaagctagaacaagtcggctctccggcggagatatataatcatccttccaccagatttgtagccgattttataggtacagccaatttcttgccggtgcatattcgtcagattcacaatggcaaaacaactgtaaaccttaccgggcgcgatattttagtacctactcgcaagggtttagctgaaggcagttgggctgatttatctattagaccagagcgtatccaagtattgaaggaagcctcagaagacggtatcagcatacctggcacagttattgacagtgtatttatgggagctcacacacgtataaatgtgcgtgtgggagacaagtatacagttatggctgagcgccaaaaccaggatcacttgtacaattctgagttttcccgaggcgattctgtgtggcttaattggggcatagccagcgccactctccttccccaatcgaacaacaattagcaaacctattatgaaaaagcattctttgcgagtgctggctcctgacgcctctcttttgagcaggcgtcagtttttaggatacacagccggtgccattctagctatgtgtatgcctggctgcgtatcttcttcagagcgcagactcaacatatacaattattcttactatatagctccagatacagtaaaaaacttcatcaatcagaccggcatttctgtagtctacgatgagttttcttctcaagatgtactttttgccaagctgaagttaggtgccggctacgatttagtagtggcttcagattatatgttgcgtcgtttgatccgtcagcaaattatagatactgtcgacggcttcaaatattacgacgatatgatcgatttagtaaaaaaagagccttggtcttctttgtgccgctattgtgtgccctacctttggggtaccactggcatcggttacaaccgcaagtatgtgaaaaaaattccaacttcctggaatgatctttggaatgaagattatgtaggccgagttactatgctggacgaaaagcgcgacgctataggtgcagctttaattaagcttggctataacggcaactcttgcgatcccaaggagctggctgcggcccaaaaagagcttgcccatcagaaacacattttgcgtcaatataccaacgattatatcgacggtttggctagaggcgaaatttggttagctcaggcatggagtggcgatatttctcgtgccaaagatgccaatcccaatattgattatattttgcccaaggaaggcagtttcttttttgtagattcttggtgcattcctaaagatgcagctcataagcgtgaggctgttgagtttcttaattttgtcatgcaaccggaaattattgctaaagtgactaactttaccagttatcccaacactatcgcaacttccatgccttacgtcagcaaagaattgataaataagcctttaggatatccgcctgcagaaatgatgaagcgcacttttgctcaggacgatattggcgccgaagaaaaaaattgggataaaatgtgggagaatataaaatttaaaaactaatggctaacaataatttatctcctctcgataaaaccgagcaaaaaatcgacgcttcaaaccacaaagataattttatagaaagcggacaagacaataattcaaatacggtgtcgccagccccgattaagcctgtcaaacaaatgagcaaaaaggccatcggtatccttttggtgacgccttttgtgctttatattgtcactttcttcctattgcctttgggctcggttatttctatgtctacccatacaatcaatgatgattatatgctaacttcagcttgtagcttagaaaatttccgtaccgtatttaatgccgacaacttgcctattttgttgcgttcagctaaatatgcggcttgcacaactttattttgtttgttgcttggctaccccttggcttggtatatcgctcgttatggtggcaagtataagcctttattgcttattttagttatgttgcctttctggacttcatacttaatccgtatttttgcctggatgacaatattgcaaagtgaaggcgtcttaaatacttttttgatcagcgtaggcttaatatccgaaccgctaaacttattaaatacacacttttcagttatattaggtttaacttacggatttttgcctttcgccattttgcctctttatgtatctttggaaaaattggatatgtctcttctggaagcagctgccgatttaggagctcctccgagcgaaactttctttaaagtaatttttcctctctctttgccaggtgttactgcggccagtttgctcacttttgtgccggccatgggcgattttgtcactcccgacgttttgggcggagtcgatactatgatgattggcaaccttattcagcaacaatatttggcctttttcaattggccattgggctcagctttatctttggtattaatgggcattatgctcctctctattttggccttccttaaaatgtccaactctatggagtctttggtatgagtgtacctcgcctttccgaaaaaaaacctccttggtacttgcgcttgcatactttgtgcgtgtacctattcttatatgctcctattattgttttggtgcttttcagcttcaatactgataggcgcaacacaacttggcaaggctttactttggattggtattttagccttttccaaaacgaaactattttacgcgctttaggcaacagcttaaaagtaggcttatgtgccacattttttgctactttaataggctcattggccgctttgggcttatcgcgctatgaatttaaggggcgaggcttagtcggctccttagtatttattcccctagttgttcccgaaatagttatggctatttctattttgacgcttttcctcagcttaggcgttaaattgtcattatttacagtaattctggcccatattgctttttgtattgcttacgtaacaattactgtacgcactcgcttagccggcctcgacccttctctagaagaagcggccgccgacttgggagctactcgctgggaaactttccgcctggtcaccctgccccaaatttggcccggtataatttctggcgctctcctctgctttacgctttcctttgacgattttgtcattaccttcttcaacgccggcgtaggcgcaggcaacttacctatggctgtgcactccatgctaaaattcggtgttactccggaaataaacgctatttctactattatgctcgttttcagcatatccttaatggtagtttatacctttattgatcgcccgaaatcataatagcgccaagtgcaatattggcacgagcgcagaaccgtcaaagccgcctatcgctaaagtgatggcggctttatttttaattgaaagtaacttttatttttcgccaaaaaaatcacttgtaccatatttgctattgacatatattggtaaaagttatagtatgtggttactttcttgtaccacaacgagaaacatttaggttgctatgatcaggtagtataccttaaagcaacggcccggccgcacgtttttcgtgtgaccgggccgtcttcttttaaccatattttgttcagatatttgcgatctgggcctgatatgcagtagctaaacgaccgacttttgcttttttttgacagcttataaattaggtgcgaaagttggctgaaatatagcggccttctaattaagggcacctttttagaaggagagatatatgcattacattttgggcctagatattggtattacatcaattggctgggcagttattgagagcgaccaagacggggttccatttaaaattgctgatttaggcgtacgcattttcaaagccgccgaacagcccaaaactggcgccagcttagccttacccagacgcagtgctcgttctctaagacgtcgcttgtggcgtaaagctcatcgcaaagagcgcattaagctccttttagacaaagttggccttattagcaaaaaaaatttagaaaaactgttctcagcttcaagtttcgaaaaagacgtttatactttacgtgctgaaggcttagatcgcaagctcaataacgaagaatgggcccgtgttctctatcatttagcccagcgtcgcggttacagatcgagcagtaaagcggaagaagcagataaagacaataaagaagctggaaaattacttaatgccgttaaaagcaattccgacaagatgaagcaaaataatttccgcacagttggcgaaatgttttgcaaagataacagcgatttattccaagtaaaagatggtagcggccacattgtaggacgcaagactcacaacacctcaggcgtttacgatcttactatagctagaaatttaattgaagcagaagtacacaaactttttgctgctcaaaggcaattgggtaatgcttttgctactgaaagtatagaaaatgagtattgcgagatacttctttcccaacgccattttagcgacggccccggtggcgagcgcacttttaaatttgatttgcgcggtaattgtactttcgagaaagacgaattgcgagcttttaaagcttgttacacctttgagtatttcaaattattgcaggatataaatcatctgcgcatcattcctgagtatagaaaaggttctgctaagcaaattcgtcctcttacgccagaagagcgacaaaagattatcgatttgtgcctaaaatctcccggtctagactttagcaaattgcgcaaagagttaaaacttgaggatgatgagctctttaaccgagtaagttacgatgtcaaaaagaaaaagggcaaaaagaaagacactgaagagcaatcagaagaacaattaactcccgaacaacagcgtcttaaatgcgaaaaagctgcaaagttccagcagatgcaatcctatcatgagatatgcaaagcgttggataaagttgccaaaggtactattagcaaactttctcatgatcaattggatgcaattggcgaagctctcagtctttataaagctgacgacaagcgccgcgagcgtttagagcagatcggccttagcaacgaagagatagaagctttgctgccacttgattctactaaagctggtaacttatctttaatagctatgcgcaagctcattccctacttagagcaaggtttaacttacgacaaagcttgtgaacaagtgtacggcgatcatcgcgctcagtataatggtgagcgtatgccattgctttcttttggcaagcttaaagaagaaggcgccttggattcagtaaataatccagtcgtcttgcgtgccattgcccaaacttttaaggtagtaaatgccattattcgccgctacggttcgccccaagctattcatattgaattagctagagatatgaagcgcaactttacagatcgccaagatattaaaaagaagcagatccgtttgaatccggtgctcttatttggcatgtgccttatagcaagtgttttgacgatagttataacaataaagttttagtcttttcttcagagaaccagagcaaaggcaaccgtctgcccttagaatatatgttagctgaaggcgacgaagacaagcttgataattacgttactttagttgaagcctttattaaaaatactcgtaagagacagagacttttaaagccttgtttaactgctgaagacagcagcgattggaaagagcgcaatttaaccgacactcagtatattactaaagctgtagccgatattttacgtaactatttagcttttgaagaagactcaccttttgctaaaaagccggttcgctctataaatggcgccgttactgatcaagtacgcaagcgcttaggcttgcaaaaacatcgtgaagaaggcgacttacaccacgctatggatgcagccgttatagctgtaactactgacggctatattaatagaattagtcgttacactcaacgtcgcgagtttggcaagcgcattggctgctataaagacaaacaaaccggcgaaaaggttgaaattgaaaagcaaaaaggacaagctcctttgtatgttgacccagaaactggcgaaaaactgaccgaacaagcgtttgatcaaaaatatgctcctactttccctgccccttggccagaatttactaaagaattaaaagccagaatggcccccaacgccgacgaagctattcgccagctttatttacctagctatggctctgaagaaataaagcctatcttcgtttcgcaaatgccgaatcgtaaggttagcggccaagctcacgccgaaactattcgcagcgccagggtagatgtagatgaaagcggtaaggagcgtataattgccgtagccaaaacgcctttaactagcttgaagctcgataaagacggagaaattgagaattactatatgcctagtagtgatcgcttactttatgaagagcttaaaaaccgtttaaaggcttacaacagcgctgaacaagcattcaaggaaccagtgtataaacccaagaaagacggcagccaaggccctcgagtttataaagtcaaaacttataagccaaccacttccaacgtaaaagtagctggcggtattgctgacaatggcagcatggttcgtatcgacgtctttcacatcaaagaaggtaaagataagggctattactttatccccatttatgtagccgatacgattaagagagagctgccacaaaaagcggtagttgcggctaagcctatcgatcaatggaaagaaatggatgataaagattttattttctcattgtatcctggagacttggtgagggttgaacataaaaaaaatatagtatttcaatctacagataaaaatagtagtgacacaatatcttgcaaaaacttgctgacttattactcaggcgccaatattgcaaaaggctcaattacgattaccaaccacgatcgcagttatatagtgcacggactaggtatcaaaactctgcaatcacttgaaaaatacgaagttgatgttttaggcaactaccacaaagtgcgtttgccggaaaagcgtcaaactttcaacttgaaatatagccagaagaagcgatagctagtggagggccggtggagtttaagtctgtttatatagccaatccggcccgcctgacggtgcgccgagagcaactggtaataactcaagatagtgaagttaccattcctatggaagatattaccagtttgttagttgaatcgcgtcaagtttccgttacttcaactgccttgcaaaagctagctgaatatgaagtgaccgtttacttttgcgacgaacaacacttgccctcggccctcctcttgcctttaaattctcattgccgacaactaaaagtattacaagctcaaatagctctcactaaacctcgccagaaacaactttggcagcaagtagtagccgctaaaatcaataaccaagccaaatgtttggagctattgcaaaacaatggctacctttacttgcgaactttagctaagcaagtgcgtccaggcgatcccaataacttggaagctatggccgctgctttttactttcctaacctttttggagtgaatttcactcgcgaacttccctgtctaattaacagtgctctaaattacggctattctatagtgcgcggcgctgtagctcgcaatttagttactcgcggtttagagccttgtttaggcatttttcaccacagtcagcttaatcaatttaatctggctgacgaccttatggaaccgctgcgacctctagtcgatctttttgtagcttccaagcttaaaagtgaagacgaagagctgacccccactatcaaaaaacaacttttcaaccttaccaactatatgttaaagcaaggccccaagcgctatcgcttaatttctgctattggaaaaatggccgatagttttaaacgcgctttaactgacaaaagtgaaattttagaacttcccgagcttatacctttggagtcttataaatatgagtaagcttatgagaatgatcgttttttttgatttaccggtgcaaactaaaactcaacgccaagcggccaccaaatttcgcaatttcttgcttaaagatggctactatatggtacaattttccgtctacgctcgcatttgcaatggttttgattccgtaaatttgcacgaagagcgcttaaaaaaaaatatccccgagcgtggcctaattcgtttacttacagttacagagaaacaatacggcaattccaaagtattgttaggcccgcgcaacgtcaaaactggcgattctttattttgtgaagagcaaatcttcacttttttttcaagctcccagagcgcaatttccgcttttttatcggcaattacgctccgtctattataccacaacgagactcaaaagggagctacaacagcttttattcttgtgtcaattttgtcttgattataccacaacgagactcaaaagggagctacaacaagcccaatcgcgtcaatagccgcagtaaaattataccacaacgagactcaaaagggagctacaacaaaacttaattgcatcagcgaaaagcctttattataccacaacgagactcaaaagggagctacaacgttcatgaatggtattatgcttacgcttagattataccacaacgagactcaaaagggagctacaacaccatgtcaaaagtgccgcataacgtccaaattataccacaacgagactcaaaagggagctacaacttagcgctgaagtcagtaaatttagaaataattataccacaacgagactcaaaagggagctacaacattgtacagtttgccgtcgcttatttccaaattataccacaacgagactcaaaagggagctacaacaaactccctgcctgcttgtgtacaaaagaaattataccacaacgagactcaaaagggagctacaacgctgaagataaggcagagctggagcacgaaattataccacaacgagactcaaaagggagctacaacggttcctacaacggttcacagaatcaactaaggcatatcagcattataccacaacgagactcaaaagggagctacaacttcgcttatttgctcttcaagtttcttcttattataccacaacgagactcaaaagggagctacaacaaaatcctggcccgcttttgtcttgaaaaaattataccacaacgagactcaaaagggagctacaacgcctacctatgcggagctattagctgaacaattataccacaacgagactcaaaagggagctacaacccatagctccgccgctgtcgtcaaagataaattataccacaacgagactcaaaagggagctacaacattgatatgaatatcaagggctaaatcgggattataccacaacgagactcaaaagggagctacaacataaactcctttttcacaggcatataatttattataccacaacgagactcaaaagggagctacaaccaacaagaaactttagagagctataacacataaaattccaaggtactagaacggcgcttacgatcctactgtagccagaaatattatatcacaacgcaaaaagtttgtgcacttctgcctcgatattgtaccacaacgataagtgttagggaactacaaacaccaaggtagttgtccattctggtattatgttgtacacccacaccgtaaaagctacaacgaaaaaagctcctctagctgttgttaagctaaaggagcttttcagaaggaagaatttcttctcaccgtagtagcgagcaagaaatatttttttaacagagccaagaatcagactcgaactgacgacctgctcattacgagtgagctgctctaccaactgagctaccttggcaaccgccggtattataccataaaaattagttctggcaatagcatgtcggccaaagatttgcgtggcgcccttgactaaaagggccggacggaaaacaaagcgaaagctcagagcgatttttgacaaacttcgcaaaggagactcttattacaatggagctgacacacaattggcttaaatttaaagatttgttcttccacgatgtagaaagcggcctctctttagatattagccgcatgggcttagatgacgagtttttcgcttctatggaagaacctatgcaaaaagccttccaagctatgcgcgaattggaagccggcgctatcgccaatcctgacgaaaaccgcatggtcggccactattggctgcgtaattccgatttggctccccaaaaagagcttaaagaagaaatagacactacttttgaaagcattttggactttgcttctaaagtacataatggcgaaattcgtcccgaacgcgccgaacgttttactactattctttctatcggtatcggtggttcagctttgggccctgagttcgtggcctcagccctctctactcccgacgatcctatgcgcatctacttcttcgacaataccgatcccgaaggcatcgaccatgtattggatcaaatcggcgaagaattgcgccgcactctctgtgtagttatttctaaatcgggcggcactaaagaaacccgcaacggtatgttggaagcccaaaatgcttacgaccgcctcggcctccacttcggtcgccacgccgtagccattactggtaaagacagccaattagataaatacgctcaagccaaccaatggctggcccgcttccctatgtgggactgggttggcggtcgtacttccgagctttccgccgtcggtttactgccggccgctttggaaggcttcgatattgacgacatgcttaaaggtgctgccacttgtgatgaactcactcgcagtaccgttactaagcgcaatcctgctgctctcttagctttggcttggtttaaagctaccaatggcaaaggcgaaaaggatatggttatcctcccctacgccgaccgtttaatgctctttagccgctatttgcagcaattgattatggaatctttaggtaaagaaaaagatcttagcggcaaagtagtcaaccaaggcattaccgtctacggcaacaaagggagcacggatcagcacgcctacgtacagcaattgcgcgacggcgtcaacaatttctttatcactttcatagctgtacttaaagatagacacaatatatctatggaagtagaagacggcgtcactactggcgacttcctctccggcttctggcaaggtactcgccaagctttaaccgagagcggccgcgcttctatgcttatttccattccggaagtaaatgcttttaccgtcggtttgctcattgctctttatgaaagagctgtcggtttctacgcttctttagtaaatatcaacgcttaccaccagcccggtgtggaagctggcaaaaaagcggcgggcaaaattttagagttacaagccaaagtagctagcactcttaaagaaactggccgtgctatggacgctttggaaatagccgaagctttagatatgaaagacaacgcagaagccattttccatattgccagacacttggctgccaactctcgtttgggcattactgctgataatttgagtgccgaagctaagtttgtttacgacaaacatttagacttctagcacactaatccacattactatttgatagagctgctttctgttaaaaaaatttttttagcagacaagcagcttttttacttttttttagtgttaaaaagtgaaaatatatgaaaatttaatgatatttttgtgccaattagcaggacaaagggtatagcatttaagaagggggcgccgatcagcgacttgtttgctgtacgaatcgattatcgatttatatagcaaacaaatgccgatcttcgcattttctctctgaaaatagcccgaaaacaaaacgttaaaggaaaagtatagttgcggtgtctataaataagcgttatatacctgctcttataatagcatctatgctttgtttgggatcgttggcttgggccaaccccgaaaatgaagcacaaaatgtaactgcaaataattttcttactttagctcaagctacagaagcagacgggtttattacccataccaactctgatttgagcgacgggcataccagatgcggttggagtatccgtatccccaaaacttgggtttccattccggatattactcctggatggcctattgcggaaggctggcgaactccagatggcaagactagtataatcataacttggctcaaagatgtcaatgaagatgaatacgcaaccttgcgcaatcggcgctatctggaatcttcagagaagattgcgggacaaacgtgcaaattcttccgcaaaataaacggcccgacttttgaacagatactttatataaaacatcaagggagttattatcgcatagctgccttcggcactacgcaaaataaagctgccttgcaaaaggctatggagagctttaagtttttagtccccggcataaaaggtgccgagactcaaacttatacaaatgccaatttggctattagtttttccttgccccacggatcgaatttgatagctgagctttcagctcacggcgtcaatattttcaattctgccaaaaagaaagtggcttctttaactccgcgatcttttaccgctcagcctggccaatctttcagaggcatagctaggcaaatcgggcgcgaagttattcccgaagcttccaaactgactcgctttgagccctatcaaataagcggacaaaccggctacttagttgtttgggaaacctctagcggccaatatatcggaccgatcatatatgtgccgtacaaacacggttcttacaacgttctggaactagaatccgaagattctcaatctttggaacagttcttcaaaattgcgaacacactcaaagtcgatacttcttcagtctactgatctagtatcaaaagcacgaaagcagcaagagtggatgcttgaggtaaaaaagcactctctaagcgagctaaaatttgtatgaatgggatggactgatagatatggctaatgtaaagttaaagttgttgtatgtgttaaacttactgctcgacagcgacgaacaccacaccattaacgctacccaaatcgtcaaacaattggcgaaagagcacggtataaacaccgaacgtaagtcagtttgccgcgatatcgctactttgcaaacttacggacatgatattattgctgaccgcgataaacgtaaaggctggtactacggaaaacgccgctttgatacttggcaaattcgcttgttcttagatgctatcgccagtgcttcttttattcccaagaatgaatgcaaacgcatcagcaacgaattgattaaagagcttggccccgacgacaagcgcatgttccgcgagttgctccctaccgtttacaattctcgcaaagtagtcaacagcaaactcaaagatgttctttgtgaaattttgcaagctattgcttgggaaagagccgttgaattccaggtttattcttacaataaagtctttaagagcgtccttaaacgcggcagtttagtttacaaagtagatccctactccttagtatggatcaattctaactactatttagtaggtatcaaagagggagagaacttcctccgttatttccgcttggatcgtatcgccaatcctcatactacgggcactcctcgccgcaacgcttctgaagttttaggcgaagatttcgacaaagccttgcagcgctttacccaagatactttccacggcagcaacgatcgttcatttgaaaatgtaactatcagattcaaagacgagagctttgccaatatgtttgtagatcgtttcggtttgcctagcaaagtggtggaaaaagacgattgggtcttcgctactattgacaaagtagactatacaaatgctgtcagagcttggttgattagttactccagtgcttttgccgtaactgctcctaaagagcttaaagatctcgttattaaagatcttcgcagcggtttggaaaattacgaaaagtccgaagg

SEQ ID NO: 3145 - DNA, 13568 bp, synthetic construct
  source 1..13568: mol_type = other DNA
  misc_feature 1..13568: note = Synthetic
cttagccaattctatggctaattttatagctcaaatgagtgaaatgcatactaagcagcaagaagctgtcaacactttaagttgtctttatgacatgagcaccgatataggccgttctttagatgtaaatgaaattctgccttctatactgaacaaagctatgcgtgttcttaaagccgagtcaggttgtatttccttgcttgatgaaagcaaacaaaatcttcacctctatataaaggaaggccccgataaaccgttcagttgcactcacaatgtacctataggtaaagatttgcgcgattggcttaacgaagagaattgtgaaagcatcaccaacagctccgactcgtgcactctcaaggtgcccttaagcgatgacagctcctgcctaggtagtataagagtggtttcaccttttaaaggccactacgactctaacgatttgcaaatcttacgcattattgctggctattccagctcttctttagctaaggccatcgtataccaaaaagccatgcgccaatacgaagaattgcgggctttgcaagaaataggcaattccttaaattctagtatcgacgttcccaaaacgttacacaaagtgctagatcatgcttgctcactcctaggagccaaaaatgcttctcttatgcttttggagccagatcgtcagcatttgcgtatccgtgaagccaaaggtttaagcgaacaagtaatagccaacactagagttaaattgggagagagagtttctggcaaagtagccttacaaggtcaccctgttagtttgccacgtggtctgagttcttccggagaagagctggaagcagccctttgcgttcctttaaaagtttccgacaaagtgatcggcgttttaaatgtgcgcggccactacgattccaacgaatttaccgatgacgatattgatttagctactcgcttagcttccatgtcggcagcggctatcgaaaatgccgaattacacaacaaattacaaaatttatttgttgaatcaattacggccttggccaacgccatagatgcccgcgatccctatactcgcggccattctgaacgtgtagcagctttctctgtactcattgctgagcgcctgaattttaccgctgaagaaatttggaatttacgtaatgcagctttattgcacgatataggcaaaatccgtattcgcgacaatattctcaataaaccagacaagctcagcaacgaagaatacgaagagatgcaacgccatgcggtctatggcgccggcattatgatgcctgtaaagagcttccgtccgctcattccttatattttgcaccaccacgaatggtataacggagcaggatatcctgatcgcaaacgtggcaacgaaattccactttgtgcccgcattatttgcgttgccgacagttttgacgccatgacttcagatcgcccttatcgcaaaggaatgcctatagaaaaggctataaaaattatccgcgaaaacagaggttcccaatttgatcccgacattgccgatatttttatagaactctactatgaaaataagttgcaaccaattatgaaaagcctcaatagcacaggctcacacgacgctttggaaggtgacggacagcatgacgtcatcacttcagacgttggaggcaaagctgttgtctggcgcagcgccataaaagaggctatagaagctgtaaagcacaaaaggaataactaaaagaagactagccttcaaaaattaagcttttaatttgtaagcaaaaacagtcaaagctaattcgcgagctaattcggccgccaaacgagaggtttgagctacgtctcttgtttcctgatcttgcacatatactccgcacacttgtaccaaaggaacgggggcaccttccaaagagcgcaaagccttcaaaagctctctgggctcataaccaaaaccagctggacgttgcacagccggcgcccacacaggatcgacaatatccatattcagaataactctgctttgcactccgttaagttcggctaaagcagtttttatggcaatatccagatctacttcatgattggccaataagcgctgattatatctgacccaatcgcactcttctgaagagagattgcgacttcccaaataccaaacggtacgttcttctggcaaaactccctgattgtaggcatcacctatagacatacccatatagggaacattgacagtagctcctatatatatagtgggaagttgaaaatcggcagaagtatcgccaagcaacaaatttacgccatcaaggcgctcgttactgtcataagctgagaaattggtgaagctgcgtctcaatttgggcgaatagggagagatacctagggaatattctctgattgccgcagcagtatcgtcaatgccgtagataagtaaatcgcgctgcaggtcaacttcctgttcataaagtgcctcagtacctaaaaaaccgaccatctcagctttccaaccctttgtttaaatgtgaacatacttttcgccgagcaagttcgccacgccagccgacgaatccgctacccccctttccacaccagttatcctttctccccttcctttttccttgccaataccccaaagaagataagattcatgcataaaatagcattcttaatctgcatataatatatggcaagaaggatcaatttatggtcatgtggtataatgcaggtgatttttttatgtgttctgatcaacgcagctttttcaaaaatttagttgccgtttttgtgtgtcttacagcagtaagcgccattattttttgtgtcaaagcggctccggtatgtgctgaagaagggcgctacccggagaacttggcttggcgcttggttaccgagcgagagttgtctttaatcactcagtgcccagaagctttccatgagcgagagcatagcgctcctcccctttttgaagctccttccgtccctatggacggcctggaagtttttaccagttccgcttcaaaaagcttcacctcaagtacagtaccttctacctgggaagtgcctccttttgcagttatcggccctccgcttaccgagcaaaaaaagagctcttcttctcaggttcaaagcacttctgaagcttctagcaatttcaaaaatgcttttcgcccttcggatcctgtaattgtacctgccgtttttggcgaaatttcggccgattccagtcgagcagagttgcccgatcctaatttgcgccctttaaaagcacaatatttggacaaactcaatcgaccagacactcaaatgcctacgccctttagtctgcgtcgctaccacactaaaagcttaggatttttccaaatagctctctatggtaacgacaagggactgttgacagaacaaatttataacacacttagagcagcagctcccaatttgcgctctctcaaaggctttggctccaaagcttttatatctttcctccctgctccagagccagaaaagcctttcaatttagagacagccaaaggtgaatttactttttctgcacttgaacctgaaggagacgttcgtttcgatcagctcgatccggggctgattaagtctagaaccgctcccagtttcaataaaattcccgtcacttctcttcctgaagggtttgatgaggatttgcgccgtcagttggcggcttctcaatataaaaatatcaggatcgaagaagatcctgcgtctggccagtcactttacgctggagtcagctctggtaaagaagaccagtcggatagtaaatctgacaaatctaacgaccaaactaacaacagtaacagtgctggggatctttttgccggcaatttagcagcgtctgccaatgacgctgattctgcggacttaaatccctttgctgtgaagactaacttctccaaagaccttaagggtatgtacgttatggaaatctattatccgcagcagagcctagtttgcgaattagctgccgataccaggtttgccgatttacgcgccatgctcgatatagctcttttagtgcaagcacgtatgcaaaggtggtaattatcgtccaatccccataagcccgaagcgacaaaataaaacgttttacgtcttcagtggtcaataaaggcattttttagtgagaacggccccagttaagttctgttgttccttctaatgtaggaactcctgtttcttgttgtctttttttgtaaaaaggggtttattttttgtgcaattgtgttaatatagcgcttgcatgagaccacgtatgtctgccagcaacacagggaggtcagtagttggacgattcggtcgtggagttccgagacgtaactcggcaatatggctctgtgacagccgtcaaccggatgaacttatctattcatcgcggtgaatttttttctttgttgggcccgtcagggtgcggcaagacgacgaccctgcgcatgatcgcaggttttgatgaacccgataacggggaagtctttataaatggacaggaagtaactcatcttcctccatttcagcggcaagttaatactgtttttcaaaactatgccctgttcccgcacttaaacatttacgagaacatagctttcggtttgcgccgcaaaaaagtaccggaatcggaaattgccaaaaaagtcaaatgggctttagaattggtacagcttgaaggtaccgaaaaacgccaggtgaatcagctttcgggagggcagcagcagcgtatagccttagcgcgtgccttagtaaacgaacccgaagtgctccttctggatgaacctttagccgctttagatcaaaaactcagacgcgagatgcaatttgaattgaaacgtctgcagcgcgagttgggtattacttttgttctagttactcacgatcaagaagaagcccttactatgtcagattcagtagcggtcatttgcaagggtaagctagaacaagtcggctctccggcggagatatataatcatccttccaccagatttgtagccgattttataggtacagccaatttcttgccggtgcatattcgtcagattcacaatggcaaaacaactgtaaaccttaccgggcgcgatattttagtacctactcgcaagggtttagctgaaggcagttgggctgatttatctattagaccagagcgtatccaagtattgaaggaagcctcagaagacggtatcagcatacctggcacagttattgacagtgtatttatgggagctcacacacgtataaatgtgcgtgtgggagacaagtatacagttatggctgagcgccaaaaccaggatcacttgtacaattctgagttttcccgaggcgattctgtgtggcttaattggggcatagccagcgccactctccttccccaatcgaacaacaattagcaaacctattatgaaaaagcattctttgcgagtgctggctcctgacgcctctcttttgagcaggcgtcagtttttaggatacacagccggtgccattctagctatgtgtatgcctggctgcgtatcttcttcagagcgcagactcaacatatacaattattcttactatatagctccagatacagtaaaaaacttcatcaatcagaccggcatttctgtagtctacgatgagttttcttctcaagatgtactttttgccaagctgaagttaggtgccggctacgatttagtagtggcttcagattatatgttgcgtcgtttgatccgtcagcaaattatagatactgtcgacggcttcaaatattacgacgatatgatcgatttagtaaaaaaagagccttggtcttctttgtgccgctattgtgtgccctacctttggggtaccactggcatcggttacaaccgcaagtatgtgaaaaaaattccaacttcctggaatgatctttggaatgaagattatgtaggccgagttactatgctggacgaaaagcgcgacgctataggtgcagctttaattaagcttggctatagcggcaactcttgcgatcccaaggagctggctgcggcccaaaaagagcttgcccatcagaaacacattttgcgtcaatataccaacgattatatcgacggtttggctagaggcgaaatttggttagctcaggcatggagtggcgatatttctcgtgccaaagatgccaatcccaatattgattatattttgcccaaggaaggcagtttcttttttgtagattcttggtgcattcctaaagatgcagctcataagcgtgaggctgttgagtttcttaattttgtcatgcaaccggaaattattgctaaagtgactaactttaccagttatcccaacactatcgcaacttccatgccttacgtcagcaaagaattgataaataagcctttaggatatccgcctgcagaaatgatgaagcgcacttttgctcaggacgatattggcgccgaagaaaaaaattgggataaaatgtgggagagtataaaatttaaaaactaatggctaacaataatttatctcctctcgataaaaccgagcaaaaaatcgacgcttcaaaccacaaagataattttatagaaagcggacaagacaataattcaaatacggtgtcgccagccccgattaagcctgtcaaacaaatgagcaaaaaggccatcggtatccttttggtgacgccttttgtgctttatattgtcactttcttcctattgcctttgggctcggttatttctatgtctacccatacaatcaatgatgattatatgctaacttcggcttgtagcttagaaaatttccgtaccgtatttaatgccgacaacttgcctattttgttgcgttcagctaaatatgcggcttgcacaactttattttgtctgttgcttggctaccccttggcttggtatatcgctcgttatggtggcaagtataagcctttattgcttattttagttatgttgcctttctggacttcatacttaatccgtatttttgcctggatgacaatattgcaaagtgaaggcgtcttaaatacttttttgatcagcgtaggcttaatatccgaaccgctaaacttattaaatacacacttttcagttatattaggtttaacttacggatttttgcctttcgccattttgcctctttatgtatctttggaaaaattggatatgtctcttctggaagcagctgccgatttaggagctcctccgagcgaaactttctttaaagtaatttttcctctctctttgccaggtgttactgcggccagtttgctcacttttgtgccggccatgggcgattttgtcactcccgacgttttgggcggagtcgataccatgatgattggcaaccttattcagcaacaatatttggcctttttcaattggccattgggctcagctttatctttggtattaatgggcattatgctcctctctattttggccttccttaaaatgtccaactctatggagtctttggtatgagtgtacctcgcctttccgaaaaaaaacctccttggtacttgcgcttgcatactttgtgcgtgtacctattcttatatgctcctattattgttttggtgcttttcagcttcaatactgataggcgcaacacaacttggcaaggctttactttggattggtattttagccttttccaaaacgaaactattttacgcgctttaggcaacagcttaaaagtaggcttatgtgccacattttttgctactttaataggctcattggccgctttgggcttatcgcgctatgaatttaaggggcgaggcttagtcggctccttagtatttattcccctagttgttcccgaaatagttatggctatttctattttgacgcttttcctcagcttaggtgtaaagctgtcattatttacagtaattctggcccatattgctttttgtattgcttacgtaacaattactgtacgcactcgcttagccggcctcgacccttctctagaagaagcggccgccgacttgggagctacccgctgggaaacttttcgcctagtcaccctaccccaaatttggcccggcatcatttctggcgctctcctttgctttacgctttcttttgacgattttgtcattaccttcttcaacgccggcgtaggcgcaggcaacttacctatggctgtgcactccatgctaaaattcggtgttactccggaaattaacgctatttctactattatgctcgttttcagcatatccttaatggtagtttatacctttattgatcgcccgaaatcataatagcgccaagtgcaatatttgcacgagcgcaaagccgtcaaagccgcctctcactaaagtgatggcggctttatttttaattgaaagtagcttttatttttcgccaaaaaaattcacttgtaccatatttgctattgacatatattggtaaaagttatagtatgtggttactttcttgtaccacaacgagaaacatttaggttgctatgatcaggtagtataccttaaagcaacggcccggccgcacgtttttcgtgtgaccgggccgtcttcttttaaccatattttgttcagatatttgcgatctgggcctgatatgcagtagctaaacgaccgacttttgcttttttttgacagcttataaattaggtgcgaaagttggctgaaatatagcggccttctaattaagggcacctttttagaaggagagatatatgcattacattttgggcctagatattggtattacatcaattggctgggcagttattgagagcgaccaagacggagttccatttaaaattgctgatttaggcgtgcgcattttcaaagccgccgaacagcccaaaactggcgccagcttagccttacccagacgcagtgctcgttctctaagacgtcgcttgtggcgtaaagctcatcgcaaagagcgcattaagttccttctggataaagtaggtcttatcagcaaagagaatttagaggaactgttcttagcctcaggctttgaaaaagatgtttatactttacgtgccgaaggcttagaccgcaagctcaataatgaagagtgggcccgagtcctctaccatttatcccagcgccgcggctacaaatcaagtagcaaagcggaagaatcagataaagacaataaagaagctggaaaattacttaatgccgttaaaagcaattccgacaagatgaagcaaaataatttccgcacagttggcgaaatgttttgcaaagataacagcgatttattccaagtaaaagatggtagcggccacattgtaggacgcaagactcacaacacctcaggcgtctacgatcttactatagctagaaatttaattgaagcagaagtacacaaactttttgctgctcaaaggcaattgggtaacgcttttgctactgaaagtatagaaaatgagtattgcgagatacttctttcccaacgccattttagcgacggccccggtggcgagcgcacttttaaatttgatttgcgcggtaattgtactttcgagaaagacgaattgcgagcttttaaagcttgttacacctttgagtatttcaaattattgcaggatataaatcatctgcgcatcattcctgagtatagaaaaggttctgctaagcaaactcgtcctcttacgccagaagagcgacaaaaaattatcgatttgtgcctaaaatctccgagtatagactttagcaaattgcgcaaagagttaaaacttgccgataatgagctctttaaccgcgttaattatgatgtcaaaaagaaaaagggcaaaaagaaagacactgaagagcaatcagaagaacaattaactcccgaacaacagcgtcttaaatgcgaaaaagctgcaaagttccagcagatgcaatcctatcatgagatatgcaaagcgttggataaagttgccaaaggtactattagcaaactttctcatgatcaattggatgcaattggcgaagctctcagtctttataaagctgacgacaagcgccgcgaacgtttagagcagatcgtccttagcaacgaagagatagaagctttgctgccacttgattctactaaagctggcaacttatctttaatagctatgcgcaagctcattccctacttagagcaaggtttaacttacgacaaagcttgtgaacaagtgtacggcgatcatcgcgctcagtataatggtgagcgtatgccattgctttcttttggcaatcttaaagaagaaggtgccttggattcagtaaataatccagtcgtcttgcgtgccattgcccaaactttcaaggtagtaaatgccatcattcgtcgctacgattctccccaagctattcatattgaattagctagagatatgaagcgcaactttgcagatcgccaagatattaaaaagaagcaagacaataactggtcttgtaatgatagaatacgtcaaaaagttgaagagtacaaaggctcggcagctaccggtcaggatattgtcaaaatgaagctctatgaagagcaaaatggtgtttgcctatactcaggaaaacaacttgatattcataggctttttgaagttggctatgccgaagttgatcacattgtgccttatagcaaatgttttgacgatagctataacaataaagttttagtcttttcttcagagaaccagagtaaaggcaaccgtctgcccttagaatatatgttagctgaaggcgacgaagacaagcttgataattacgttactttagttgaagcctttattaaaaatactcgtaagagacagagacttttaaagccttgtttaactgctgaagacagcagcgattggaaagagcgcaatttaaccgacactcagtatattactaaagctgtagccgatattttacgtaactatttagcttttgaagaagactcaccttttgctaaaaagccggttcgctctataaatggcgccgttaccgatcaagtacgcaagcgcttaggcttgcaaaaacatcgtgaagaaggcgacttacaccacgctatggatgcagccgttatagctgtaactactgacggctatattaatagaattagtcgttatactcaacgtcgcgagtttggcaagcgcattggctgctataaagacaaacaaaccggcgaaaaggttgaaattgaaaagcaaaaaggacaagctcctttgtatgttgacccagaaactggcgaaaaactgaccgaacaagcgtttgatcagaaatatgctcctactttccctgccccttggccagaatttactaaagaactgaaggctagaatggcccccaacgccgacgaagctattcgccagctttatttacctagctatggctctgaagaaataaagcctatctttgtttcgcaaatgccagacagaaaaattagcggccaagctcacgctgaaaccattcgcagcgccagggtagatgtagatgaaagcggcaaggagcgcataattgccgtagccaaaacgcctttaactagcttgaagctcgataaagacggagaaattgagaattactatatgcctagtagtgatcgcttactttatgaagagcttaaaaaccgcttaaaagcttacaacaacgaccctaaagaagcttttaaagagccggtttataagcccaagaaagacggcagccaaggccctcgagtttataaagtcaaaacttggaagacgactacctccaatgtaaaagtagcaggcggtattgccgacaatggcagcatggtcaggatcgatgttttttatgtcaaagaaggtaaagataaaggctactattttattcccatttacgtggccgatacgattaagaaagagctgccacaaaaagcggtagtccaaggcgagtcaatgaacaattggaaggaaatggatgataaagattttatcttctcattataccctggcgacttggtgagggttgaacataaaaaaaatattgtaatgaaatcaacagccaaagatagcagtaacacaaaatctcaaaaagtctggatggcctattatgtgtgcgctagcatatcaactggttcaattaacatcaatagtcatgatcgaagctatggtataccaagtttaggcataaaaactcttcaatcatttgaaaagtacgaaatagacatattaggcaactaccacaaagtgcgtttgccggaaaagcgtcaagcttttaatttgaaatatagccaaaaggaacaataaccaagaggagggtcggtggaatttaagtctatttatatagccaatccggcccgcctgacggtgcgccgagagcaactggtaatatctcaagatagtgaagttaccattcctatggaagatattaccagtttattagttgaatcgcatcaagtttccgttacttcagcggccttgcaaaaactagctgaatatgaagtaaccgtttacttttgcgatggacagcatttaccctcggccctcctcttgcctctcaattctcactgtcggcagctaaaagtattgcaatctcaaatagctttaaccaaacctcgccagaagcaactttggcagcaagtagtggccgctaaaatcaataaccaagccaaatgtttggagctattgcaaaacaatggctacctttacttgcgaactttagctaagcaagtgcgtcctggtgatcccaataacttggaagctatggccgctgctttttactttcctaacctttttggagtgaatttcactcgcgaacttccctgtctaattaacagtgctctaaattacggctattctatagtgcgcggtgctgtagcccgcaatttagttactcgcggtttagagccttgcttaggcgtatttcaccacagtcagcttaatcaatttaatctggctgacgaccttatggaaccgctgcgacctctagtcgatctttttgtagcttccaagcttaaaagtgaagacgaagagctgactcccactatcaaaaaacaacttttcaaccttaccaactatatgttaaagcaaggccccaagcgctatcgcttaatttcctctattggaaaaatggccgatagttttaaacgcgctttaactgacaaaagtgaaattttagaacttcccgagctaatacctttggagtcttataaatatgagtaagcttatgagaatgatcgttttttttgatttacccgtgcaaaccaaaactcaacgccaagcagccaccagattccgtaattttttgctaaaagatggctactatatggtacaattttccgtctacgctcgcatttgcaatggttttgattccgtaaatttgcacgaagagcgcttaaagaaaaatatccccgagcgtggcctaatccgtttacttacagttacagagaaacaatacggcaattccaaagtattgttaggcccgcgcaacgtctacgactaccctatccaattggaagaattttaaaaataaagaatcgccagtctttacgaaaaaaactggcgattcttcttttgtgaagagcaaatcttcactttttttaagctcccagagcgcaatttccgccttttcatcggcaattgcgccttatctattataccacaacgagacccaaaagggagctaca

SEQ ID NO: 3146 - DNA, 6249 bp, synthetic construct
  misc_feature 1..6249: note = Synthetic
  source 1..6249: mol_type = other DNA
ggcggagtcgacactatgatgattggcaaccttattcagcaacaatatttagccttcttcaattggccattgggctcggctttatctttggtgctaatggccattatgctcttgtctattctggctttccttaaaatgtccaattctatggagtccttggtatgagtgtacctcgcctttccgaaaaacgatccccttggtatttgcgcttgcatactttgtgcgtctatctattcttgtatgcaccaattattgttttggtactttttagcttcaataccgatagacgcaacacaacttggcaaggcttcactctggattggtattttagtcttttccaaaatgaaactattttacgcgctttgggcaacagcttaaaagtaggcttatgcgctactttttttgctacattaattggatcgctggccgctttgggcttgtcgcgttacgaatttaaggggcgaggcttagtcggctccttagtatttattccgctagtagttccggaaattgttatggctatttctattttaacgctcttcctcagcttaggcgtaaagttgtcattatttacagtaattctggcccatattgctttttgtattgcttacgtaacaattactgtacgcactcgcttagccggcctcgatccctctctggaagaagccgccgccgacttgggagctacccgctgggagacttttcgtttagttaccctgccccaaatttggcccggcatcatttctggcgctctcctctgcttcacgctttcttttgacgattttgtcatcactttcttcaacgccggcgtaggcgcaggcaacttgcctatggctgtccactctatgctaaaatttggcgtcactccggaaattaacgctatttctactattatgctagttttcagtatatcgctaatggtagtttacacttttatcgatcgccctaaatcataataacgccaagtgcaatatttgcacgagtgcaaagccgcctctcactacagtgatggcggctttatttttgcttgaaagtagcttttattttatgccaagaaaaatttacttgtaccatttttgctattgacataatctcacgggcactgtatcatttagttactttcttgtaccacaacgagaaacatttaggttgctatgatcaggtagtataccttaaagcaccggcccggtcatacgtttttcgtgtgaccgggccgtcttcttttaatcatattttgttcagatatttgcattctgggcctgatatgcagtagctatacgaccaacttttgctttgtattttgataatttgtaaattaggtgcgaaagttggccaaaatagcggccttctagttaagtgcacctttttagaaggagaaaccgatgcattatattttaggcctagatattggtattacgtcaattggttgggcagttattgaaagcgaccaagatggagcaccatttaaaatcgccgatttaggcgtacgcatttttaaagccgccgaacagcctaaaactggatccagtctagctttgcccaggcgcagtgctcgctctttgaggcgtcgtttatggcgtaaagctcaccgcaaagagcgcatcaagcttcttctagatcgagtaggtcttattacaaaagaaaatttagaaaaactgttttcagcttctagttttgaaaaagatgtttacactctgcgttctgaaggcttagatcgcaagcttaacaatgaagaatgggctcgagtgctttatcatttagcccagcgtcgcggttaccgctctagtagtaaagctgaagaagcagacacaaagaatgatgccggtaaattactaaaagctgttaaaaacaattccgacaagatggcacaaaacaatttccgcaccgtcggagagatgttttgtaaagatagcagcgatttattccaagtaaaagacggcagcggccacgttatagggcgcaaaactcacaatacctcaggcgtttacgatcttactgtagctagaacatttattgaagaagaagcgcacaaactttttgctgctcaaagacaatttggcaacgcttttgctactgaaaatattgaaaatgagtattgcgagatacttctttctcaacgccattttagcgacggccctggcggcgagcgcacttttaaatttgatttgcgcggcaattgtacttttgaaaaagatgaactgagagcctttaaagcttgctatacttttgagttttttaaattactccaggatataaatcatctgcgcattattcctgagtatagaaaaggttcaaacaagcagactcgccctcttacgcccgaagagaggcaaaaaattatcgatctgtgcctaaaatcttccagtatagactttagtaagttgcgcaaagagttaaaacttgccgacgacgagatctttaaccgagtcggctacgatgtaaaaaagaaaaaaagcaaaaagaaagacgcagaagagcagccagaagagcaactaactcccgagcagcagcgcacaaaatgcgaagaggctactaagtttacccagatgcaatcatatcacgaaatgcgcaaagctttggataaggttgctaaagggactattagcaaattttctcatgacaagctagatgaaattggcgaaattctcagcctttacaaagctgacgacaagcgtcgcgaacgcttagagcaaattggccttagtaatgaagaaatagaagctctgttgccacttacgtttactaaagctggcaatttatctttaggtgctatgcgcaagcttattccctatttggagcaaggcctaacttatgataaagcttgcgaaatagtttatggcgatcatcgtgctcaatataagggcgagcgtatgcccttactttcttttggcaagctcaaagaagagggcgctttagattcagtaaataatccagtcgtactgcgtgctattgctcaaacttttaaagtggtaaatgctatcattcgtcgttatggttctcctcaagctattcatattgaattggctagagatatgaagcgaaattttgctgatcgccaagatattaaaagtaaacaaaaagataattggtctgagaataataggagacgtgaaaaagttgaagagattaaaggctcggttgctactggtcaagatattgtcaaaatgaagctctacgaagatcaaaatggtgtttgcctgtactcaggaaaacagcttgagcttcataggctttttgaagttggctatgcagaagttgatcatattgtgccctatagcaaatgtttcgacgatagctacaacaataaagttttagtcttttcttcggaaaaccaacgcaaaggcaaccgtctgcccttggaatacatgttggctgaaggcgatgaagacaagcttgacgattacgttactttagtggaagctaacattaaaaatactcgtaaaaagcagaggcttttaaaaccttgtttaactgagcaggacattacagattggaaagctcgcaatttaaccgacactcagtatattacaaaagctgtagctgatattttgcgcaattatttagcttttgaggaagattcgccttttattaaaaagccggttcgttctataaacggcgccgttactgatcaagtacgcaaacgattaggcttgcaaaaacatcgtgaagaaggcgacttacaccatgctatggacgcagccgttatagccgttactactgatggctacattaatagaattagtcgttatactcagcgtcgcgaatttggcaagcgcattggctgctacaaagacaaacaaactggcgaaaaggttgaaattgaaagacaaaaaggacaagcacctttatatatagacccggaaactggcgaaaagctaaccgaacaggtttttgatcataaatatgctcctactttccctgccccttggaaagaatttactaaagaactgaaagctaggatggctcccaatgccgatgaagctattcgccagctttatttaccaagctatggctctgaagaaataaaacctatctttgtttcgcaaatgccagatcgcaaaatcagcggtcaagctcacgccgaaactattcgcagcgccagaatagatgtagatgaaagtggcaaggaacgcataatcgccgtagctaaaacgcctttaactagcttgaagcttgataaagatggcgaaattgatggttactacatgccaagtagcgatcgtttgctttacgaagagcttaaaaaccgcttaaaagcctacggcaacgctgaacaagcattcaaagagccagtttataagcccaagaaagacggcagccaaggccctcgagtgtataaagtaaaaacttataagacaacgacctctaatgtaaaggtagctggaggtattgccgacaatggcagcatggtcaggatcgatgttttccacattaaagaaggcaaagacaagggctactattttattcccatttacgtagccgacacgattaagcaaaagttgccacaaaaagcggtagttgcggccaagtcaatcgatcagtggaaagaaatggatgatgaagatttcatcttttcactatatcctggagacttggtaagggttgaacataaaaaagatattgtatttaaatctacagataaaaatagtagtgacacaatatcttgcaaaaacttgctgacttattactccggcgcaaatatttcaacaggcgcaattacgattaccaaccacgatcgcagttatatagtgcacggactaggcatcaaaactctgcaattacttgaaaaatacgaagtagacgtattaggtaactatcataaagtgcgtttaccagaaaagcgtcaagctttcaacttgaaatatagccagaagaaacaataactaagtggagggccgatggaatttaagtctgtttatatagccaatccggcccgcctgacggtgcgccgagagcaattggtaatagctcaagatagtgaagttaccattcctatggaagatattaccagtttaatggttgaatcgcgtcaagtttccattacttcagccactttacaaaagctggctgaatatgaagtgaccgtttacttttgcgacgagcagcacttgccctcggccctcctcttgccactcaactctcattgccgacaactaaaagttttacaagcccaaatagctttaactaagcctcgccagaagcaactttggcaacaaatagtggcagctaaaataagcaaccaagctaaatgcttggagctgttgcaaaatcacaattatctttatttgcgaactttagctaagcaagtacgtcctggtgatccggctaacctagaagccatggccgctgccttttacttccctaacctttttggagtgaatttcactcgcgaactcccttgcctaactaacagtgctctaaactacggctattctatagtgcgcggcgctgtagctcgcaatttagttactcgcggcttagagccttgcttaggcattttccaccacaaccagcttaaccaatttaatctggctgacgaccttatggagccgctgcgacctctagtcgatctttttgtagcttccgagcttaaaagtgaagacgaagagctgactcctactatcaaaaaacaacttttcaaccttaccaactacatgttaaagcaaggtgccaaacgctatcgcttaatttctactattggaaaaatatccgataatttcaaacgcgctttaactgacaaaagtgaaattttagaacttcccgagctaatacctttggagtcttataaatatgagtaagcttatgagaatgatcgttttttttgatttacctgtgcaaaccaaaactcagcgccaagcagccaccaaatttcgcaatttcttgctaaaagatggctactacatggtgcaatattccgtctacgctcgcatttgcaatggttttgattccgtaaatttgcacgaagagcgcttaaagaaaaatatccccgagcgtggcctaatccgtttacttacagttaccgaaaaacaatacggcaattccaaagtattgttaggcccgcgcaacgtctacgactacccaatccaattggaagaattttaaaaataaagaatcgccagtctttacgaaaaaaaactggcgattctttattttatgaagagtaaatcttcactttttttaagctcccagagcgcaatttccgccttttcatcggtaattgcactccgtcaattataccacaacaaaaaa

SEQ ID NO: 3147 - DNA, 4628 bp, synthetic construct
  source 1..4628: mol_type = other DNA
  variation 324..344: note = note, n is a, c, g, or t
  misc_feature 1..4628: note = Synthetic
acaaaagaaaatttagaaaaactgttttcagcttctagttttgaaaaagatgtttacactctgcgttctgaaggcttagatcgcaagcttaacaatgaagaatgggctcgagtgctttatcatttagcccagcgtcgcggttaccgctctagtagtaaagctgaagaagcagacacaaagaatgatgccggtaaattactaaaagctgttaaaaacaattccgacaagatggcacaaaacaatttccgcaccgtcggagagatgttttgtaaagatagcagcgatttattccaagtaaaagacggcagcggccacgttataggnnnnnnnnnnnnnnnnnnnnngtttacgatcttactgtagctagaacatttattgaagaagaagcgcacaaactttttgctgctcaaagacaatttggcaacgcttttgctactgaaaatattgaaaatgagtattgcgagatacttctttctcaacgccattttagcgacggccctggcggcgagcgcacttttaaatttgatttgcgcggcaattgtacttttgaaaaagatgaactgagagcctttaaagcttgctatacttttgagttttttaaattactccaggatataaatcatctgcgcattattcctgagtatagaaaaggttcaaacaagcagactcgccctcttacgcccgaagagaggcaaaaaattatcgatctgtgcctaaaatcttccagtatagactttagtaagttgcgcaaagagttaaaacttgccgacgacgagatctttaaccgagtcggctacgatgtaaaaaagaaaaaaagcaaaaagaaagacgcagaagagcagccagaagagcaactaactcccgagcagcagcgcacaaaatgcgaagaggctactaagtttacccagatgcaatcatatcacgaaatgcgcaaagctttggataaggttgctaaagggactattagcaaattttctcatgacaagctagatgaaattggcgaaattctcagcctttacaaagctgacgacaagcgtcgcgaacgcttagagcaaattggccttagtaatgaagaaatagaagctctgttgccacttacgtttactaaagctggcaatttatctttaggtgctatgcgcaagcttattccctatttggagcaaggcctaacttatgataaagcttgcgaaatagtttatggcgatcatcgtgctcaatataagggcgagcgtatgcccttactttcttttggcaagctcaaagaagagggcgctttagattcagtaaataatccagtcgtactgcgtgctattgctcaaacttttaaagtggtaaatgctatcattcgtcgttatggttctcctcaagctattcatattgaattggctagagatatgaagcgaaattttgctgatcgccaagatattaaaagtaaacaaaaagataattggtctgagaataataggagacgtgaaaaagttgaagagattaaaggctcggttgctactggtcaagatattgtcaaaatgaagctctacgaagatcaaaatggtgtttgcctgtactcaggaaaacagcttgagcttcataggctttttgaagttggctatgcagaagttgatcatattgtgccctatagcaaatgtttcgacgatagctacaacaataaagttttagtcttttcttcggaaaaccaacgcaaaggcaaccgtctgcccttggaatacatgttggctgaaggcgatgaagacaagcttgacgattacgttactttagtggaagctaacattaaaaatactcgtaaaaagcagaggcttttaaaaccttgtttaactgagcaggacattacagattggaaagctcgcaatttaaccgacactcagtatattacaaaagctgtagctgatattttgcgcaattatttagcttttgaggaagattcgccttttattaaaaagccggttcgttctataaacggcgccgttactgatcaagtacgcaaacgattaggcttgcaaaaacatcgtgaagaaggcgacttacaccatgctatggacgcagccgttatagccgttactactgatggctacattaatagaattagtcgttatactcagcgtcgcgaatttggcaagcgcattggctgctacaaagacaaacaaactggcgaaaaggttgaaattgaaagacaaaaaggacaagcacctttatatatagacccggaaactggcgaaaagctaaccgaacaggtttttgatcataaatatgctcctactttccctgccccttggaaagaatttactaaagaactgaaagctaggatggctcccaatgccgatgaagctattcgccagctttatttaccaagctatggctctgaagaaataaaacctatctttgtttcgcaaatgccagatcgcaaaatcagcggtcaagctcacgccgaaactattcgcagcgccagaatagatgtagatgaaagtggcaaggaacgcataatcgccgtagctaaaacgcctttaactagcttgaagcttgataaagatggcgaaattgatggttactacatgccaagtagcgatcgtttgctttacgaagagcttaaaaaccgcttaaaagcctacggcaacgctgaacaagcattcaaagagccagtttataagcccaagaaagacggcagccaaggccctcgagtgtataaagtaaaaacttataagacaacgacctctaatgtaaaggtagctggaggtattgccgacaatggcagcatggtcaggatcgatgttttccacattaaagaaggcaaagacaagggctactattttattcccatttacgtagccgacacgattaagcaaaagttgccacaaaaagcggtagttgcggccaagtcaatcgatcagtggaaagaaatggatgatgaagatttcatcttttcactatatcctggagacttggtaagggttgaacataaaaaagatattgtatttaaatctacagataaaaatagtagtgacacaatatcttgcaaaaacttgctgacttattactccggcgcaaatatttcaacaggcgcaattacgattaccaaccacgatcgcagttatatagtgcacggactaggcatcaaaactctgcaattacttgaaaaatacgaagtagacgtattaggtaactatcataaagtgcgtttaccagaaaagcgtcaagctttcaacttgaaatatagccagaagaaacaataactaagtggagggccgatggaatttaagtctgtttatatagccaatccggcccgcctgacggtgcgccgagagcaattggtaatagctcaagatagtgaagttaccattcctatggaagatattaccagtttaatggttgaatcgcgtcaagtttccattacttcagccactttacaaaagctggctgaatatgaagtgaccgtttacttttgcgacgagcagcacttgccctcggccctcctcttgccactcaactctcattgccgacaactaaaagttttacaagcccaaatagctttaactaagcctcgccagaagcaactttggcaacaaatagtggcagctaaaataagcaaccaagctaaatgcttggagctgttgcaaaatcacaattatctttatttgcgaactttagctaagcaagtacgtcctggtgatccggctaacctagaagccatggccgctgccttttacttccctaacctttttggagtgaatttcactcgcgaactcccttgcctaactaacagtgctctaaactacggctattctatagtgcgcggcgctgtagctcgcaatttagttactcgcggcttagagccttgcttaggcattttccaccacaaccagcttaaccaatttaatctggctgacgaccttatggagccgctgcgacctctagtcgatctttttgtagcttccgagcttaaaagtgaagacgaagagctgactcctactatcaaaaaacaacttttcaaccttaccaactacatgttaaagcaaggtgccaaacgctatcgcttaatttctactattggaaaaatatccgataatttcaaacgcgctttaactgacaaaagtgaaattttagaacttcccgagctaatacctttggagtcttataaatatgagtaagcttatgagaatgatcgttttttttgatttacctgtgcaaaccaaaactcagcgccaagcagccaccaaatttcgcaatttcttgctaaaagatggctactacatggtgcaatattccgtctacgctcgcatttgcaatggttttgattccgtaaatttgcacgaagagcgcttaaagaaaaatatccccgagcgtggcctaatccgtttacttacagttaccgaaaaacaatacggcaattccaaagtattgttaggcccgcgcaacgtctacgactacccaatccaattggaagaattttaaaaataaagaatcgccagtctttacgaaaaaaaactggcgattctttattttatgaagagtaaatcttcactttttttaagctcccagagcgcaatttccgccttttcatcggtaattgcactccgtcaattataccacaacaaaaaactttagggagctataac

SEQ ID NO: 3148 - DNA, 4336 bp, synthetic construct
  variation 3168..3178: note = note, n is a, c, g, or t
  source 1..4336: mol_type = other DNA
  misc_feature 1..4336: note = Synthetic
agcaaagccgcctctcactacagtgatggcggctttatttttgcttgaaagtagcttttattttatgccaagaaaaatttacttgtaccatttttgctattgacataatctcacgggcactgtatcatttagttactttcttgtaccacaacgagaaacatttaggttgctatgatcaggtagtataccttaaagcaccggcccggtcatacgtttttcgtgtgaccgggccgtcttcttttaatcatattttgttcagatatttgcattctgggcctgatatgcagtagctatacgaccaacttttgctttgtattttgataatttgtaaattaggtgcgaaagttggccaaaatagcggccttctagttaagtgcacctttttagaaggagaaaccgatgcattatattttaggcctagatattggtattacgtcaattggttgggcagttattgaaagcgaccaagatggagcaccatttaaaatcgccgatttaggcgtacgcatttttaaagccgccgaacagcctaaaactggatccagtctagctttgcccaggcgcagtgctcgctctttgaggcgtcgtttatggcgtaaagctcaccgcaaagagcgcatcaagcttcttctagatcgagtaggtcttattacaaaagaaaatttagaaaaactgttttcagcttctagttttgaaaaagatgtttacactctgcgttctgaaggcttagatcgcaagcttaacaatgaagaatgggctcgagtgctttatcatttagcccagcgtcgcggttaccgctctagtagtaaagctgaagaagcagacacaaagaatgatgccggtaaattactaaaagctgttaaaaacaattccgacaagatggcacaaaacaatttccgcaccgtcggagagatgttttgtaaagatagcagcgatttattccaagtaaaagacggcagcggccacgttatagggcgcaaaactcacaatacctcaggcgtttacgatcttactgtagctagaacatttattgaagaagaagcgcacaaactttttgctgctcaaagacaatttggcaacgcttttgctactgaaaatattgaaaatgagtattgcgagatacttctttctcaacgccattttagcgacggccctggcggcgagcgcacttttaaatttgatttgcgcggcaattgtacttttgaaaaagatgaactgagagcctttaaagcttgctatacttttgagttttttaaattactccaggatataaatcatctgcgcattattcctgagtatagaaaaggttcaaacaagcagactcgccctcttacgcccgaagagaggcaaaaaattatcgatctgtgcctaaaatcttccagtatagactttagtaagttgcgcaaagagttaaaacttgccgacgacgagatctttaaccgagtcggctacgatgtaaaaaagaaaaaaagcaaaaagaaagacgcagaagagcagccagaagagcaactaactcccgagcagcagcgcacaaaatgcgaagaggctactaagtttacccagatgcaatcatatcacgaaatgcgcaaagctttggataaggttgctaaagggactattagcaaattttctcatgacaagctagatgaaattggcgaaattctcagcctttacaaagctgacgacaagcgtcgcgaacgcttagagcaaattggccttagtaatgaagaaatagaagctctgttgccacttacgtttactaaagctggcaatttatctttaggtgctatgcgcaagcttattccctatttggagcaaggcctaacttatgataaagcttgcgaaatagtttatggcgatcatcgtgctcaatataagggcgagcgtatgcccttactttcttttggcaagctcaaagaagagggcgctttagattcagtaaataatccagtcgtactgcgtgctattgctcaaacttttaaagtggtaaatgctatcattcgtcgttatggttctcctcaagctattcatattgaattggctagagatatgaagcgaaattttgctgatcgccaagatattaaaagtaaacaaaaagataattggtctgagaataataggagacgtgaaaaagttgaagagattaaaggctcggttgctactggtcaagatattgtcaaaatgaagctctacgaagatcaaaatggtgtttgcctgtactcaggaaaacagcttgagcttcataggctttttgaagttggctatgcagaagttgatcatattgtgccctatagcaaatgtttcgacgatagctacaacaataaagttttagtcttttcttcggaaaaccaacgcaaaggcaaccgtctgcccttggaatacatgttggctgaaggcgatgaagacaagcttgacgattacgttactttagtggaagctaacattaaaaatactcgtaaaaagcagaggcttttaaaaccttgtttaactgagcaggacattacagattggaaagctcgcaatttaaccgacactcagtatattacaaaagctgtagctgatattttgcgcaattatttagcttttgaggaagattcgccttttattaaaaagccggttcgttctataaacggcgccgttactgatcaagtacgcaaacgattaggcttgcaaaaacatcgtgaagaaggcgacttacaccatgctatggacgcagccgttatagccgttactactgatggctacattaatagaattagtcgttatactcagcgtcgcgaatttggcaagcgcattggctgctacaaagacaaacaaactggcgaaaaggttgaaattgaaagacaaaaaggacaagcacctttatatatagacccggaaactggcgaaaagctaaccgaacaggtttttgatcataaatatgctcctactttccctgccccttggaaagaatttactaaagaactgaaagctaggatggctcccaatgccgatgaagctattcgccagctttatttaccaagctatggctctgaagaaataaaacctatctttgtttcgcaaatgccagatcgcaaaatcagcggtcaagctcacgccgaaactattcgcagcgccagaatagatgtagatgaaagtggcaaggaacgcataatcgccgtagctaannnnnnnnnnngctaaaacgcctttaactagcttgaagcttgataaagatggcgaaattgatggttactacatgccaagtagcgatcgtttgctttacgaagagcttaaaaaccgcttaaaagcctacggcaacgctgaacaagcattcaaagagccagtttataagcccaagaaagacggcagccaaggccctcgagtgtataaagtaaaaacttataagacaacgacctctaatgtaaaggtagctggaggtattgccgacaatggcagcatggtcaggatcgatgttttccacattaaagaaggcaaagacaagggctactattttattcccatttacgtagccgacacgattaagcaaaagttgccacaaaaagcggtagttgcggccaagtcaatcgatcagtggaaagaaatggatgatgaagatttcatcttttcactatatcctggagacttggtaagggttgaacataaaaaagatattgtatttaaatctacagataaaaatagtagtgacacaatatcttgcaaaaacttgctgacttattactccggcgcaaatatttcaacaggcgcaattacgattaccaaccacgatcgcagttatatagtgcacggactaggcatcaaaactctgcaattacttgaaaaatacgaagtagacgtattaggtaactatcataaagtgcgtttaccagaaaagcgtcaagctttcaacttgaaatatagccagaagaaacaataactaagtggagggccgatggaatttaagtctgtttatatagccaatccggcccgcctgacggtgcgccgagagcaattggtaatagctcaagatagtgaagttaccattcctatggaagatattaccagtttaatggttgaatcgcgtcaagtttccattacttcagccactttacaaaagctggctgaatatgaagtgaccgtttacttttgcgacgagcagcacttgccctcggccctcctcttgccactcaactctcattgccgacaactaaaagttttacaagcccaaatagctttaactaagcctcgccagaagcaactttggcaacaaatagtggcagctaaaataagcaaccaagctaaatgcttggagctgttgcaaaatcacaattatctttatttgcgaactttagctaag

SEQ ID NO: 3149 - DNA, 14997 bp, synthetic construct
  variation 6399..6497: note = note, n is a, c, g, or t
  misc_feature 1..14997: note = Synthetic
  source 1..14997: mol_type = other DNA
  variation 7033..7293: note = note, n is a, c, g, or t
cttgacatataataagttatattgtataaataaagtatagataataatctataatagggtattatatgaacacaaaaaggacaatactatctgaaaaagaactaaatttgattgaacagattatcataaagcacggcacgatagtcaattttgtgcaaatctattcaatcttaaaaagcaaaattacccgacagagtacaagaaatttggttaataaattatcaaaaaacgggtggttagtgcggataaaaaagggattatattttgtagcaggtttagaatcccgcggtgttatatctgtccattattttaagattgcgcaaatcctggttaaagaatcctatatctcatgcgaatcggcattacagcatcacgggatgtttgaccagcttttaaaaacaattgtatccgtatcattaaaaagatatcctataaaaaaaatacagaataacgagtttaaattcataaaagtaaaaaaagataattattacggttggcaggaggaacgaatagaaaaccatgtggtaaagatagcgtctcctgaaaaagcattgctggatttacttaatttcggaaggaatgtttattatattgatttggttcttgagaaactacaggattatcataaagacattaaccttgataaattggttgaattcagtaataaacagagtattaccgttcaaagaattctcggttttataatggataaacttaccctggattcctcaaaaattcataataaaatcaaaaataaaaaaaactgcagttatatgtctaacgacagtaaaaaatttaatgccaaatggcggctttactatcataaatcttttaaatgaagcttgaacttttgaacagaagggaattagaagttaaaaataaagtgtccttaaaatacggtcttgcagaagccgagaaggactattttctggctattgtttcaaaaattatttatgagtcaccaataagaagcaaaattgtttttaaaggcggcacagcgatactatcattgctatattccgcagtcgcggttttcagaagaccttgattttacttccctgtatcaatcaattactatagattaagtaaaagcggttcttgaatctcaggattttctggaagtaaaaaaagattatgtttcaaaagcgacaataaaaattgagagattaaaatataccggcccgctcggactagcaaattctctgaaagttgaaattgattttatccagaatgtggttttgccggcaaaagaaattgaatataaaaatgtatggggtgttaagaccaatcagaacagttttgaagttatctgttatctgttatctgttatctgttatctgttatctgttataggttattatttattcatcacagtattcaaaagaaagaatatcgtaactccccaagatgccacccagaaaactatagagaaaactgtggagaaaataattagattaatcaaagagaatcctatgattactatacaagaactttcaaaagaaacaaaactttctaaccagggagttatttggaatctcactaaattaaaaaagaaaaatacaataaaacgcattggacctgacaaaagcgggcattgggaagttgtagagaaataaaaaacaaaaaagtcaaaatttttgacagaacggaaagagataacggggggaatatatgaaaaaaataattttggttttaattttcaccctatttttgtctatccaatattttctgagatatgtagccgtccctaataaaaaaatggaggttctatgtctgataatgatttaattttttcatttgatattggcacgggaagtattggcgaatgtgtcagacaaggcagcgaaataaaacatcttgaaagtttgttaattcctgccgaatatgcatctacaaaagatgctaccaaaaaacggcatcaaatcagaacaagagaggcacataaagcaagagaagattggtggcgaaaacaagcaaaagaagcaggcattgaagttcttgaatcaagacaaccaaccaaagaaaatcctaatataaaacccgatgaaagattattaagagaatttccaaaagatggtgataatactatatatacatcatgtcttttaagaatagcattactgcaaggaaaaaaacttgatggctggcagatttacaaagcagtatggtctgcaatccagcatcgtggatatgatgaaaaaaatcattggaaaaatgatgatgatagtgcagaaaacaagaaaaatgtaaatgaatatataaaatactgtaaggataataaatttgaagagaaatattggttaccatgttatgttgatgcacatagaatgggaatttggtcgccagaagattcaaataatctgtatcgcaaacgaaataacgaaaccaatccagcgccggcaagaaataaaaatcattcaaagtatcatttggtgtttccacgttcaaaagttgaagaagagttaaaacatttactttctcaagcggcaaaactatttccaaaattggcagggaaagaaaattatatagtttatggtcccggagaagtacaatatgcttcgatgaagaaaatggagttttccaagtatcgtgggaaggaatgggattggcagggacttttaggtcaaaaaataccacggtttgataatagaatgttaaataagtgttgttgtatgtcacatttcaatgtttgtcgtgcagatgacatgctcaatcaggaagtaatgtttttaatgatgcttaaaaatatgcgatatcattctaagaataagcctgatgaaatgcttactgctgaacaaataaaagaactatttaataaatttaaggacagactaaaatttgaaaaaaatgaaaaagacaaagtaaaaaatagaaaaaaggaagttattccaaaaagcttattgagaaaatgggtaatagaaaaacttaatggtgaaattcatccggcacatagtttaattccaatgccaaatgcaggtggtagatcgcggtattgccgtcctgcattagaagttataagggaagttattttatccggaaaaactcctaagcaagtatatgaagaatgcgttgctaaaaataaaatagaaaatccggaacaaaattcaaaaaaaggacggatacaaagtgattttgattttctgattaaaaagggtacttcagaaaaatgggaaaacttttatatttcagataatcgttatgagcttcgcgaaatgtctgcagatgaacgcaagattgagattgaaaaaacattaaatgaaataaataatcctatcgttagtcaccggttaaaatggtttaaaaaagaacttaataaacttgcttttggtgaaccagagaagaaaaatcctggatatggtataccggagaaagttgttcttgagtttgcccgagatgagtttatgggaaaacaggcaaaagaagattactataagtttataaaagaacaaactaaagagagaaaaattgtagtagaagaactggaaaaagcaggtttttcaaaaccatcaggtgagatgattcgtaaaatgatgttatttagacaacaggacggaatagatttttattcgatgcaaaatattaaactttcacatcttggagaatatgaaatagatcatgttattccgcgttcaagaggtggatccgatgctttttataatattatacttacaaccaataaaaataattctgcgaaaggcgataaaacaccgtatgaatggcttggtaaaggagatatttgggataatattagtgaaaagttgaaagtaaacaaaaaaatgggttcaaaaaagaaattactttttatggcatcttctgaagagcaatataagcttttaatagataaatatacgcagctatcacagaccgcatatatttccaaacttgcccaaaaagtcacagctcttacatttggctggggtatgcaaactaaagacgataatagaaatattgttattgcaaccggcggacagaccgcccgaataagaagtagatttaaacttgataggttactgcattccggaatgactgatgaagaatttgaaaaagctttaagaaacggtgaaatagaaaaaaagaaccgctctaacccacgccatcatgcgcttgatgctctagtgctttcggctgtacctgaaattagagtggataaaaataggaaaggaaaatatgatgatatttatccgtcatggcttacccgggatttctgcgaaaaagaagttgctcatgtttatccaaaacagattaagttttctaaagcccagcttgccgaggttctttatggaaagagagaagtaaaaaaagaggatgggttatggtatacttacgcaataacccggcaaaatgaaggaacaagaattgaggattactatgtaaaaaaatctgaaaagaaatctgatatagaagatatggaaaaattgagaaataaaatattaaaaaaagtaaatcatatattcagtaatgatataagaaccgattttaagaaaaaactggaagaaaaacctacagaagaacaatggaatgattttataaaaaactataaggtaaatggaacttgtcctcatcgtatatctgttataggaaacccaggagtgaaaggatttaaagaaaaacaaccgttgccgccgaattataaagaaattcgtcccaacagtaaacaatattatgaaacaaaaaccgggcaaaaatggtcatatactgcccaactgatatgcctcaatgaaaaagatgagtgggaagttcatcctgtttatgcatgggattcgctgtacgaacgaattaaaaaagcagaacaagaatttaaaaaagttgtcaaatttcactcacgtcaatcagttgaaataaaaaacgattgtgcaaatggtaaaattaagaaaggcatttatattttggctactatacaaaatggtaattggggtgtgcttgaatctcagggagaaaaaatagatgcgagtcttaatgagttgatgaatatcggagaaatgtggcctatcatataattcatatacttacccattcaagcaaacttagtattgatagggggtgtcttgtatgctcctcaccagatggtgaaaaacggcttccaaaagacgatatacttgccgtaatagttgccgcaagaggtgtattatttactgccggatgtttgtcggacttgttggaaaataatacagtaatacttcactgtaatgataaataccagccgataggaaaaacaataagattaaatcaaatagttcatcctgaaatatttgaaaggcaaataaaactacaaaattctttttcagatattctttggaaagagatattaaaatcaaaaataaaaaatcaggcaattctgctagatactttaaaaaaagaacataaattatgtgaaatgcttaaccaaaatatattaaatgaatctaatgctgctaaacattactggaatatatatttttcttgctttaaaaagccgccgaaaacaagagaaagaaggggtgctattgatcctatcaatcaaatgctaaattatacatatgctgtaataggtgcaattttacacagaagcattgtggctcatggtctaaacgctcaattaggtatacatcataaatacaggtttaagagcgatccgttgttatacgatttaatagaacctttaaggccgatttgcgattatttacttattaaatttcatttgaataattctaaaaaaaagattgaagaatggattaaatttgtcgggaaagaaataacagaaattaaatttaaaacagaagataaaaaaaatattaaaatggtatatgaaatagacagatatgttaacagcatagctaactgtttttatacgggtaatttaaatactcttcacacaccatgtttgtcagatattgaaattgaaaaaaaataatagtaaatattttatgggctggcttatagtattgtttgatcttcccgtaacaaccaaaagggaaagacggctcgcaaccggttttagaaatgatttgcttgatgaagggtatttaatgcttcaatattcagtttatgcaaaatgtgccgtaacattagacaaaaaagaatcttttattaaaagacttgaattgataggtcctgataccggaaatattcaatgtatttttattacagatgctcagtggggagaaagcatattcttgcatagtactcgaaaaaaaagtcatagaagtattaaaaattttactaatccatctgaacaacttcagttttggtaaaaataaaaggaaatagtctgacgtgacatgcagaggtccgatatttcctttttaaattaagacgtcactaaaatgagtttattgcttttattttacttaaaaaatgaattaaatcaagttcattctttgaattttaaaaataagacctattttgaaagaactcatttcnnnnnnnnnnnnnnnnnnnnnnnnnnnnnnnnnnnnnnnnnnnnnnnnnnnnnnnnnnnnnnnnnnnnnnnnnnnnnnnnnnnnnnnnnnnnnnnnnnnatttcttagtgacgtcaaaactccatttgtttgcataggtttttaattattattttgaaagaactcatttcttagtgacgtcaaaactatacgcccccttttataaatcttaaatatattttgaaagaactcatttcttagtgacgtcaaaacgaaatcgggcgatttaatgttatctgaaccattttgaaagaactcatttcttagtgacgtcaaaactgtttctgtatgcttttatttcacctatatattttgaaagaactcatttcttagtgacgtcaaaacggagtatgacaaagacaaaaaagaattgatattttgaaagaactcatttcttagtgacgtcaaaacgagcataacccgtagtattatttaatatagaattttgaaagaactcatttcttagtgacgtcaaaactatattccgggtttagttcaattccgatatattttgaaagaactcatttcttagtgacgtcaaaactcttgacaccgttcagattgtaaatttcaaattttgaaagaactcatttctnnnnnnnnnnnnnnnnnnnnnnnnnnnnnnnnnnnnnnnnnnnnnnnnnnnnnnnnnnnnnnnnnnnnnnnnnnnnnnnnnnnnnnnnnnnnnnnnnnnnnnnnnnnnnnnnnnnnnnnnnnnnnnnnnnnnnnnnnnnnnnnnnnnnnnnnnnnnnnnnnnnnnnnnnnnnnnnnnnnnnnnnnnnnnnnnnnnnnnnnnnnnnnnnnnnnnnnnnnnnnnnnnnnnnnnnnnnnnnnnnnnnnnnnnnnnnnnnnnnnntttcttagtgacgtcaaaacttagtgatacacaagcagccaataaaatatattttgaaagaactcatttcttagtgacgtcaaaactatttgctatccttaatcttgaattggtgaattttgaaagaactcatttcttagtgacgtcaaaactcgctacatccgtcgcatctctcgtcgcttattttgaaagaactcatttcttagtgacgtcaaaacaagaggaaagcggactaattgtcaaagataattttgaaagaactcatttcttagtgacgtcaaaactcgtgtttatacaattacgtgttataaataattttgaaagaactcatttcttagtgacgtcaaaacatttcttttgcagaataactattattaaaaattttgaaagaactcatttcttagtgacgtcaaaacaattgtaataagtgattgattttgacatagattttgaaagaactcatttcttagtgacgtcaaaacaataatcttcacagttaaaatcgttagacaattttgaaagaactcatttcttagtgacgtcaaaactataattatgcattagaggatagggagataaattttgaaagaactcatttcttagtgacgtcaaaactatcttctaatgcttttaatatttttctttattttgaaagaactcatttcttagtgacgtcaaaacttgtgttcagtattgataataacttctaacattttgaaagaactcatttcttagtgacgtcaaaacagctaattctataagtcatattgtcgctaaattttgaaagaactcatttcttagtgacgtcaaaacaaacaaataatctcggatatttagacaccgattttgaaagaactcatttcttagtgacgtcaaaacctccatatatatcacacatttcataatctaattttgaaagaactcatttcttagtgacgtcaaaacggcttgcaagtagtattacaatgtttcctattttgaaagaactcatttcttagtgacgtcaaaacttcacccagcaatcaatagaatccaggtctattttgaaagaactcatttcttagtgacgtcaaaactataacttatatctgttttatctaccttttattttgaaaggactcatttcttagtgacgtcaaaacaaatagggaccgcagagaacactgatttcgattttgaaagaactcatttcttagtgacgtcaaaacaatatcatatgtattaaacgaatatgtaaaattttgaaagaactcatttcttagtgacgtcaaaactgcttattgtttctatgtctgaattatatgattttgaaagaattcatttcttagtgacgtcaaaacaatcagggatatttccctttactataaaaattatatataattattactgaattatcaagattttttttcttgacattttgcaaaacatagttataatatcactaatagttgattatgagattttgatttatctgtgtaatcggtttttaaaatctgtgtaatcgttactataatactcttcggggttgggtgaaattcctaatcggcggtgaaagtccgcgagtcccataaaaaatatgggaccgaatctgtgaaattcagataccgacggtaaagtccggatggaagaagagaataatagagtagtaagtattaaattttaaccctgaagaatatctttagggttcttttattttttagtttgagggtatagcctagcccaatgcgggtttgggactggcaatgacaacaacatatgaataataatgatattaaatatatgaaacttgcactaaaacttgcaaaaaaaggcgaagggaaggtaagccccaacccgcaggttggttgtgttattgtaaagaataataagataattgcaaccggctatcataagttttttggtggtttgcatgcggaaattgatgcacttgaaaaatgcaaaaatccaaaagatgcgactatgtatgttaatcttgagccgtgctgccattataataagaagacaccgccttgtgttccacaaattatagatgctggtattaaaagagtcgtagttgcaatgaaagattctaattctttggtttacggaaagggtattaagcaattaagaaataagggtataaaagtagaagttggaattttggaaaaagaagcaaaaagattaaatgaaacatatatgaaatttattacaaaaaagataccgtttgttattttaaaattggcattttctgtggatggaaaaacgaaaacaattgccgaagattctaaatggattagttcagaaagttcaagaaatattgtttataaattaaggagtgcaaccgacgcaattcttgtagggtcaaatactgtcttggtggataacccaagtttaacatcgcatggaatggggaagaatcctgtaagagttatacttgatgctaatcttgaaataccttcacattcaaatgtgttaaataatgaagcggaaacagtaattgctacatctaaaaatgcggataaaaataaaaagacaaagttaataaatatggggattaaaatattagaattaccttcaaaaaaaggttttgtggatttaaaaaaacttcttatagaacttgctaagttaaatattttgtcagttgtagttgaaggtggggagacagttgctcaagaattttttagaaaaagactggttgataagattgtattttttatttgtccgaagattattgatggcgaaaaatatattaaagatgctatgatagttaagaatgtttctatcagaaaaatagaaaatgatttgttatatgaaggctacttataacatcagagattagcgtatagcgtataggggatatgagtcagcatatagcgttccgccagctggcggagaggaaagcgtatagggattagttcaaattgttcccttccgccactgattctatggcggacccgccaacgacttagtggcgggaacctctcatctctaatcgctaatccttgaatttggagttaatatgtttacaggaattatagaagatttagggacaattgttaatgttgataaaaaaaatgtaactgcgagcactaatctatctgatattaatatcggggatagtgtttctgtcaacggcgtttgtttaactgctgttaaaatccagaagttgtcaaagaataagtatcatgatacaattgaaaaaaaccgttggtgtcaccctgaacaaagtgaagggtctcaggtatcatctaataacgagattcttctgccgatgaatcggcatcagaatgacaaaattaaggtttttaaacaatctcatcagattacttttgatgtttctgaagaaactttttcaaaaacaaatcttggaaagttaaagattaaaaataaagtaaatttggaaagagcgctgaaaacgggcggcagatttggcgggcattttgttaatgggcatgttgaaggtatagggaagattttatcggttaaaagattagcgaattctgaagtttgggaattttctaatcctggagatttatcaagatatattgttgagaagggctcgattgcagtcgacggtataagtttaactgttacagaaagaaaggtaggttcatttaaagtttcattgattccgcataccctgaataatacaacgttaagtttcaaaaaaacaggggatactgtaaatttagagacggatgttatttcaaaatatgtttttcaaaatactgagagaagaggtataacaatggaaaaacttagaaaggcaggctatttatgaatacattttcgaatattaaagatgcaattgctgattatagaaagggtaaagcgataattattgtagatgaaccgtgtcgtgagaatgaaggtgatattgtttatgcagctgaaaagataacaccgtcaaagataaattttatggcaaaatacggcaggggtcttatttgtgttgcagtagaaggaaaacgattaaatgatttaaagattggtccaatgataagaaacgggcttgaaattaaagaagcggcgtttacggtatccgtagatgctaaaaaaggtattacaactggcatttctgcatatgatagagcttttacaataagaaaaatgattaatccgaaatcaaaaccggaagactttattaaacccggacatatttttccgttgaaatataaagaaggcggagttttggtaagagccggacatacggaagcaagtgttgatatggcaagattatcgggattataccctgcaggtgttatttgcgagattatgaatgaagatggtacaatggcgagattacataatcttaaaaaatttgcaggtaaacataagttgaagataattacaatagcgcagattattgaatacagacggcaaactgagaaacttgttgaaaaaatagcaaccacagtatttccgacaaaatattgtgattttgtgttacatttatatcaggataaacttaccaaggaaaatcatgttgctttggtgaagggtgaggtaaaagggaaaaaaaatgttattgtgagagtccattcttcttgtcttacaggtgacacttttcattctttaagatgtgattgtggtgaccaacttgagaaagcgatgcagattatttgtaaaaccggattaggagttttattgtatatgcatcaagagggaagaggaatcgggcttttaaataaaattagggcgtatgaattgcaggatgaaggctatgatactgttgaggcaaatttagaacttggtttcaaagccgatttaagagattatggaataggtgcccaaatactttccgatttgggattatcggatatacatcttttaacaaataatccaaaaaaaattgttgggcttgaaggttacggattgacaattacaaagcgaatacctattaaagttgaaccaaaaacaaaaattgctgaaaaatatcttaaaacaaagaaagaaaaattcggccatttattataaaagcaagttaaaagtaaaaagttaaaggtaaaaataaaggcaggttaaaggaaaaaggttgggagataaaaatgagaaattttaacttttaattataacttttaacttgaagtttaaggaggatttatgggtaaagttattgaagggaagatagttgcaaaaggtttaaaatttgctatagtagtgtcaaggtttaacgagtttattacatctaagttactaagcggatgtgtggattcgctgaaaaggcatgatgctgatgagaagaatatagatattgtgtgggtaccagggtcttttgaaataccgttttttgcaaataaacttgcatcttcaaaaaaatatgatgcagttatttgtctcggtgcagtaataaaaggagatacaccacattatgattatattgcatctgaagttacaaaagggatagcatcaacgggtttatctacgggcattccagtaatttttggtgttcttactacggataatttagaacaagctattgaaagagctggaacaaaatccggtaataagggtgcagaagcggcaactatggctatggaaatggcaaatttaaatgctataatatagctgttaatcattgtaatcattttctaaggagtattaaataatatggggtcaagacggcagtccagagaatgtgctattcaaatattgtatcttactgatgtatgtaagatgaataaagaggatgcggaaaaagcacttttaagcaataacgactatgataaggaagttgttccgtttgttagtgagctgattgatggtacaatcagtaatcttaaagaaattgatgaatatttggtaaaaatagccgagaattgggaacttgatagaatggcatctattgataaagctattttaagacttgcttcgtatgaattgctttttactcccgctacaccgccgaacgtggttataaacgaggcgatagaacttgctaaagaattttcaactgagaattccgggaaatttgtaaatggtatattagataagataaaaaatttaagagataaaaaaactgtgggataataatggatattaggcaaaaaattgataaactaaaacaacagataagacatcatgattatctttattatgttgttgcccaacccgaagtttctgatagtgaatatgataaactaatgaaagaacttgaggaactcgaaagtaagaattccgaattaataacggatgattctcctacacaaagagtttccgggcaagtaataaaggatttcaagacagtaaaacattcaacaccgatgctttctttagataatacgtattcttcggaagaaataattgaatggtacaaaaggttagaaaaaataataccaagcgagagttttgaatatgttattgaacctaagattgacggtgtaagttgcgcattaacatataaaaacggtattttatcacttggagcgacaagaggagatggcgaaaatggcgaagatgttacattaaatatcaggacaataaaatctatcccgttaaagctacattcagagataccgctttttgaagtaagaggcgaagtctatatagaaaagaaagattttcaggagttgaataaaaggattaccccgccgtttgcaaatccaagaaacgcagcagcaggttctttacgtcagaaaaatccggaaatagtaagtgaaagaaaactaaaatttatagtccattcatatggtagtatagggggaattaaggattttaagacacatattgagtttttaaagttttgtgaaaagaatggattaccgacaactatgaaaaatttaaatgttgtcaaaaaaataaatgatgttgtggataaatgtaaagaatgggaagatgaaagagagcaaatgttgtacgagatagatgggctggttattaaggtaaatttgcttgatcaacaaaaaaaattaggatttacaatgaaatcgccgagatgggcgatagcatataaatttgcagccaagcaagctacaacaaaggtaaaggatattgtaatacaagtcggaaggaccggtatattaacgccggtggccaagcttgaacctgttgaatgcggaggcgttacaatttccagtgcgacgctgcataattttgatgaaattaaacgtctgggtgtaaaaattggagatacagttttaatagaacgtgccggtgaagtgataccaaaagtcgtaaaagtcgtagaaagcaaaaggaccggtattgaaaaaaaactggaaatgcctgaaaaatgtccggtatgtcataaacctataattaaagaaaaagaagaagaggttgcatggcgatgtgtaaatccgttatgtcctgctcaacttgaaggcgggcttattcactttggcagtcgtgaatgtatggatatagaagggcttggtgaatcagtagttactcaaatagtatcccaaaaaatggtttctgactttgctgatatatattatttaaaaaaagaggatttttttaaattagaactttttaaagataaaaaaacacagaatttgataggtgctatagaaaaaagtaagaccagacaattaagtcatttgttatttggattaggaataaggaatgttggggaaaaagcggcaattactttagcaaaaaaatttttaacaattgataatttgatgaatgcgactgttgatgatttacagaaaatatatgaaataggtccgataatggcggaatccatcgtaaagttttttaatcaaacagaaactaaaaagt

SEQ ID NO: 3150 - DNA, 5672 bp, synthetic construct
  misc_feature 1..5672: note = Synthetic
  source 1..5672: mol_type = other DNA
acaaaaatagaatattttttctaaattacccaaaatttaagaaacaaaggcaaaacgaagtatttcgttgtccattgtttcctctttttactaattaataaaacttcggaattttgagcaaaaaaacaattttaggattggatttgggaaccaactctattggttgggctctaatcaaacaagattttgaaaaaaaagaaggtgaaatacttggataaaaagcccctgttaagtacaagggcaaagactcttgagatgaagcatctcgctacggaataatccttattgtgaattgcttcaaaggaacaaatatataaacataataattaaaatactactaaaatgaaaaaaatattaggacttgacttagggactaattcaatcggagcggcaattataaatattccaaaatcatttgaggaatacggaaaaggaggaaatattgaatggatgggaagtagaataatccctatggaagggtttgtttctactaaaactgggaaaccttttaaagaaaacccaattgattcttttactaaaggtgtaggtgtatcaaaagcagctgcaagaagagtgaaacgaggttcacgtaggttgaagcacagatataaattaagaagaacccgattgattagagtttttaaaactttgggctggttggatgattcctatccagaggactttaagaaggaatttagaaatgatcaaaattttaaatttcatattagtgattatttgccgtttagcgaggaaagtattgaggaagctaaaaagttgttgggagcagcaaacaataaaggcgaaatcacattacctgaagattggattgtatattatttaagaaaaaaagctcttcatcagaaaattacttttgcagagctggcacgaattacttatatgatgaatcaaaggaggggctttaaaagcagccgtaaggatttaaaagatgaaaacttagatgaaaagaagtgggtggaaattcttacaatcaaatcagttgtacaagaaacttttgaacccaatagaaataagaattttaagtttaaaattactcctgacaatgaaaaagttcagccttgggttgttgaaaggaagaaaaaaccagaatgggaaggaaaagaatttacttttttgattacagaaaaaattaaaacaaaaagtgatggtacggttgaagtaactcagcttacaccacaaattcctcaagaaggagattgggatttgtgcgtaacggcacaagacaataaaattggagatgagtacccaggaacttattttttcaatgggcttgtagaaagtgtaaaaaataaaactgattttaaaattaggcaatatgctgtttatagagcaaaatataaaagagaattagaggcaatttggaaaaaacaaatagagcttaacgaagagttaagaaaaattaataatgaccagactattttaaggaaaattgcagagatattgtatccaactcaaacaaaactgaataaatcaaaacttcgagaattactttctagcgatttattacatatcatttctgaagatataatttattatcaaagagatttaaaatcacaaaaaaactcaaaatccgattgccaatacgaaaagaaaaaagggactgatggagaatggtatggattaaaatgtgctccgaaatcaagtccagagtttcaagagtttagaatatggcaagatatccataatataaaagtcttccaaagaaacggaaaagaagaaaaaattttagatgatggaatagtcaaagaatttgataaagttgatattgatgtaagtgtagattttataaacgaaaaagtaaaagaagccctattttatttgtttgatacttcaaaagaaatttctcaaattcagattattgatttaattaatcgatttaattatgaaaacaagattgacataaagacccacaggatcaacatgttttttaatgaagaaaaaaagctaataggaaatgaaacaaaagaatattatagaaaaatttttagaagatttgggtatgaagtaaaaggggaagaaattttaaacaataaagagaagttctatcgtttgtggaacatatcatactctataagtttaaatgatgaagaaaaatctaaacaagcaattttcagagctttaacagaaaaaaataataggcgaggaaacccaaaaaaagtaatttttgaattgccagagaatgttgcattggctattgcaagtgcccctgatatagagactacaaaaaaatatgcttcttattcctcaaaagctataaataaactattaccattaatgagatgtgggaagtattgggacgaaaatcttgttgagaacactgttaaagaaaaagcaagtagaatcatagaacgacttacaaaaattaatcataatcctaaaagattaaaatctgttgcagatgacgatataccacagcaattattaaaaagttttgtaggaagcagtatggaaagtattattaaaggattaaatacttatcaagcttgctatttggtctatgatagacatagtgaaaagctagattatcaaaagtttacatctattaatgagtttgatgttccaaagctcctgcctaataatagtttaagaaaccctattgtagagcaagttgtgcgagaaactttatttttagttaaagatttatggaagcaatatgggcagcctgacgaaatacacatagaattaggaagagatttaaagaaaaatgcgaaagagagaaaatctgcaacagaaacaacgacaggtaacttccaagaaagacaacgaataaaaaagctattgtatgaattaatgaatgaagagtttgaacaatatcaaaatgaaggagataatgttgtaataagtaaagccaaatttgagataaagcctaaccctgaaagtccagtggatattaacaaatttagactttggaaaaatatgtcaggtataagtgatgttgatttggataaaagaatcagagatgaaaaaattcccaaaaatcaagagataaaaaaatatgctctttggctaagccaaaaatgtatttctccttatacaggtagaattattcctttaagcaagctttttgacccaaatcaatatgaaattgaacacattctcccaagaggcttggtgaaaaatgatagttttagtaatttagtaatagctgaatggggagttaataaagctaaggggagagagttaggtgctttatttattgctaatagaaatgggaaatgtgagtatggaaatcaaatataccaattgcttgactacgatgcttatgttactcactgtaaatctacttttaaaggacaaaaactaaaaaacttgttagcgacggaaataccagatgattttatttctcgtcaaataaatgacactagatatattacaagaaaaatcactgaattattatacccggtagctaaaggaaataaagatgcagaaacggacgctgaaaaaggaggtttggtatttacaataggttcaattacgagtgaactcaaaaatgagtgggggttacaaaaagaatggaagaaaatgctcaaaccacgttttgaaagattagaaagacttaacaatgaaaaatatatttatccaaataaaaaaaattccaatgatatagatttcaatgttaaggaaaatgaaactttaaacattaaaagaattgaccacagacaccacgctttagatgctttagttatagcggcaacgactaatgaacatatacggtatctaaatactttaaatgcggctgattcgaatgaagaaataaaacaattgaaaagaaagttggtaaaaggtaaaatccgaaaatttaatttgccttgggagtcgtttacaaaagaagcaaaagaaaaactagaagaaacaatagttacatttaaaagtaataacaaagtatttactaagccttttaatcgatatcaaaagtgggaattaataaacggaagatgggaaaaaacttttgtaaaacaagcaacaaatagaaaatggcttgccgttagaaaatccttgtttaaggaaccgcaagggattatttatataaaagaaattgaaaccaaaagttttagaaccccaacagatatactcaagattatcaaattacaaatggagcgaataaaagctcaaaatacgcctaaacaaaaaactactagttacatatatgaccaagaagttagagaacttgtaaaacaaattattgagttatcgaatcgagatttagatcgaattaaaaaatatctcaaaaattttaaacctaaagatataaatggtaatcctatttatacagttcgtatagctgttttcaaaccttatgctgctaaacgagtaaaattagacaaatcttttgatcataagaagattgataaaataccttatggggataaagtcagaataactgaagataggaaaatgactattccgcagattttacatcaacacttagaggagtatgaagaatacgatagaaaaagaaaagaaattgaagctaaagaggaagagttattaactaatgatgaaaaactttttttggagaatataatgccagaaccattttctgaggaaggtttagaagccttggataaaaaagtaggaatgaaaataagaatggttacaattaaagaaaaaataggaataaaaaaagaacttcaaaataaattgatggaagcagatggtaatccctattatgtcttttatgaaaatgtaataaccaaagaacgttctggattttcttccctatcaacttacgatgtacttcaaaaaagattaaacaatcaacccttgttagaacctaaagcaaaccaccgtattcatgtcttacaaaacaatgacatggtctatgtgcctacaaaagaagaaagggataaaatagttagaggagtaccattaattgaaattataaatttcacagaaattggaaaaagactttatatagtaaatgatttttcaaaaacagatatttattttcggccaaattcatttgcgaaagcaataatttcaaaagagctacacacgagttttgatgataaatgttcacgttttgtaaatttttataatagtgaagaagaaagtgatatgataaagaatgtatgtataaaagtaaagtttgatcgaattgggaatattattttaaatgaagatgattatttgcatttgaaaataaaggaagctgaaaatgataaaagtataacattaaaggaatttaaaaggactctttttgatgaagataacaattaagaagagtttcgaaagggatgtcaaaaaaatccgtgatagagaacttatgataaaagtgttagatgtaatttcagacttagaagcgttagaaagttataaccaaatccccaatttaaaaaagttaaatggttataaatattcacatagaattgcttttgctcatagttctgtaaagtataggatttgtttaaatattaaagagaatcaaattagtatagaaaggtttttaccaagaagtaaatcatatcgcctgtttttttaatgataaaaacaaatctattcaaaatactacaacaattaaaaaaaaacaatcatgtcccacaaactaaaaatagaattaaaaaacactgacccaaaaattactagaacggtcattgtgccggaaaatttcaatttcgacgaattgcatattgtgattcaatgtgtgatgaatt

SEQ ID NO: 3151 - DNA, 23357 bp, synthetic construct
  source 1..23357: mol_type = other DNA
  misc_feature 1..23357: note = Synthetic
  variation 14822..17450: note = note, n is a, c, g, or t
agttaaaacataagtgccggcggtggtgtcaagaaaataattgctgttggttacgccttgggcgatgccgcgcagagcgatgaattcgcccagcgtgtaatctgccaagaaaagacgcatttcgtcgtcgctgacgctggtgtaaacagacatgagttcaaccgaaaaatcggcatcatagcaaacaaaacgggcggcgtgatgctgcttgtgcggattgtgctgttttttgtgcggcgtactgtcaaaatcgggctggaacagcgcggcaattcgtttatccatcatataaacagtggtttgccgtatttggtcaaagccttttcaccgtgtgcttggtttggattgctcgaaatgggttcgacgtttgatagaaaattgccggatttttaagatattccccttgcttattcttgtttttaacagccgtgaaaataaattaaaacttaacaaatatttaaatttccaatagaattgaccgcttaagttgaaaatcaaacaggctttcttgacaggctgcctgaaaatttcagcggcatgtttgtgccgatacaattaacgtaacacgctaactttactctctttatatgtcttcaattgctttatttggtgctttggaaagcgggctgatttacgcccttgtggctttgggtgtgctgatttctttccgtattttggatttccccgacttaaccgctgacggcagttttcctttgggcggtgcggtgtttgccgtgtgtgtgctccacggcatgaatccttggctggcttgcttcgcgggtgctaccgccggcgcattggcaggtatgctaacggcttggttgtatatttctttgaaaattatgcagttactggccagtattttggttatggttgccttgtattccgttaatttgcgcatcatgggcgcacccaatgtgccgctgctcggagaagccaatgtattcagcgcgtttatggcggcggattacagcaatcaatattggttgcagcctttggtctttttcggctttgtactggcggcgaaagtgctgctggattggtttttctccactgaagccggtttatcaatgcgcgccaccggtgccaatgcccgcatggctcgggcgcaaggggtacatacttcacgcatgattttaattggcatggcgatttccaatgcactgattgcgctgggcggtgctttatttgtacaaacccaaggcggtgcggacgtggctgttggtattggcaccatcgttattggcttggcggcggtgattatcggcgaaaccctgattcccgctaaacgcattgtttggattactttatcggtgattgtcggcgcgattttgtatcggctgtttattgcgctggctttgggcagtgaaaccttgcgcagtattggtttcggtccgcaggacttaaatttggttaccgccgttttggtggttctggcattgcgtttaccggtgattaaagcgtatttcagtaaaaggaaacaagcatcatgatgcgcgccgaaaatttaaaactcacgtttaaccccggcacacccattgaaaaccctgccttgcgcggtttgagtttggcaattaaagacggtgaatttgttaccgttatcggcagcaatggtgcgggtaaatccacttttctgaacgccatcagcggcgacacgctggtggacagcggacgcatcgttatcaacggtaaagacctcacccgaaaccctgcttataaacgcgcccattgggtggctcgggtatttcaagacccgatggcaggttcttgcgaagccttgagtattgaagaaaacatggctttggcgtttaaccgaggaagaaaacgcggcttgcgtttggcattaaataaagaaaaccgcgaattgttccgtgaaagactggcgattttaaaactcggcttggaaaaccgtctgactgaccgcatgggcttgctttcgggtggacaacgccaagccgtcagcttgctgatggcatctttgcagccatctaaaatcttgttacttgacgaacacaccgctgcgcttgacccaaaaaccgccgcttttgtgctggaactgaccgaccgcattatcaaagaaaacaaactcacggcgatgatggttacccattccatgcagcaagccttagaccacggcgagcgcaccgtgatgctgcatcaaggtcaagtggttttagatgtgtcgggtgaacagcgcgccggcatgaccgtagcggatttattgcgcttgtttgaggaaacacgcggtgaaaaagtcagcgatgattctttgctgctggattgagattaaacagaaaatgctgaagttggattttggtagatatagagttagttttattttgcgtcattcaatattcagaattcagcatttaaaaacaccaaagtgattgtggtgggcgatcacgcaccgccgctgatgccggacgaaccgcttgtcttttatgataaccaagtccctgtgttggcatttgatgttcggtaatatccaatttttcaggaacgaacatcaggctgcctgaaaagcagcggtacggtatcaacatcaaaaagcaacaagccaaacaaagcggtaaaggtgagtcagcctaaagaaatatttcgcacaaggtgattttgttgtacgcttaaccaaataaagtgttgtttttgaggtcgcccgcgcacccaattttgataaaggaacaccataaccatgcccattcagcaaacgcatttactcaaattgttggactacgcacccgctgaaatcgttgcgcttttggatttggcggccgaactcaaagccgcaaaaaaaaacggaacagagcagcaacgtctgatcggtaaaaatattgccctgatttttgaaaaaacgtccacccgcacccgttgtgcgtttgaagtggcggcatatgatcaaggtgcgcgggttacttatttagaaccttcaggcagccaaatcggacacaaagaaagcattaaagacactgcccgtgtgctggggcgtttgtatgacggtattgaataccgcggcttcgggcaagccattgccgaagacttggcgcgctatgccggtgtaccggtatttaacggtttaaccgatgaatttcaccctactcaaatgcttgctgatgcactcaccatgcgtgaacacagcagcaagcccttgaatgaaattgcatttgcttacgtgggtgatgcgcggtgcaatatgggtaattctttattggttttgggtgcaaaattgggcatggacgtgcgcatcggtgcaccaaaacaactgtttccgaatgcggctttggtggcgcaatgccgtgacattgccgcgcaaactggtgcaaaaataacactcacggaaaacgcgcaagaagccgttttcggcgtggattttgtgcataccgatgtgtgggtgtcaatgggtgagcccaaagaagtgtggcacgagcgcatcgcactcttaaagccttaccgcgtggacagcggattgatgaacgctgctgaaaacccgaatatccgttttatgcattgtctgcccgccattcacaaccgtgaaacccaagtggggcaatggttgtttgaacactttggtttaaacggtgcggaagtgagcgaagacgtgtttgaaagtgccgcttccattgtgtttgatcaagctgaaaatcgcatgcacaccattaaagcggtgttggtggcgttgctggataaacgctgaatcggtttcaggctgcctgaaagtttaaaatcatgattaccattcactacttagccaaactcgccgatttggtgggcattgccgaagaacaaatcgactgggcgggcggcagcagcgatgatttggttgcctatttacgcgcccgtgatgaaacgtggaatacggcattgtctcccgccaatctgtataaaatcgcgctgaataataccattatttatgccgctaaaccgattgccgacggtgatgtggtggcattgctgcctccggtaacgggaggctgatgtgtctgtgctgcctgaaatccatgtgtgcgtgcaaaccgaagacttcgatgtgtcgcacgaactgaaggcaattgatgccgcacagccacacaactgcggcgcggcagtgagttttgtcgggcgcgtgcgcggcaaagacacggatacgccgctgtcgcatttgtggctgacgcatttgccgttggttaccgaaaccgaaattcggcgcattgttcaggcagcctgtaaacgctgggcaatctcttatgctaaagtcattcaccgcatcggtaaaattgatgcgggtgagcaaattgtgctggtattaaccgcatcaccgcatcgcgatgccgcttaccaagccaatcgctgcatcatggactacctcaaaaccgaagcgccgttttggaaaaaagaatgttttgtgaatggtgaagcgcattgggcggagatgaaagcgagtgatgccgcccgcacacaggcatggcaagatgccgctgaataatgtgggtgtgattgtgctggcaggtggtgccgccagccgcttgggcggtgtaaacaaagccttgtgtttgttaaacggcaaacctttaatcgaatatgtgctggaaactttcggcaaagcggcaagtctggtcatcagtgccaaccgcgacagcgcgcgtttgcgccaatacggtttcgccgtggcggcagacgaaacgccgtatcaacaccgaggtcccttggcgggcattgtcagcgcagcgcgtttgttgccgccaaaaatcgaatacattcaggttttgccgtgcgatgcgccttacttgcctgaatgtgtgctgatcggcttacacgaaaggctggctgaaagcagcgcagagattgtgtgtgccgccacgccgatgcgcatgcacccgattgtgtgccaatttcgccgccgacatttggttgtgattgaacagcaattggcagacggcggcaaaggcagtgtacgcagtattattgaaccttatgcgcacagtacagtctattttgcagatgaaaagtggtttcacaattttaaccgcacggaagactggataaacggctgagaatttgtctaatggcttttggaatggtttatttgtgcaaatttcgagggatttttttgttgagcggacgcgttttagtggttctcaagcaaggacgaacagcaaaaaaagcatcaaaatatacactcaaggaagttatttcaaaagccattaaacagcttttaattaaggactaaacacccgctatgatggatttttacgacggcttaaacgctttattaaaccataccgcccaagccgatacacaaacaataccgttggctcaggcgcacggtttgatattggcagaagatttaatggtgcgccaagacgaaccgcggtttgacaacagcgcgatggacggctatgccgtgtgcggtttgaacaatgaacaatggcaaattatcggcacacaagcggcgggcgaacatcacggtttgtctttgcagcgcggacaggcagtgcgtatttttacgggcgcggggctgcctgaaaataccgatgccgttgtgatgcaggaaaacaccgaagcacatgcgcaaacgctgaccataaccacccaattaaaagcggggcaaaacattcgccgtcgaggtgaatcgctgcaaagcggccatacccttatcaaaaaaaataccttattgaatgcccaagccatcggcttaatcgcttcgcaaggctatgctgaaattcattgttattgttcgctgcgcgtcagcgtatttaccaccggcgacgaattggcagcggcaggcgaagcgcttgcctgcaatcaaatttttgacagtaatcgcccgatgctcactgcccagctgttgccgcatcggtttattgatattgccgacagcggtgttttgcccgacgatttgaacgccacaacaagttgcctgaaacaagcggcaaaaaacagcgatgtgattgtgattgccggcggcgcatcggtgggcgataaagactttgtgaagcctgcactagcgcaattgggtgaaattgaacattggaaattatcgattaagcccggtaaaccgtttggctgggggcacattggcaattgtaaaattttactgctgcccggcaatccggtggcggcttttgttaccatgcaattattgggtttaccattgctgcgtcgtttagcgggtttgtctgccgataaagccgccgctgttgcgtattgtgttgccgctgctgttgattttcatggcagtgcgcgccgcgaatttttacgcggtacggtgaaatggcaggaaaataaactggccgtatcgccgctgatgcagcaaggttcacacatgttaagcggctgtgttgatgccgatgtgttgattgaaataccgcctcatgccgacatcaaaacaggcgatgtcgtaaaagtttatcctgtttaatacaaagtattgttctaattaaataaagctcaataaagcacgaaaataaggataacgcagatgacccatattccccgcttttttacgtcctcagggtttgctgttatcggtgcaatgctcttggtagcttgcagcagtcagccggaagtaccgttcaaacccgttgtcagcaccacccccgctgtggatattatgcctggatcgcaagtaccggaagcggcggaaaaagtgttgtctgattaccaatggtatcgcgccgccatggacgcggttcgctcggaagatgatttgctgcccgctgattttttaagcagacagcagcccagcgccatggcaaacagtgtgcgcaatcagtggcttaaaagtttgggcaaacgcaatcaatgggatttattcaggcagcaatacgcacagctacctgccgatgtgcgtgataaagaaacgcgttgttatgctcttttaacgggaattgagcttgattcaaagcaaagtttgcgcaatgagttggtttgggaattggataagctgcctgaaggctgcaatcgattgcttaatcgggagacggccggcggtgcacttgatcggtcaaaggcttggcggcgtgtacgcggtttgttggctgccaaccaaattacccatgcccgtaatttggcacaagcacttggcagcccgctgcccaatcctttgagtaacattaatgtaactgccgccgccgatttaacacagggcgagcaagaagccttgctgtatcgggtaaccgccaaaaacaaccgcatcaaaaacgatgcgccggagctgttgcagcaaatgtcaggcgtgcttactgccgagcaaatcggtttcggctgggcgcaattgggtttagcccaagcatataaccaaaacgccgtgaacgctttggtgtatttcaaccaagccgaccacagccaattgagcgatgaaatgtgggaatggtatgcccgctcggcattgcgggtgcaaaactggcatcagttatcggaaatcatccgtgccatgccgcctgaattgcaaaaaacacccgtttggcaatattggctggggcgtgcgcatggtgtggcaggcaaccaagcggcggcacaaatcttataccgccaagccgccgcatcgggacgcaatttttacgcattgctggcagctgaagccttaggcggcagcgttaatacccgcaataatgttgccgtcagcaccaaatcacaaatcaacaaagttgctcaagacggcaatattgcccgtgcgcttgccttgtttcacggcgcacaagaaaccaatgattgggatatgcgccgccaagcccagcaagaatggcggtatgccattcgccactacaatgaagacaccttgctggctgcttcggctttggcataccagcaaggcttctacgaaatgggtattttgagtgccgataaaaccaatgacaaacttaattttgaactgcgctacatcgcaccgtttaaagacattaccctgccgtatgcgcagcaagcaggaatagaccctgcttgggtttatgggttgattcggcaggaaagccgtttcatgattggggctacttcacatgtcggcgcaaaagggctgatgcaagtcatgcccgcaaccgcccgtgaaattgccaataaaatcaatatcagtgcagacgaattgcacagcatggacggcaatatccgcatgggtacatggtatctgggtgatattcgcaaccgcttcggtgatgaagtcatggcgacagctgcttataatgcaggtcccgctcgtgcgcgccgctggcaagctgaagtaccgttggaaggtgcaatttatgccgaaaccattccgtttgacgaaacccgtacttatgtgaaaaatgttatggcaaatgccacctattacgccagcctgtttaaagagccacaaacatcattaacccgccgcatgggaacgattccggcgcggtattgatttgcacaatttaattgatttgtacagtttaaaagacacggcatcaaaaccgtgtcttttttgctgccgaaagtccgtgttaaatccgattaaattgcttgcttcgataatcgctttgtgaaacgataaaacccttgcttcacaaatttttcaggtatttttatgtattacagtgaacgtttcaatgcctattcacacctcatcggcgtgtgcttggcggtgttgggaacggtattgttggtggtgaaatcggtgtcaatcggcagtgcttccttgattgtcagctttgcggtttacggcgcgagcttgattgttttatatggtatttcaacggcatatcactgtgttcggcgggaacacgccaaagccgttttgcaaaaatttgaccattgtgccatttatgtattgattgccggcagctataccccgtttacactcaacacgctgccgggtgcatggggttggtctttgttcggtgcatcttggggtttggcgttattcggcattgtgcaggaaatcacattgggtaaaaaaacccgattgctgtcgatgattttgtatgtggtgatgggctggctgatcgtggcggcaatttctccgttggtacaacacctgcccgccggcggtctgttttggctggtattcggcgggctggcatacagcattggcatctattggtttctcaacgatgaaaaaattcggcacggacacggcatttggcatttatttgtgctggcaggcagtgcggcacaatttatgagtgtgtatttttatgtgcgctgatgcggtcaatatgtgcggtgaaccgccgttagttagaacccatgttcaaaaaaattcttaataaaatcatatgatgtcaaaaaacgactcaatcatcgcccattggctatctgtcaaatcactcgggtacataaaggattacctactgtcttaatttatctgccaattatacaccatttgattctattaagaatttttttgaacatgggttcttaaacattattgaacataggttcttaatggttggtcaatcagccaatgccgctcaacttcgttttttattgacgaaatgtaacgatatttggagtgtatcaataaaatattttaggctgcctggaggttttcaggcagcctgttttttaatcagaaaaatgaattgattaaacaaaatcagcgatattgatactgaataaaaaacatgcaagcgatttcaaaaaatccaatttgccaaacagatgaaaatacgccttttcggttttgtttgtgtgcggtggtgatgaacagaaaacgcagacagagcgggaaacggctgcctgaaagcagcaagcgcagaaaaccaacagcaaaacaccctgactctgcgggaggtcagggtgtttaacaatgcaccagggggaggtgcagagtgtttcagtataaaaccttacggttaaaactttattatagcaacggctctcattcggtaatgctatgttgcccatattacatagctgttgctggtgctgtcaaatattatttatatgattggcaagaattgttgttttaacaaaaaaatattttattttcaatggataaataattatttttgtattatatataactacaacgttattatttcataagattattaaaaaggagatagagattatgagagcgccttatattttggggctggatttaggcattgcttcagtgggttgggcggtggtgggaatagatgatgatgaatacccgaaagcccttattgatgtcggtgtgcgctgttttgaaaccgcggaagtaccaaaaacaggagaatcgctggcagccgccagacgcttggctcgtgcgcagcggcgattgactcgccgccgtgcgcatcgtgtgctgcgtttaaagcggctgcttatcaaagaaggtattttgtctgcaaatgattttacggaagacggcaatggcagccgtgtgttaaaaaacattcaagccaagcgcgataaagcgatgaacccaaatgaaatacaaatgcaggcgcgcttaaaacagccgtggcaattgcgggtggaaggcttagatcgctgcttgaatccgcaggaatgggcggtggtcttgctgcacatggtgaagcaccgcgggtatttatcgcagcgggcgaaagaggcagaacaagacaaagaacaaggcaagctgttgtcggcaatcaaagaaaacagcggtaaattgtgggcagaagaaaccgcaacgccggcacatttggcagtggaatattttgccaaagaagaagggcatatccgcaatcagcgcggtgcatacacccacagtttcaaccgcaaggatttggaaaaagagctgacgttgttgtttgatcggcagcgtattcagggcaatccgcatacatcacctgaattttttgaaaaggttcgtggtttgttgatggatcagcgggctgctttatcgggtgaagcgattcaaaaaatgctgggtaaatgtacgtttgagccgaaagaataccgcgccgccaaacacagctacaccgccgagcgttttgtgtggcttacccgcctgaataatattcgtctatacggcaatggcagtgaacgggcgttgtctgatgaagagcgtagcgagctgttaaataagccgtatcaaaatgccaaattcacctacgcccaagcccgcaagatattgggtttggacgagagtgtgctttttaaaggcattgattccaaagacgaaagcaagaagacgctggctgaattaaaaggatttcatgccatacgcaaggcattggaatcacaaggtttgaaaaatgaatggcaagccatgtcaggcaaagccttaaatggagatgccaatgttttagatgccattggcacgggcttttccttatataaaaccgatgaagacattactcagtatctcaatgaaaagctgcctgaatccgacaggctgcctgaaaatgtattgattgccttgctgaatggggtgaattttgaccaattcatctcattatctctgaaagcgttgcataagattatcccattgatggaacaaggcaaacgttatgatgaagcctgtgccgagtgctatggcagccattatggcagtggggtgaacaatgccaataaaaaagcactattaccgccgatttctgatgatgatattcgcaatccggtggtacggcgtacccttgcccaagccagaaaagtggttaatgccgtgattcggcgttatggacagccggcacgggtgcatattgaaacagggcgagaagtcggcaaatcaattgaagacagaaaagccattgagaaacagcaagctgagaatcagaaagatcgtgaaagaagtaaggaatacttcaaaaaacaatttcctgatgcaggcgaacccaaagcaaaagacattttgaaattgcgtttgtatgaacagcagcacgggaagtgtttatattcaggcaaacctttggatattaatcggttgttggaggcgggttatgcggaaatcgaccatgctttgccgttcagccgcacgtgggacgacagcttcaacaacaaaatcttggtattaaaagcagaaaatcaaaacaaaggcaataaaacgccttatgagtggttcgacggcaaaaacaacagtgaacgttggcggacgtttgttgctttggtagatggcagccattttagccccaccaaaaaagcgagggtgaaaacgcaggaattggacgaagattttattgcgcgtaatctcaacgatacccgctacattgcccgatttttgttgaattttatcgaagcgaatttggcattaaccggcaaaggtgaaaaacgggtgtttgcgtcaaacgggcagattactgcttttttacgcggacgctggggcttgcggaaatcccgtgaggaaaatgatcggcatcacgccttagatgcggttgtcgtggcgtgttcttcggtatccatgcagcagaaaattaccaagtattctcgaaaacgggaattgggtaaagccaaaatcgaacaaatagattatgaaacaggtgaaatcatttctacccatttccctaaaccgtggaagtttttccgcgaagaagtgatgattcggatatttaaccgagtacttgataatagggatcaaagtgcagaggcattggaagatgcagaagcattgaaagattatttggtgaaaaaattgcccgacagaccgcaagcggtgcataaatacgtaacgcctttaatcgtatcccgcgcaaccgggcgaaaattatcggggcaattgcatcaagataccatacgttccgccaagcggctggctgaatcagaaagtaccgtgcgggtggcattaacggcattaaaactcgcacaactggaaaacatagccaataaagaaagagaaagcgcgctatatcaaaaattgaaaacgcggttagaagaatacggcgatgacccgaaaaaagcttttgctgaaccgttttataaatcggagaaagacagagaagcgggcagagcgatgaaagcaatcagggtgagtaccactcaaaaatccggtattaaaatccgtagcggcattgccgacaatggcgaaatggcgcggatagatgtgtttaccaaaaacggtaagtattttttagtgccgatataccgccatcaggcagccaaaggagagttgccgaatcgggcggtgattcaaggcaaagatgaagatgagtggcaggaaatggatgaaacctattcatttcattgtgtgttgtttaaaggcgattggattgaggtgcagaccaaaaaagaaacccatcgcggttattttgatggtttacatagagcaacgggcggcatcagtatcaaagtacatgatagagatagccgtattggtaagaaaggtattttggaaggcattggtgtaaaaaccgctgtttctttacaaaaataccaaatcgatcctttggggaaatttattagaccatgccgaatgggcggtatcagacccgggataaaaggagataacaataaaggaaacaatacagagaaagaggaataaatgcaggattgatattgttcaatgtgttaaagaatacagcacaggctgcctgaaaacagtggtgttttcaggtagccaaggtttcatgcagcgatgaagcccacaaaagataatcttaaaggagatgttccgtgacttggcgcagcatcatcatcagcaagggtggtaaattgtcgctgcggcacaatcaattgctgattcagcaagatgaggcagaatacaccgtgccgttggaagacattgccgtgatggtggttgaaagccgtgaagtggtgattaccctgcctttattgtctgcaatggcggcacacggcgtttcattattggcttgtgatgaataccatttaccgtgcggacaatggctgcagtttggtcaatatcaccgccagctgaaaattttgaaattgcaaatcaacagcagcgaacctttgaaaaagcaattgtggcaagccattgtttgccaaaaaatccgcaaccaagcatttgttgccgaagccattggtgaaagccaagcggcagggcgtttgcgggtgatggcaagcagtgttcgctccggtgataaagacaatcaagaggcacaagcggcagccgtgtatttcagggcaattttcggcaaaggttttgtgcggcaagcggaaaatggcatcaacgcgcggctgaattacggctacagcattgtgcgttcggcagtggcgcgtgctttggctgcgcacggctggcagccggcgttggggctgtttcaccgcaatgaattaaacccttttaatttggcagacgattttatcgaaccgctgcgccctttggtggattggctggtgtggcaattattcaccgaagcggcaataacacccgagttaacgccactggcaaagcagcaattaacccggctgctgcattatcaaatcacggtatccgaacaaaaatacacagtgttggcagggattgatcgcatggcggcatcattgcagccggcgttggcatcaaagaacaataaactgttaaatctcccccaactgtcggctttaaaggagcaatcctatgagtgaggcgatatttatgcgtttaattgttttttttgatttgccggtaaccactgttgagaagagaaaagctgccaatcaatttcgccaatttttgctgaaagacggttatcagatgttgcaattatcggtatatgcccgcctggtgcgcggaagagacgcgttgcaaaagcacaacaaacgcctgtctgccaacctgccggaagagggttcggtgcgctgtttggaggtaaccgaaaagcaatttgccgccatgcagctgctgttgggtgagctgaaagtcgtcgaaaaaaaggtgaatgccgatcaattattgctgttttagcagcattttttagagataaaaaaagcgacaaatcctgataaatacagggtttgccgcctgaatattatagcattgccgaatgagagagggagctataacnnnnnnnnnnnnnnnnnnnnnnnnnnnnnnnnnnnnnnnnnnnnnnnnnnnnnnnnnnnnnnnnnnnnnnnnnnnnnnnnnnnnnnnnnnnnnnnnnnnnnnnnnnnnnnnnnnnnnnnnnnnnnnnnnnnnnnnnnnnnnnnnnnnnnnnnnnnnnnnnnnnnnnnnnnnnnnnnnnnnnnnnnnnnnnnnnnnnnnnnnnnnnnnnnnnnnnnnnnnnnnnnnnnnnnnnnnnnnnnnnnnnnnnnnnnnnnnnnnnnnnnnnnnnnnnnnnnnnnnnnnnnnnnnnnnnnnnnnnnnnnnnnnnnnnnnnnnnnnnnnnnnnnnnnnnnnnnnnnnnnnnnnnnnnnnnnnnnnnnnnnnnnnnnnnnnnnnnnnnnnnnnnnnnnnnnnnnnnnnnnnnnnnnnnnnnnnnnnnnnnnnnnnnnnnnnnnnnnnnnnnnnnnnnnnnnnnnnnnnnnnnnnnnnnnnnnnnnnnnnnnnnnnnnnnnnnnnnnnnnnnnnnnnnnnnnnnnnnnnnnnnnnnnnnnnnnnnnnnnnnnnnnnnnnnnnnnnnnnnnnnnnnnnnnnnnnnnnnnnnnnnnnnnnnnnnnnnnnnnnnnnnnnnnnnnnnnnnnnnnnnnnnnnnnnnnnnnnnnnnnnnnnnnnnnnnnnnnnnnnnnnnnnnnnnnnnnnnnnnnnnnnnnnnnnnnnnnnnnnnnnnnnnnnnnnnnnnnnnnnnnnnnnnnnnnnnnnnnnnnnnnnnnnnnnnnnnnnnnnnnnnnnnnnnnnnnnnnnnnnnnnnnnnnnnnnnnnnnnnnnnnnnnnnnnnnnnnnnnnnnnnnnnnnnnnnnnnnnnnnnnnnnnnnnnnnnnnnnnnnnnnnnnnnnnnnnnnnnnnnnnnnnnnnnnnnnnnnnnnnnnnnnnnnnnnnnnnnnnnnnnnnnnnnnnnnnnnnnnnnnnnnnnnnnnnnnnnnnnnnnnnnnnnnnnnnnnnnnnnnnnnnnnnnnnnnnnnnnnnnnnnnnnnnnnnnnnnnnnnnnnnnnnnnnnnnnnnnnnnnnnnnnnnnnnnnnnnnnnnnnnnnnnnnnnnnnnnnnnnnnnnnnnnnnnnnnnnnnnnnnnnnnnnnnnnnnnnnnnnnnnnnnnnnnnnnnnnnnnnnnnnnnnnnnnnnnnnnnnnnnnnnnnnnnnnnnnnnnnnnnnnnnnnnnnnnnnnnnnnnnnnnnnnnnnnnnnnnnnnnnnnnnnnnnnnnnnnnnnnnnnnnnnnnnnnnnnnnnnnnnnnnnnnnnnnnnnnnnnnnnnnnnnnnnnnnnnnnnnnnnnnnnnnnnnnnnnnnnnnnnnnnnnnnnnnnnnnnnnnnnnnnnnnnnnnnnnnnnnnnnnnnnnnnnnnnnnnnnnnnnnnnnnnnnnnnnnnnnnnnnnnnnnnnnnnnnnnnnnnnnnnnnnnnnnnnnnnnnnnnnnnnnnnnnnnnnnnnnnnnnnnnnnnnnnnnnnnnnnnnnnnnnnnnnnnnnnnnnnnnnnnnnnnnnnnnnnnnnnnnnnnnnnnnnnnnnnnnnnnnnnnnnnnnnnnnnnnnnnnnnnnnnnnnnnnnnnnnnnnnnnnnnnnnnnnnnnnnnnnnnnnnnnnnnnnnnnnnnnnnnnnnnnnnnnnnnnnnnnnnnnnnnnnnnnnnnnnnnnnnnnnnnnnnnnnnnnnnnnnnnnnnnnnnnnnnnnnnnnnnnnnnnnnnnnnnnnnnnnnnnnnnnnnnnnnnnnnnnnnnnnnnnnnnnnnnnnnnnnnnnnnnnnnnnnnnnnnnnnnnnnnnnnnnnnnnnnnnnnnnnnnnnnnnnnnnnnnnnnnnnnnnnnnnnnnnnnnnnnnnnnnnnnnnnnnnnnnnnnnnnnnnnnnnnnnnnnnnnnnnnnnnnnnnnnnnnnnnnnnnnnnnnnnnnnnnnnnnnnnnnnnnnnnnnnnnnnnnnnnnnnnnnnnnnnnnnnnnnnnnnnnnnnnnnnnnnnnnnnnnnnnnnnnnnnnnnnnnnnnnnnnnnnnnnnnnnnnnnnnnnnnnnnnnnnnnnnnnnnnnnnnnnnnnnnnnnnnnnnnnnnnnnnnnnnnnnnnnnnnnnnnnnnnnnnnnnnnnnnnnnnnnnnnnnnnnnnnnnnnnnnnnnnnnnnnnnnnnnnnnnnnnnnnnnnnnnnnnnnnnnnnnnnnnnnnnnnnnnnnnnnnnnnnnnnnnnnnnnnnnnnnnnnnnnnnnnnnnnnnnnnnnnnnnnnnnnnnnnnnnnnnnnnnnnnnnnnnnnnnnnnnnnnnnnnnnnnnnnnnnnnnnnnnnnnnnnnnnnnnnnnnnnnnnnnnnnnnnnnnnnnnnnnnnnnnnnnnnnnnnnnnnnnnnnnnnnnnnnnnnnnnnnnnnnnnnnnnnnnnnnnnnnnnnnnnnnnnnnnnnnnnnnnnnnnnnnnnnnnnnnnnnnnnnnnnnnnnnnnnnnnnnnnnnnnnnnnnnnnnnnnnnnnnnnnnnnnnnnnnnnnnnnnnnnnnnnnnnnnnnnnnnnnnnnnnnnnnnnnnnnnnnnnnnnnnnnnnnnnnnnnnnnnnnnnnnnnnnnnnnnnnnnnnnnnnnnnnnnnnnnnnnnnnnnnnnnnnnnnnnnnnnnnnnnnnnnnnnnnnnnnnnnnnnnattttaattatagtattacctatggcattgccagatgaaaaatccataactaaataagctgttacggttgctgatatatggaagtaccatattagttggtggtattaagcattttgtgggatttgccaaataatgattgttggggtttaaagatactcagaaagaaaaattttgaaatcactctaaaaaacaaatttcattttaatcaccaaaaccaaaatggctgcacaattttgctaaaatggcttaaggttatccaatttagctgccaagctccttaagataaaacgcaaatttcaaaatcaacacaaaaaccaacaatggaaataataccatgaaaaaatatttattttatttgtgcatctggctgttaccgctgctcgctcatgcttttgatttgaatgacttaagccgtcaattgcagcaacctcaatccattcagggcgaatttattcagcaacgctatctggcttctttaaataaaccgttacaaaccgagggcgtgtttgtgttgcagccgaaaaaaatcttgttatgggacatgcaaaagccgtttgcacaacgtttgcgtgtgcgcgctgatggtattgatcaatggaatgggcaaaactggcagcgcagcgccaatcaatctgctgcccagcggcggcaaatgcaattatttttggatttattgggcgggaacgcccaagggttgcagcagcatttcagtatggcattgagcggtaatgcgcaacgctggcaattgttgttacagccgaaatcggcgttgatgcaacaaattttcacacgcatcaatattcgcggcaatgcggtggtgcgtgaagtggaaatcgctgaaaaacaaggcgataaaacggtgatgcgttttgaaaatatacgcattgatgcccctttcagtcaggaacaaagccgtgctttggctcaataagcggcggcacatttcagtggcactgcttgcagtgctgatattgctgtctgcggttttcgtgttcgttaaggcgcagcagcaaccattactgcaaacagaaatgacgcagctgctgcctgaagatgcgcaattgaccgcggcacaacaagcggcgcagcggcagattgaacggcaaatgaatcaacaactgctgctgttggtgggcgcatctgacaaggcaaaggcgcaaacaggcgcagcagaattagcaaatctttggcggcgcagtgcgattttcactgaagtggctgatcaacacattccggatatggcgcaatggcgtcagcaagcgcttgttttacaattggctctgttgccttcatcgcagcagcaattattggaaagccgcccgcagcaatattttgccgaacgtgctaccgatattgccaatccgttttcgccgccgtcgttattgcctttagatgaagattgggcggggtttggtcggtttattttgcccaaaacacagccggcaaacagccgtttgcaatgggatgctgacagtggtgttttacacaccgaataccaaggtaaatattggatagcgattacaggcaggctgcctgaaaacacaggtgcggtatccgtgccgaatggtttattggatttggtgcgccaaaccgaaacacaggcggcggtgattggcgtggaaacccgtttggcgggcggtgcggtatttgccgcagaagccaaacaccgtgccgaaaccgaaggtgcgcgaatgggtatcatcggcactttattaacgctgttgctgctgttgctgctgtttcgccgtgcccgcgtgttgtgggtgtttatgccggtggcggtggggctgggcttgggttttgccgcctgtgtgctggtattcgggcaaattcatgttttgactttggtgattggcacgagtttggtgggcgtgctgctggattttcctttgcattggcttgctcccgcattgctgtcggaaaagtggcaggcaaaaattgccatgaatcggctgctgcccgcttttgtgctggcgtgtttgattactgctttgggttatgtgttgctgctgtttgcgcctttgccgattttgcgccaatgcgcggtgttttcaattgccgctttaatcggtgcgttgtgggcaagtgtctgcggtttaccgcctctgtttcaccgctgtatcctgcccgcgcaaacgtggttgaacgcatggtttggccgcctgtggcaaaccattcatggcctgcgttgttcgcggcggcgcatcatcttgttttggggagcatggcttgtgttggtgctggcgggctgctggcacagccgttggcaggacgatattcgcacgtgggcgaatttatcgcctaaatggttgcagcaagcgcaggcggtcagtgaaatcagcggcatcacgccgtcggctcaatttttattgattgaagccgatgatgaggaatctttattgaaagcagatgccgcggtggtgcagcggctttcaggcagcctgaaaaataccgtatcgttgagtcaatgggtgcagccgattgcttcacaacagcaattaaaaaacaccttgcatgccttggctgaccagcccgaaacatggacggcaatgactgatttggggatacccgaaaacaccattcgccaagcactgctcactgccgcgcaagcaccggacattgatttgcatactgcactgaatacacccttggcacaagcgtggcagcctttgtttttgggagaggtaagcacagggcggtatgccgctttggtgcgtttaaccgaaaaatacgatgcggcagaagtccgtgaattgattcgtaacatgcccaacgtcagttgggtggataaggtggcgcggctcaatgaatcatttacacaaacccgaaatcaaaccttgtggctgaaaatcatttctttgggattggcgtggatttctctggtgtggtatttgggctttgggtgcggcagccgagtgttggctgtgcctgttttaaccgcactcagtgtgattgctttgttaggctggctgaacttgccgattggtttatttgttattttcggtttgctgctggtgtcggcaatcggcattgattatgcggtgtatctgcacaccgctgacatcaataatcgcgatgaacgcttggcaggcagcctgttggcggcgataaccagtttgatttctttcggtttactggctttcagcagtacgccggtggtggcgcaattgggtttgactgtggcgttgggcgtggtattgagtttgggcttcagcattattttgatgtcggtcaaacaatctgactagataacgtcggttggcgtatttacaggctgcctgaaacacaatattgtcatggtattgcgattacgcggcgcgggctaattcttttttagtgcgttgaagttttggcatgtacccgagtaaacgctcttttctcaggcatcaataatatgccttttaaagtattttaacgactattttttacctgcataccataggaaaatcatgaatcaaccacatacagtcattatcggcgcaggtccatcaggcacggtggcagctgctttgcttacccaaaaaagacatcgggtaacggtattggagcagcagcattttccgcggtttgttatcggggaaagtttactgccgcattgcatggaaattttagatgaagccgatatgctcacggcggtgatggcgcaaagcgggtttcaatacaaaaacggcgcggcgtttacttggggcgaatgctatacgcactttgaatttactgataaattcacacacggtcccggcaccacgtttcaagtacagcgcgtggtgtttgaccaattgctggttaatgaagcccaaaaacaaggcatcgaaatccgctttggacacaaagtaaacagctggcaggaaaccgacgatggcgtggtcttgggtattgacagcgaaaaagaaagttacacgcttggtgctgattttgtactggacgccagtggctacgggcgcgtattgccgcgtttattgaatttggaatgcccttccgaattgccgccgcgccaagccgtcttcacccatattgacgaccacattgtcggcaatggttttgaccgcaataaaatcttaatcagcacccacccgcagcatcgagatgtgtggttttggctgattccattcagcaacggacaatcgtctatcggcgtggttggttcaaacagtcggctgggtacggtaaaagcgggcgaagaagccgaatttttacaaaaatgggttaatgacatacccatgctgcgccgtattctggtaaacgcggtgtgggataacggcataccgtatcggcagctgcaaaattattctgccaatgtttccgcgcttttcggtaaacggtttgcgcttttgggcaatgccgccgaattccttgatcccgtgttttcgtcaggtgtaaccattgccctgcattcggcaaaattggcggcagacaccttgcaccgtcaatacagcggtgaaaccgtggattgggcgcatgattttgcccaaaaactcatggtgggtgtgaacgcgtttcgtacctatgttaatggctggtacaacggcacgttccaagacgtgatttatgcacctgaagaaaaagtaaatcctgagattcgccgcatgatttcagccattttggcaggttatgcttgggacgaaaataatccctacgttaccaaatccgatcggcggttggcggtgttggctgaaatatgcgggcaggtaaaacccgttgaataatttgaataaacggtaaaagcaccgctatgaagagattgcgttatgttcgccgcttgctgtttgtgtgtttattgagtgcctgcacttttttttcagacagcctgctgcccaatccgcaaaccgttccgacgcaattaacggtgatgtggtttcggctcacgcatgaaacagacgggcagcaaagtttgctggcagtgcagcgcaccgagcagcagcaatggcgttgggtgcaaaccgatgctttcggcgcgcctttggcaaggcagctaagcgatcaatacggctggaaaaacgatggttttttaccgccaaaccgcacagccggccgcttatttgccgctgttgccctgattgccgccgcgcaaaccaacacagaaatcagcgcgatttatccgtcgcttgaagttgtcggcgatgcacaatccgcccgctatctgttaaaaggaaaattattgtggtctgtttggcatctcaactcagaccaatggcggattggtttcgataatgacagttggttggtacaaaggctgcctgaataatattgctgaaatgattattcctctttgctctgcggcaacacaaataagcgcggcgatggataagcaaacattgctctgcaagcaagcagctgttttaattgatagaaaatcaatagaatagaatgaacaaaacacatgattgaattatttgccgcgattatttgcagcgtgctggtgtcggttttgttgaaaattgctcggcgcaatcatctgctgattcagcaagccattgccgtgaattatttggttgcggcaagctgtgcttatctgtttttgcaacccgatttgggcggcgtgttggatagcccgcagcaaggattgctattgcttgctttgggtgtgttactgcctgttatttttgtgattatgggtaaagccgtggacagtgccggtattgttaaatccgatgcggcgcagcggctgtcgttatttttgccgattttggcggcgtttgtggttttcggtgaagccctgagtctcaataaaagcgtgggtattttgctggcatttttggcgttatctgcactgctgtatcaacccgctaacaccttgcacgcaccgaaaaagccaaacaataccgccgcgcggctgctccttgccgtgtgggcagggtatggaataattgatattttattcaaacagttatcaaaaatcggacaagcctt

SEQ ID NO: 3152 - DNA, 23357 bp, synthetic construct
  source 1..23357: mol_type = other DNA
  misc_feature 1..23357: note = Synthetic
aagccgtggtcgaagccgaaagcctgcttgacgcagtagccgccgcgctggaactcgatgccgacctgctcgatgaagcggagcttaccgccatccgcagcagcatcgccgcgctcgaaggccgtctgaaaaacggcaccgcccaagacatccgcgccgccgtgtccgcactcggtgcaagtaccgacaacttcgccgccaaacgtatgaaccgcaatatccaaagggcgttggccggacagagcatcgacgatatttgagtctgccgcatggcgttcagacggcctgccgcataaaaaggccgtctgaaaacaaagtgcgcaaatgccgcccgcaacgcttgcacaccgccccgaatacgcccgaacgaaatacacaaaccgctttcatcaaagagaaaaaacaatgcccaaaatcaccgtactcccgcacgcaacactctgccccgaaggcgcggtcatcgaagacgcgcccgagggcaaaaccgtactcgacgttttgctcgaccacgacatcgaagtcgatcacgcctgtgaaaaatcctgcgcctgcaccacctgccacgtcatcatccgccaaggcttcgacagcatggaagaccccaccgagctcgaagaagacctgctcgatcaggcctggggcttggaagccgactcgcgcctgagctgccaggccgtggttgccgacacggatttggtggtcgaaatccccaaatacaccatcaaccacgcccgcgaagaccattaaacaggccgtctgaaaatccgccggcaaaaccctgcccgcagcctttcagacggcctctgataaaacaacggacacaaggaacccaagccatgaaatggaccgacacccaacgcatcgccgaagaactctacgacctgcacggcgacagcatcgatcccaagaccctgcgctttacccaactgcgcgatctgattctcgccctgccccatttcgacgacgaccccgcccgctgcggcgagcgcatcctcgaagccgtgcagcaggcatggattgaagaagccgaataaatccgacccatccgttcaggaccagccatgccccgccatccctaccgccgcctgcgggcggcacaaaacgccctgcccgaagtcggcatttccgaagaaaacggcatccgttccctgcacttgggcagcagcaccatccaaagctcgatgaacctcgacaatccggcggaactcgtcctctcatacagccgcgccatgatgggctggctgctgtttgccgacccgcccgcacacatcacccaaatcggtttgggcggcggatcgttcgcccgctggatagacgcacacctgcccgatacacgccaaagcgcaatcgacatcaatccgcaggtcatcgccgttgcccgcagcctgttcgagctgccctttgaaggcacgggctttgaaatcatcgaagccgacggcgcgcaatacgtcaaaaccctgctcggcggcaccaacgttttactggtggacggattcgacggcgaacaaatcatcgacagcctggttagcacagaatttttcctcgactgccgccgcgcccttgccgccgacggcatcttcgtcgccaactggtggagcggagacaaacgctacccgcgcttccttgccgatctctccgccgcattcggcggccgcgtgctgcaaattcccgccgccagccacggcaacatcgccgtaaccgccttttgccgcaccccgccgacgctgaatttcgacagcctgaaaaaacgcgccgccaaactggccgcgcaatacggcctcgactttcccgccctcctcgccgccgccaaagccgccaacccgcacaacggcaaatccttcgtctttccggactgcccgtagcagacacgccgaccctcccccgcacgcgcaaacccgttttcagacggcctcccccatccgcccaccgccatgcagcagcgcaaaatcatccacatcgacatggacgcgttctacgcctcggtagagctgcgcgaacgccccgaactgcgcggcctgcccgtcgtcgtcgcctgggaaggagcgcgttccgtcatctgcgccgcctcctacgaagcccgccgctacggcctgcactcggccatgtccgccgcagccgcccgccgcctctgcccgcaagccgtattcgtcccgccgcagtttcccctctaccgccaagtctcccggcagatacaccgcatcttccaacgccacaccgacctcatcgaacccctctccctcgacgaagcctatctcgacgtaagccgcaacaaacaaaacctgccctacgccaccgacatcgcccgcctcatccgcgccgacatcaaagccgaaaccggcctcaccgcctccgccggcatcgccgccaacaaattccttgccaaaatcgcctccgactggaacaaacccgacggccagtttgccctgcccccgcagaaaaccgaagccttcctcgccgccctgccgctggaaaaaatccccggcgtaggcagagtaaccctgcaaaaaatgcaccgcctcggcctcaaaaccgccggcgacctgcgccgcatggaacgcggcgaactcgccaacctcttcggcaaatggggctaccgcctctacgacctcgcacgcggcaccgacaaccgccccgtcagacccgagcgcgaacgcatacagatttccaccgaaatcaccctgcccgaagacctgcccctggccctcatcctgcaacacctgccgcatttggccggcgacctgtgggcgcaggccgaacgcagaaaatgccgcgcccgcagcgttaccctcaaactgaaaaccacccgcttccgcaccctcacccgcagcctcacctactcctcccccctgcccgatgccgccgccctgctgaccgccgcccgcgaactggccgaacggatgccgcccgacagcgaaggcggctaccgcctcatcggcctgggcatctcccacctcgaacagcccggcatccagcccgagctgtggctgccggaacaagatgccgtctgaaaaccgtttttcagacggccttttgcttgtaatcgattcggcaggacaaatccacggcgaagtaaaagacgcgtgcgccgccggggcgacacaccctacctgatgctgcgcaagcctctccccgctggaaatccgtccccgccaccggtgtagggtgtgtcgcgccgcgacgcacgcgttccacgaacttcggcaaaagtccgtctgaaaaccaatatctgcgactgttgtagggtgtgtcgcgccgcgacgcacgcgcccccaaattcggcagaaaggccgtctgaaaatcctgcaaacggattttcagacggcctgtgtttgcggcggtgcgaaatcagatgccgccttgtgctttgacttttgcggcgctgaattccagtttggagagggcggagaggtaggctttggcggtggcggccaacacgtcggtgtccgcgccctgtccgttgaccacacgtccgccgcgtgcgaggcgtacgctggtttcgccctggctttccgtgccttcggttacggcgtttaccgaatagagctgcaataccgctccgctttgcaccacgctttcgatggctttgaaaatggcatcgacagggccggagccggtggcttgggcgcgtttttcttcgccttggatgctgaacacgatttcggcacgcggctcttcgccggtttcggtggtgatgcgctgcgagatgaatttgtaggcatcttgggcgaggctgtgcatttcgtcggaaaccagcgcgtgcaggtcttcgtcgaagatttcgcgttttttgtcggccagttctttgaagcgggcgaatgcggcattgagggcttcttcgccgcccaagtctatgcccaagtcggcgagcttggttttaaaggcgttgcggccggagagtttgcccaggctcagacggttggccgcccagccgacggattcggccgacatgatttcgtaggtttcgcggtgtttgagcacgccgtcctggtggatgcccgactcgtgggcaaaggcgtttgcgccgacgattgctttgttgggctgcacggggtagccggtgatggtggaaaccagtttggacgcaggcacgatttgggtggtgtcgatgccggtttccatgccgaatacgtcgtggcggactttcagcgccatgacgatttcttcaatcgaggcatttcccgcacgttcgcccaagccgttgacggtacactcgatttggcgtgcgccgccttttaaggcagagagcgagttggcaacggccaagcccaaatcgttgtggcagtgtgccgaccacaccactttgctgctgccgggggttttcgcaatcagttcgcggaaaaaatcttcggttttgtgcggaatcgaatagccgacggtgtcgggaatgttgatggtggtcgcgcccgcctcaatgaccgcgccgcagatttcggcaagaaagttgatgtcggaacgcagtgcgtcttcacacgaaaactctacgtcgtcggtatattctttggcgatttttaccgcttttaccgccgcttcaatcactttttgcggcttcatcttcagcttgtgttccatatggatggggctggtggcgatgaaagtgtggatgcggcggcgttcggcaggggcaacggcttcgccggctttgcggatgtcgttttcaacggcgcgggagagcgagcagacggtggcgcgggtcagcgttttggcgatttcgtgaacggcttcccagtcgccggggctggcggcggcaaagcccgcttcaatcacgtctacacccagtttttcaagctggcgggcaacgcggattttttcttctttggtcatggcggcaccgggcgactgttcgccgtcgcgcagtgtggtgtcgaaaatgatgacacggttgtcgtaatggggcatggtggttttctccaagtcggtttgccggtgcataaaggcgttcagatccagcggcctgccctgcgcttcggccagggcgataagcctgttgagctgcgcaagcggcagcgaaccgcgcgtacgccatttgtagatggcggcagtgctggcggcattttgcggatcttgctgctttaaggcttcggccagcgtattcacgccgccgaaataggcaattaagcggtctatgttcagttgcatttttttgtccaatcgtcattggccgtttctttaaagaagccgcgattatactgaaattagacattctgacaataagaaagccaaaattttctttcacacaatccaatcggattagtttttaggactttttgtccaatttcacctgtttgcccaaacaggcaaaccggcctgccgggccgtctgaaaagcgggacagctgcggcggggcgcacaggcggtacggcggcatctgcgttttccgccagccgcaggatttttgcaaggatttgaatctgttaaaataccgccctttctttatgccgacaggttccgctatgaacgccgtttcctccgccgagatcgaccgcctgctgccgcagacgcaatgccgcgaatgcggctatgacggctgcctgccctatgccgaagccttggcggcgggcggagcggcggtcaatctgtgcgcacccggcggcgaagccgtgatgctcgacattgccgggctgctcggcaagccgccgctcgcgcccgtcaaaatccagcttccggcactggcgtggatagacgaatcggcctgtatcggctgcaccgcctgcatccgcgcctgccccgtggatgccattatgggcgcgtccaaactcatgcacaccgtgatcgccgaagaatgcaccggctgcggcttgtgcgttgcgccgtgtccggtggactgcatctatatgaggccgtctgaaaaccgtttcctgccgcaggcgcgcactttgtccgaagccggtttgccgccgcgcttcgccgccgccgcccatgcccgcgcccgctatcggaagcgcgaggcacgccgggcgcgggaagaacaggaaaaaaaggccgaacgcgccgccaaagaagccgccgtccgccgcacccgtgcggagggcgcggacaagccgcctgccgcccaatccgctttcgatcccgcaagcctgattgcgcaggctatggcacgtgccaacgcacagcaggcgcagcgcagcacaccggccaaccgcgacagcttcaacagccgccaaatcgaagccgaccgccgcaaagccgcattgcgccgctaccgccgcgacgcacaatacggcagcccgcaggaaaaagccgccgcgatagagtggctgcggcggcatcaggacgagggcgcgtagcgtgtgggcagggtttttctgcgaaacttatcgggtgaatttcacccattaacacaaggagcatttatgcgctttaccgacaaaaccatcctcatcaccggcgccagcagcggcatcggccttgcaggggcaaaacgcctgattgccgaaggcgcgcgcctcatcatcaccggccgcacgcccagccgcctacacgccgccgccgcactcttgggcgagcgagccatcgtcatccacgacgacgtaaccgacggcaaaacgctggagcggctcttgcccgtggtggaaaaagcgggcggactggacggcctgtggctcaacgccggctacgttaccggtgcaccgctggaagtatgcgaccaagcgatgattgaaaacatatttcaagtcaatgtcttcgccccgatgctgcaaatgggcgcactctcaccgcatctgcgtgaaggcgcggcggtgctggtaacttcgtcaactgcggtttatgaaggaatgccgcaagtctcgctctatgcggcgaccaaagcggcgctgttgtcggcggcacgctgctggacggcggaacttgcgccacgcaaaatccgcgtcaataccctcgtccccggcccgataaccagcaacctgcgctccatcattcccgaagaagtccgcgaccaatttgaagaaaatctggcgcaaagcgtgctgttcaaacgggtgggcgatgccgaagaagcggcagcggtggcgttattcctgctttctgatgaagccagctacgttaccggcagctcctacaccgtcgatggcggactgctgctgcaataagcccccgcatattgttatcggccgtctgccaaaacgtacagcccgaccaagcccccgccagccgcaaagaccgggcagacaacaccgttgtgccaaacgcaaccttccgctacggcacaaacggcagcccgttggcctgatgggcgggcaaagcggaacggattttgattttgtcaaaaagcacaaaaggccgtctgaaagtttcagacggcctttcgttatcgcaaacatgaaataagcaaggagcttgggaggcaaattctatggcttaatttgtcggcattttctcgatacaaatgttcaaatcaatcaaattgtcggatagcaaagcgtcgggcatggatgcctgagccgcaaactatgacgatgaaaggccgtctgaaaacagcttccaacgtggttggagttgtatttcagacggcctttgtgttttcaggcagcttttggggactagcccactttatcccccggttgtgcgcctgcatccacatcaagcagcttcagtttgccctctgcggtggcggcggagagtatcatgccttcggacacgccgaatttggccattttgcgcggggcgaagttggccacggcgatgaccatgcggccgttgagttcggcgggattggggtagctggcggcgatgccggagaaaatcacgcgctgctcgaagccgaaatcgaggtcgaatttgagcagcttggtgctgccttcgacggcttcgcaattcaatactttggccacgcgcatgtcgattttcataaagtcgtcaaacgatgcctgttcggcgactttttcgtattggctttcggtttcggcggcttgggcgggcacggcggctgcctgaatgctttgtttgttggcttcgattaagttgtccacttgtgtttgctccactcgttgcatgaggtgttcgtatttgttgacggcgtggcctgcgggcagggtttgcgcggccatgttccacgaaagtgcgggaatgtttaagaacgcggcggccttcccggcaacgcgcggcaatacgggggcgagataaacgctcaatacggcaaaggcgttaatcagctcgctgcatacttggtgcagacgctcttcctgcccttcttgtttggccagctcccacggtttgttggcatcggtgtattcgttcacggcatcggccagcgccatgatgtcgcgcagggctttggcgtattcgcggttttcgtagtcggcggcaatgttgtcgcgctcggcggcaagtttggccagcagcgggctgcctgaaacgtctttcagacggccttcgaagcgtttggcgatgaaacctgatgcgcgggcggcgatgttgacgtatttgcccaccaaatcgctgttgacgcgggcgatgaagtcttgcaggttgaggtcgatgtcttcgatgcggctgttgagtttggcggcgatgtagtagcgcatccactcgggattaaggccttgttccagataggatttggcggtgataaacgtgccgcgcgatttggacattttctggccgtccacggtgaggaagccgtgggcgaacacgccggtgggggcgcggtggccgctgaatttgagcatggccggccaaaacagggcgtggaaatagaggatgtctttgccgatgaagtggtacatctcggtttggctgccggcttggaaatattcgttgtaatccaggccggtgcggccgcacaggtttttgaacgaggccatgtagccgacgggcgcgtccagccacacataaaaatatttgccgggcgcgccggggatttcaaagccgaaatagggcgcgtcgcgcgagatgtcccagtcggagagcgtggtttcgccgttgtcgccgctaccgagccattcgttcattttgttcagcgcttcggcttgcagatgcggctgtatgcggccgtctgaaagctgtgtgctgccggccgtccattctttcaggtagccggcgcattcgccgagcttgaagaagaaatgttcggattctttcaatacgggggttgcgcccgatacggcggaatagggtttgatgagttcggtggggctgtatgtcgtgccgcagctttcgcagttgtcgccgtattggtcttgggcgtggcatttggggcattcgcctttgacgaagcggtcgggcaggaacatgtttttttcggggtcgaaaagctgtttgatgacgcggctttcgattttgccgctggctttgagggcgagatagatttgttcggaaagctctttgttttcaggcgaatgggtgctgtagtaattgtcgtagccgatatggaagccggtgaagtcggccaaatgctcttcgcgcactttggcaatcatgtcttcgggggcgatgccctgtttttgcgcggccagcatcacgggcgtgccgtgggtgtcgtcggcgcagcagtagtggcagtcgtggccgcgcagcttttggaagcgtacccagatgtcggtttggatgtgttcgaccatgtggccgaggtggatgctgccgttggcatagggcagcgcggaggttacgaggattttgcgtttggtcatggaatacgttctcaaaacagctgccgcagcgggcagcaaaaggcagaattatgccataaagcgggaggccgtctgaaaacggtttcaggcggtttggaaaaggtaaaaccgtcttttcaaaatacccgtggtttctgaaaagacgatgcccctgtctgacttgcgtcgggcaggggctcatacataatgtattttacgtcgcggcacatcttttcagatggccttattgtagcaacggctctcatctcgtagtgcaacaatgttccaaattctagccaaagttgttcgtgcctgcaagtgtttattttttagtacaacaccgttaatatatgcaaaattatttatttttaatggataatgcaaggttttttgtgatgaataagacatacagatacattttaggtctcgatttgggaattgccagcgtcggttgggcactagtgctggtggacgaagaagaaaaccccgtcgggctgctggattgcggggtgcgggttttcgaacgggcggaagagccgaaaacgggtgaatctttgtcggcggggcggcgtgtggcgcggagcatacgccgtttaatccgccgtcgggcgcaccgtctgctgcgtctgcgccgcacgctgaaacagtcggggattttgacggcggcggatttcggttcagacggcctgcctttggatttgccgattgatgcgtggcagttgcgcgtgcaaggtttggacagaaagctgggcaacaaagaatgggcggcggtgctgctgcatttggtcaagcatcgcggttatctgtcgcaacgtaaaagcgagatgaaaaccgacgataaagagctgggccggctgctggcgggtgtggcggaaaacagcaagctgctggcggaagcgtccgacgaataccgcacggcggcggagttggcgctgaaacgttttgcccaagccaacggccatatgcgcaacaagggcggcgattattcacacacgttcaaccgccaagatttgcaggtggagctgcatctgctgtttgcgcgccaacgcgaattgggcaacccgtttgccacggtggatttggaacgacaggccgataatttgctgatgacccagcgcagcgcgttgcagggcgaggcagtattgaagatgctgggcaaatgcacgtttgaaccgtctgaatacaaggcggcgaaaaacacttattcggctgagcgttttgtgtggctgaccaaactgaacaatctgcggattctgcacaacggcgaagaacgcgctttggacgagggcgagcgcaaaatgctgttggacgagccgtataaaaaagccaaactgacttacgcgcaagtgcgaaaactgttggggctgcctgaaagcgcggtattcaaaggcttgcgctacggtaaggattcagacggcctcaaagccgaaagcagtactacgctgatggaaatgagggcgtggcacgctgtccgtaaagccttggaaaaagcgggtttgaaaacggaatggcaaagtttggcaggaaagccggaacttttggatgcggttgggacggcattttcgttatataaaacagacgaagatattctgaattatttaacaggaaaagtagcttctaaaaccgtattggccatccgtaatttttggggcggaggggttctagacgaatgtgatagtggtattgagtatttggcagatgaggatatgactcaatatctagcttctggcgtattacctgtcaatgtgttacaggcattgttggaagggctgaattttgatgagtttatccatttgtcgttaaagactctttccaaaatcctgccgctgatggagcagggtatgcgttacgatgaagcctgccgggtcgtatatggcaaccattacggtttgaaaaagaaagaagaaagccgcctgctgccgcacattcaggccgatgatatccgcaatcccgtggtgttccgcacgctcacgcaggcgcgcaaagtgattaacgccatcatccgccgctacggttcgccacagcgcgtacacatcgaaaccgcgcgagagttgggcaaatcgtttaaagaccgtaaggaaatcgaaaaacgccaagaagaaaaccgcaaagaccgcgaacgcgccgccgcgcatttcaaagaactgtttccgtattttgtcggcgaaccgaaaggcggcgatattctgaaactgcgcctgtacgaacagcagcagggcaaatgcctgtattcgggcggcgaaatcgatttgcgccgcctgaacgaaaaaggctatgtggaagtggatcacgcgctgccgttttcgcgcacttgggacgacagtttcaacaacaaagttttggtgctgggcagcgaaaaccagaaaaagcgcaaccaaacgccgtacgaatatttggacggtgcgaacaacagcccgcgctggcgtgagtttcaggcgcgggtggccggctgccgtttcccgtatgccaaaaaacagcgcattcagacggccaaattggacgagcagggctttattgagcgcaatttgaacgatacgcgctatattgcccgttttttgtgcaattttatcggcgacaacctgcatctggaaggcgcgggcaaacgccgcgtgtttgcgtccaacggccaaatcacttcgctgctgcgcggtttgtggggcttgcgcaaagtgcgcgaagaaaacgaccgccaccatgcgcttgatgcggtggtggtggcgtgttccaccgtgtctatgcagcagaaaattaccaaagccatgcagcggcgcgaaacgtttgaaaccgtggataccgaaacgggcgaaatcaaatcgcgcattccgcaaccgtgggattttttccgccgagaagtgatgatacgggtgttttcagacgaccctgtgcgcgagttggcggaaaaactggacagccgcccagaagccgttcacgagcatgttgtgccgctgtttgtatcgcggatgccgatgcggaaaatgtcggggcaggggcatttggaaaccgtgcgttcgcccaaacgcttagacgagaaaatcagcacggtgaagaaacctttgtccatgctgaaaagcaaagatgtcgagaaaatcgtcggctatcccgaccgcgaacccgcgctgtatgcggccttgctggaacgtttagctgcacacaaagacgaccccgccaaagcgtttgccgaaccgttttacaagcccgcaaaagacggcgggcaaggcagtttggtcagatcggtgcgcgtggaagacgtgcagaaaagcggcgtgatgatccgcaaagaccgcagcggacgggcgcagggtattgccgataacgcaacgatggtgcgggtggacgtgtacggcaaaggcggtaagaactatctggtgccggtgtatgcgtggcaggtggcggaagggattttgccgaatcgggcagtggcgtcaggtaaggatgaatctgattgggatgtaatggatgcaagttatgagtttagattttcattgtgtcctaatgatttagtcgaaatcatcagtaaaaaggggcgtatatttggctatttttcaggactagatagagcaacgagcaacattcatatcaaagaacatgatatggacaaaaccaaaggcaaagatggtttacatcgtagccttggtgtaaaaaccgttcagtccttccaaaaataccaaatcgaccccttgggcaaggaaatccgcttgtgcaaagccgaaccacgcccgagcctgcgggtcaaaaaatccaaaaagcagtaaagcacacggctgcgcctttaagggcgtagccgttttttctgtccgagcgattttcaggctgcctgaaaacggcatcagcaaaccataaaggccgtctgaaaaaataaaaacaataaggagaaaacgtatgacttggcgcagcatcgttatcagcagacccgcccgcttgtcgctgcaacagcggcacttgctgatccggcaggacgaggagattcccgtgccgctggaagatattgccgtgattgtggtcgagtcgcgcgaggtggtgctgaccgcgccgctgctgtctgctttggcggaacacggcatcagcctgctgacctgcgacgagcagtttctgccttgcggccaatggctgccgtttgcgcaataccaccgctgcctgaaaatcctgaaattgcagatggagatgacgcagccgcagaaaaaacagttttggcagcagattgtgaagcaaaaaatccgcaatcaggcttgggtgtcggattacagcggccacgatctcgcggcaggccgtctgaatgctttggcagacagcgtcaaatcgggcgacaaaggctatgccgaaagccaagccgccgcgctgtatttcagggtgttgttcggcgacgagttcacccgcaacgccgaaaacggtatcaatgcctgcctgaattacggttacagcatcgtccgctccgccgtggcgcgggcgctggtgcaatacggctttctgcccgctctagggctgcaccaccgcagcgagctgaatgcctttaatctggccgacgactttatcgagccgtatcggcaaattgttgatttgtggacttatgaacagatgctttcaggtagcctgcccgacacgctgacgcctaccgccaagcagcaactggtatcgttgctttaccatcaaatcggcctgaacgggcgcaggtttaccctgcttgcggtaatcgaccgcaccatccagtcttttcagacagccttaaccggcgacggggcgaaaaccttaaagctgcctgaaatgctgcctttacaggtgcaggattatgagtgaggccaaatttatgcgtttgatcgtgtttttcgacctgcccgtaaccacagccgagaagcgcaaagccgccaaccgcttccgccagtttctgcaaaaagacggctatcagatgctgcaattgtcggtgtattcacgcatcgtacgcggccgcgatgcgttgcaaaaacaccacaaccgcttgcaggccaacctgcccgaagagggacaggtgcgctatttggaggttaccgagaagcagtatgcgggcatgaccatgctaatcggcacaccgaaaacgcgtgaaaaaaaggtcaatgccgaccaacttttgctgttttgaagcagaattttcccgcaaaataaaacgcgaaacccttaatacatcagggtttcgcgtttggatattgtagcactacgagatgagagaggaagctacaaccaggcgtgcgctgcggctgtcaatagcgcgattgtagcactacgagatgagagaggaagctacaactcactgcacagacgcggaaaaacagacagcattgtagcactacgagatgagagaggaagctacaacctaaaaacgcaaatttgcggcctttgcggcattgtagcactacgagatgagagaggaagctacaaccaggttgcagcggttgcgcccgccctgtctattgtagcactacgagatgagagaggaagctacaacacggaaaacggggcaatgagatgggcaaaaattgtagcactacgagatgagagaggaagctacaacgcaacagccgtaaaggccgcaaatttgcgtattgtagcactacgagatgagagaggaagctacaacaattcggctgcacctacaaggcggtgtcgcattgtagcactacgagatgagagaggaagctacaacgccctatgtggaaggattggctacacaccgattgtagcactacgagatgagagaggaagctacaacgcaggcaggatacgcctatccgcgtatcctattgtagcactacgagatgagagaggaagctacaacgtcgcttgtggttatgagacataggcgactattgtagcactacgagatgagagaggaagctacaacaaaccttaaagccttaaacctgcaacacttattgtagcactacgagatgagagaggaagctacaaccttgcatcagggctatctgaatggagacccattgtagcactacgagatgagagaggaagctacaaccagcccaaagccgacacaaacaaaggcgggattgtagcactacgagatgagagaggaagctacaaccgacagccacaccgcccgcatccgccaaaaattgtagcactacgagatgagagaggaagctacaacgcctgtaaagccgcctatttgcgctttataattgtagcactacgagatgagagaggaagctacaacctgaaaaggtcaagccagccagttaaggggattgtagcactacgagatgagagaggaagctacaactatgcgaaacagcaaacgctagcggtttcgattgtagcactacgagatgagagaggaagctacaacgaaactataacactcgtgtgttaattctttattgtagcactacgagatgagagaggaagctacaacgtgatgatgcggccggccaattcgtcaaacattgtagcactacgagatgagagaggaagctacaacttactatgccgtcttacaacctgctttatagtctttctcaaaaatgagaacataacaggatgagaaaagcataccctggcgatatcagccgcggacagtttaaacacatccgtcccatcttggaaagtacccgcaaaaagactgtaccatgtagaaattaacagcattatctacacttttcggattttggatgcaggaaaaatcagtagctttcacagattgtcaagaacgccaaaggcacggcaaagctgcatagctcttgataatctgtgaaagcactacattatcatacaaccaaaaaacgaaagcagggcagcctgaaaaagtgcaaacaacgcaacgatttctacataacgggttttggcattgattttctgcgatttggcaatttttacgcgccggcagcggtaatcacgccgccgcccagacagattgctccgtcgtataaaaccgccgactggccgggggttaccgcccattgcggagcgtcgaaaacgagttcggcggtgttgttgtccgaatagcgcagttcgcaaggtgcgtcggccgtgcggtagcgggttttgcaggtgtagcggccgggctgcgggcgttcgggcagggtgaaactcaaatcgtccattgtgaggctgcgggtgtggagcagtgggtggtcgtgtccctgtacgacgatgagttcgttgcgcggcaggtctttgccggcgacaaaccacggttcgcccgcaccgcctatgcccagtcctttgcgctggccgatggtatagaaggtcaatccgaggtgttcgccgacggttttgccttcgggcgttaccatgcggccgttatgggcgggcaggtatttttgcagaaattcgcggaacggccgctcgccgatgaagcagatgccggtgctgtcttttttggcggcggtgggcaggtgcagggcggcggccaggcggcggacttcggttttttcaaggccgcccagcgggaaaacggcgcgttcgagctggtgttgccgcaggcggtagaggaaatagctttggtctttgctgccgtctgtgcctttcagcaggtaatgcaggccgccgcgtatttctttgcgggcgtagtggccggtggcaatcaggtctgcgccttgtccgatggcgtgatcgaggaagcatttgaatttgatttcggcgttgcacaatacgtcgggattgggagtgcggcctgcggcgtattcctgcaaaaagtaggcgaacactttgtctttgtattgggcggcgaagttgacgatgtcgatgtcgataccgaggatgtcggccacggcgatggcatcgaaggagtcttgtttgatgctgcagtattcgtcgttgtcgtcgtcttcccagttttgcatgaatatgccgcgcacttggtgtccctgttgtttgaggagggcggcggttacggaggagtctacgccgccggagaggccgacgacgatgttgtgtgttcgggtggtggtcatggagggttttgccgtgcggcggtgggggatggcgggaaaacggcggattgtacgtttttcagacggcctttgcatagcgtgaggccgtctgaaaacgtggtggttttcagacggcctttcgcgcttatctgcctaatgaagctgcagcttctgatcgcggtttacccccaaaacaccgcgcaccttggaaaaataagcctccgccgcagccatatccttgccctgcggcacggcaagggcaaagccgttcattgttttgtattcgtacaccactttcgcgccatacgcctgcgcggcctgcaacagcggcgcactgccggtttgcgcgtcataaaaaacaatcagattgcgcgacgcggccggatgctctgctgcatgggtgggaacaggctgcgggttgcccgcgcaggcagcggcagccaggcagaacgacaatgcggcggcagggaaaacggcggtattcataaagtatgcttcctgaaaaaagcggcattctaacccattgcagccaagccatgccgccgcaggcctgcgttttttcagacggcctcctgcgcaggcaggacatattcatgcagaacacccgcaccccgtccgccgcaacgcagccccgcctttcacagccctttcccctgtttctcggcggaggccgtctgaaacatccttttcagacggcctccgccgcctgtggcaaaccttccgcctgtgatagaatccgcacgtttgtaaacaatgtttgtcaggccgtctgaaaaaaggataaagccatgtgccagcttctcggcatgaactgcaacacccccaccgacatcgttttctcgtttgaaggcttccgcaaacgcggcggcctcaccgaccaccacgtagacggcttcggcatcggctttttcgaacaaaaaggcatccgcctgttccacgacgacaagcccagcgcaaattcccccgttgccgacctggtcagagcctaccaaatcaaatcggaaaacgtcatcgcccacatccgtaaagccaccagcggccgcacttcccttgccaacacccatcctttcgtgcgcgaaatgtggggcagctactggatgttcgcccacaacggccacctgcaaaacttcacccccgcacgcggacgctactaccgccccgtcggcaacaccgattccgaacgcgccttctgccacatacttgaagagctgagaaaccgatccgacgaacgcccctgcgacgacaccctgttccgcaccctgtcccgcctcgtgcgcgaaatccgcagccacggccttttcaacttcatcctgtcggacggacaggtcatgttcgcccatgccagcaccctgttgcactacatcgtccgccaggcacctttcggcgaagcccgcctgctcgacgacgacatcgccgtcgatttctccgccgttaccacgccaaacgaccgcgtggccgtcatcgccaccctccccctcaccgaaaacgaaacctggcagcagtttgcctgcgacgaactcgtcatgttccgcgacggcgcaatcgtccggcgcgaatgccccgatccgccccgctacctctccacagaagaagggcttgcccttgcccgcgccgtcggcgcatccgcatgagaaccacgccatgaaatgccctttctgccagcacaccgaaacgcaggttaccgactcccgcctcaccgaagacggcaactgcgtccgccgccgccgccgctgccacgcctgcgacaaacgcttcatcaccgtcgaaaccctggacgtacgcctgcccgacatcgtcaaaagcaacggcagccgcgttccctacaacgcccacaagctgcgcaccagcctcgaacgcgccctgcacaaacgccccttcgacagcgaagacgtagacgacttggttgccgttatcgaaggccgcctctaccgcctcggcctcaaagaagtgtcctcgcagctagtcggcgaaatggccatggaagccctgctcgccaccgaccaggtcgcctatgtccgcttcgcctccgtctataaaagttttaacgacgtatccgaatttacccaggccatcgccaccctgtccgcagcgcacaccgcacatacggcggcacctgccggagcggaacagcctacctgacacccgccccttttcagacggcctgtccgctgccgcaagccggacaggccgtctgaaaaaagacacttgccttccaaaccgcccggcagtataaacaccggcggcagcattccccctccaaccccgtttccagaaaggaaaaatatgttcttcgacaaaatccaaaccgcccccgccgatcccatcctcggcttgggcgaagccttcaaagccgaaacccgccccgaaaaagtcaatctcggcatcggcgtatacaaagacgcagagggcaacacccccgtactcaaagccgtcaaagccgccgaaacccgcctgttggccgaagaaaaaaccaaaaactacctcggcatcgacggcgtagccgcctacaacgcagaaacgcagaaactcctctttggtgcagacagcgaaatcattgcctcccgccgtgccaaaaccgcccaaaccctcggcggcaccggtgcgctgcgcatcgccgccgaatttgtcaaacgccaaaccgaagccgcctccgtctggatttccacccccacctggccgaaccataacgccatcttcgaaaccgtcggcgtaaacatccgcaactaccgctattacgacaaagccgcccacgccctcgactgggacggtctgaccgccgacctcgcccaagcggaaaaaggcgacgtggtactgtttcacggctgctgccacaaccccaccggcatcgaccccacgcccgaacaatgggacgcgctggcaaaaatgtccgccgaaaaaggctggctgcccctcttcgacttcgcctaccaggggcttgccaacggcatcgaagaagacgcatacggcctgcgcgcatttgccaaacacaataaagagctgcttgtcgccagctcctactccaaaaatttcggtatgtacaacgagcgcgtcggcgcatttaccgtagtggccgaaaacgaagaaaccgccaaccgcgcgttcagccaggtcaaagccatcatccgcaccatctattccaaccccgcctcccacggcggccacaccgtagccatggtgctgcaagaccccgcactcaaagcgcaatggataggcgaacttgacgaaatgcgggcgcgcatcaaagaaatgcggcagaaattcgtcgataccctcaaagaaaaaggtgcgaaacaagacttcggcttcatcatcagacaaaacggcatgttctccttctccggcctcacgcccgaacaggtagaccgtctgaaagacgagtttgccgtttacgccgtccgctccggccgcatcaacgttgccggcatgaccaacgccaacatcggctatctgtgcgaaagcattgtcaaagtactgtaacgcgtccgcgcaataaaagaggccgtctgaaaatattttcagacggcctctttggtatttttcctcatcccgctcatccgtgaaacagccacggctggctgtttttccgctccgcttcaaagccgcgtatctcatcggcatgctgcaaagtcaggccgatttcgtccaagccgttcagcaggcagtgcttgcggtgttcggtaatttcaaacgcgaacgactgtcccgaaggcgtggtaacgatctgccgctccaaatcgacggacagcgtgtaaccttcgtttgcttccacttcccgaaacagcccgtccaccgtatcttcgtccaacacaatcggcagcaggccgtttttatagcagttgttgaaaaaaatatcggcgaaactgggcgcaatcaccgcgcggaagccgtaatcgtccaatgcccacggcgcatgttcgcgtgaagaaccgcagccgaaattcttgcgcgtcagcaggatttgcgccccacggtaacgcggtttgttcagcggaaaatccggattcagcggccgtttgctgttgtccatgcccggctcgccgtgatcgagataacgccactcgtcaaaggcattcgggccgaaaccggagcgtttgatcgatttgagaaactgcttgggaataatcgcgtcggtatcgacattggcacgatccagcggagcgacaacggcggtcagtttggtaaatgctttcatggtgttcctgtatgtgcgttgtttgtcggacaataaagcaggcagcccggaacattccaagctgtctgccaaagccgcttattcggtcgcgtcttcgattttctcgccgacgtgcgaaataccgcggccgacggcattgccgccttttttcaccgcatctttggttttatcccaaccgtgttcgatactgtggccggttttttccgcattttcggaagcatcttccttcatgccgtgccaagtgctggaacaggctgccaaagcaaatgtggctagtgtcagggcaagtacttttttcatactggtttccttagaaaatattactgaaacagagacacggctcaatccgtgtcccagcgattatatagccaaacgcctgccgcgcaagccgggcggcacacaggccggacgtgtttacacaaaaatcactgcggcgaatgcaggccgatacggttgccctcgctgtcttccacaaacgcggcaaaaccgttggcgatagcaaatttcccgcgcagcagcctgccgccgcattccaccgccttttgcgccgccgattcgcagtctgcacaactgaaaaacagcgtgcagccgccgcaggcagaggaatccgcaccttcatcgtgccaaatcatgccgctcacgccgtaacgctgccagtccgcaccgaaaagataaaaacggccgcccgccacttcctacaaaggcaggccgaacacattttcataaaacgccttcgcccgcgccatttcctgcgcatggatgccgaaccagccgacgggattgtccgccatggtttttcctttcttaaacggatttaacggtttgccaaacgggaaagattccacaccttttcagacggccttttgccgtgccgaaacattctgccgacggagacaaacaatatgcagatgggaaaacggatgaaatgcggcggcgttaccggagacaggccggcggaaaaaccgcgttacagacgtacttctatgcccgccctgcgcatggcttctttggcttcacggacggagatttcgccaaaatgaaagatgctggccgccaatacggcatcggctctgccttctttgatgccgtcaatcagatgctgcacgctgcctacgccgcccgaagcgataacgggtatgccgaccgcttcgctgacggcgcgggtaagcggcaggttgaagccttgtctggtgccgtccctgtccatgctggtcagcaggatttcgcctgcgccgcgccgctgcatttccaccgcccactctaccgcgtccaaaccggtagcattgcgcccgccgtgggtgaaaatttcccagcgggtgttttcgggattgacggctttggcatcaacggcggtaacaatggcctgcgagccgaaaaaggcggctgcctcgccgaccagatcgggattgcttacggcggcggtgttgatgcttactttatccgcaccggcattgagcaggcggcggatgtcggcaatgctgcgcaccccgccgccgacggtaagggggatgaagacgtgttcggccacttcttcgataacgtgcagaatggtgtcgcggttgtcggaagaggcggtaatatcgagaaaggtaatttcgtccgcgccttcgtcgttgtagcgtttggcgactgcaacgggatcgc

SEQ ID NO: 3153 - DNA, 23345 bp, synthetic construct
  source 1..23345: mol_type = other DNA
  misc_feature 1..23345: note = Synthetic
tgcaggccgcgcagccgatgcattcgtattgcaggccgtcgcggatgtcgatgcccacggggcacacctgcacgcacatggtgcagttgatgcagtcgcccagctcggtgtcttcgcggctcacgtttttcttgcgcgcgccgcgcggctcgccgcgggcagggtcgtaggaaataatcagcgtgtcgcggtcgaacatggcgctttggaagcgggcgtaggggcacatgtatttgcacacctgctctcgcatgatgtgggcaaacagccaggtgaaggtgccgtagagcgcggccgcaatcagcgcggcgccggatacagccgaccagttgagcgtgaaaatgtgcgccaccagcgcgcggatggggctgaaccagccggcaaaggtgatgcctgtccaggcgcaaacggcgaaaatcagcaggtatttggtgagcttgatgcggattttggtgaagttccacggcgatttggccagcttgaggcgcttgttgcggtcgccttccaccaggcggtcgatccacagcatgatttcggtgtataccgtttgcgggcaggcatagccgcaccacaggcgcccggcaatggtggtccaccaaaacaggccgaaggcggagagcagcaagaggccggtgaggtagattaaatcgttgggcacgagggtgaaggcgaaaatgtggaaacgccgcccgggaatgtcaaaccacacggcttggcggccgtgcaggttgaaccagggaatcacgtaaaacacgaactgggtggcgaggatggccaagatgcgcaggttggcaaagcggcctttggcctgcttgggatggatgcgcttggcaccctgatacaggaaaatcacctgctcttttggggcgggctggggcgctttggctgcgggttccgtcatggtggtgttcctttttggcgccgttatgctgcggcttgttttttggtatggatactgcggtttgcggcgggattatacgctgcggggggatgggtgtcagcagcttggagtctcttggagtagtgtgataaacagcggtaaagggctatctagaaactagaggggatgctgtatgtggaaatcaacagcgttgtttacactttcggcttttgcttgaagacccgattgagctctggcattgtcaagaatgtcgatagacacggaaaaccgatttgttcttgatgatgacggatagctgctcaaaaatcatttaagcaaaaacaaaagcagcctgctgtagaaaaagtgtaaacaacacgacgatttcctacagtaagccgcaccgcagcttgaacggcgatacgccgtttgaggtgttgtaggcttacttttcccaaactgtggtgtaaacaacgcggttattttctacaatccaatcatgctgtttcggtacaattatattactgttcaggctggaactgttggtaacccttttgaaggtttaaagttttggatagatgaaatggatagttgtccacagagccaattggcaaatgatcttattactgattttgtaaattttaaagagaaggaataaaaatggaaaattttaatatcacaaagagtgttcttctcgtagaaacagtacgcgtagattgagttagccgtttaaggtgtaacccgacacaatagaaatgacctagatcatattgttttttaacccgatctacccgttctcgggtttcgatatgaaaggctacctgaaaacgaactgcgcagaaaatcgcacagctaaattttcaggtagccttttctaagtgcagaaagaatgccttaggcaaactccgcccacaccggcgcgtggtcgctggggcgttcgagcgcccgcggggcggtgtccacgccggcggcggcgaggcgcggtagcagggcttggctggcgaggatgtggtcgatgcgcaggccgagcttgcggcggaacatgttcatgcggtaatcccaccaggtgtagagcggttcggcggggtgcaggtggcgcaggctgtcggtgaggccgaggccgagcagggtttgaaaccaggcgcgctcttcggcggagcagaggattttgccctgccatttttcggggtcgtacacatccaaatcggcgggggcgatgttgaaatcgccgagcaacaccagctcgggatagcgcgccaattcttcgcgcaaaaattcggccagcgcggcaaaccattgctgcttataggcaaatttttcgctccccacggcctcgccgttcacgcaatatacgttcaccacgcgcacgccgccgatggtggcggcaatcacgcgccgttgcgggtcgttcggcagggcgggcaggcctgtgtgtacgtcttgggcggcttcgcggctgaggatggcgacgccgttgtaggttttctgcccgctccacacggcgcggtagccggaaagctcgaaggcggcgagggggaattggtcttggtcgagcttgagctcttgcaggcagaggatgtcgggctgttgttgcagcagccagtcgcttacgtgcggcaggcgcactttgagggagttgacgttccaggtggcgattttcatgcttggctttcggaatgaatttttcaggtagcctgtgtgcgggatacgggctacctgaaatgtggtgatggcttcagcttactcggcttcgtcgatccaggcctgctgcacggcttcgaggatgcgttcgccgctgcgctgcgggtcgtcgtcgaattcgggcagctcgaggatgagctggcgcagctgggtgaagcggatggtttgggggtcgatatcggggtggcggtcgaagagttcttcggcgatgcgctgggtgtcggtccatttcatgatgggctacctgaaaatcagtggtgctcgcgggcgtggttgatggtgtatttggggatttccaccacgaggtcttcgccggccactttggcctggcagctgaggcgcgattcggcttccaatccccaggcttggtcgagcaggtcttcttcgatttcgctgggctcttccaggctgtcgaagccttggcgcacgatcacgtggcaggtggtgcaggcgcaggactgctcgcaggcatgctcgatttcgatgccgttttccagcagcaggctgcaaatgctttcaccttcgggggcgttttcgatgactttgccttcggggcacagctcgctgtgcggcaatacggtgattttgggcatggtgtgtggctttcttgctgatattgtgagtggcgtattgtagcggaaaaggctacctgaaaacagttgattggtttttcaggtagccccgatagccgtgccggatggaaacgatatgccgtggcgccggatatggcgaattaacttaaccttcgccacggcgttggctcgccttgctgtacttcttgtactatctgcggctcgccgccttgtatcgaaggtcaatttaatccgcttatataaggcaatcgcccggcgctgcgccaaaggaaaggctacctgaaaaccggttgctgttttttcaggtagccctatcgccgaatggatgcgtatggatgcttacagcttgccgccacccacgccgttggcgatctcgcgcacggcgctcacatacaggcggctgtggttgtattgccaaacggcgtagaaattgttcaggccgatatagtattcatactggccgggcgcggtttccaggcggaacagcacggccttttcgtggtcgggcacgtcttcgagcagcaccacgcccatctgccgcagctcgcccacggttttattcagcgtggttttttcttcaatcagcgccgaaagctcgggcgtgggcgtgagcgccacgggcaccatcatcctgccgccgcgctgccagccgtgggctttcagatagttggccacggaagcggccacatcgggcacgctgccccaaatgttgcgctggccgtcgccgtcgtagtccaccgcccatttgcggtagctggagggcataaattgcggcatgcccatggcgccggcgtagctgccggtgaagccgaaggggtcgcggccttcttctttgaccatcagcaggaattcgtgcagctcctgctggaaaaattcgctgcggcgcgggtagccgaaggcgagggtgggcagggaatcggccaggcggaagctgcccatattgctgccgtagttggtttcgatgcccacaatcgccaccagcacttcggccggcacaccgtattcgcgcgccacttggttgagcacctggcggtattgctggtggaagcggcggccgccgttgattttgccggcgccggcattgccgctgcggaattcataccacgggcgggaagtgccggggcggttcatgatattgataatattgcccttatacaccgactgcgcgaaaaactgctgcaactgcgcctcgcccatcacgccggcggcagcctgctggcggataaagcgctgcacttgggggttttggctgaagccggtttcggagagcggcaggctggcttcgggcgtgattttcgggctgtccacgggttgcacaggctgctcgctgctgcaggcggcgaggataagcaggacgctgagggcgggggcgagtttgcgtttcatggcgtttggaaaaaatcaattgggaaaacagggcgcagtgtagcacaggcgggggcgacgggcgaacgggagggtggggcgccctgcgcgaaatatggcgataaatactggaataatcaacaaaattttattttccggctgacataaaggctacctgaaaaccgtcttcgggattttcaggtagccttttgcgctgctagcggtgtaacggggattcagctgtttttctgcgcggcgagggcggtgggattgggggtgggctcgccgattttgtgcagggtgttgtggtcggtgtgggcgaagggttcgctttggccgggaatccgcagggtggtttcttggcggtaggcccaggtgccgtcgtcgttgatgcgcacttggatggtgtagcgctcggtttggaaggcgtgttcgaggaaggggttggaggagatgccgttggtggtggagccgcgagaggcggtgagggtgaagcttttggcgtcgggagcggcttggcccacggccatggcggtttggccgcgcgggatggaaagggtgaggatgatgttgccggtggcgggctcccacagccagtagccgacttggtcgtggaaggtttccacttcgccgggctggacgatgcgggtgtggtagcgcaggccgtagaagagctgggggccgttggtttggccgtcgatgggctggagctcgtagcgcttgatgtaggcgtcggtttcggggccgtcggctttggggttgacgtcggtgcctttgcggccttcccagatgccggccatgggggcgagcgggccgaggttggcgagggtgtcgggatcgacttcgggctcggtgtagatgtctttggggaagcggggtgcgttcatggcgggctccttgggttggggtttgaatatattcgataatcagaatggctggcgcagctcgtccaggctgatgccaagggcttgggcgtatttggcaaggattttttcaggtagcctttggaaggcggcgggctgcatgtggcggcgtacttgccagcgccatacgccggcggcttgggcgaggctggcttcgtcgtggcggctgcggtacatgtggtaataaaggggggagcgttcgccgcgcgccacggcttgccgagcggcttgggtttgcgcttcgagctcggccacggcttggccggtggcgtaggcttcgtcttgccagccggtgctggtggcagcttggtagcggccgttgcgggtgccgtagatgattttttggtggccgtggtagctggggctgtcgtcttgggggatgtcgttgatgtccatcttggctctttccaagcgggtgtggggcgggatgatattgcggctacctgaaaagcggcggggcttttttcaggtagcctctgctgttaggcatacacggcttcgagcagcataaagcaggtggaaaagcggccgctttcgggaatgtagcacaagattttctggccggcgcggatgtcggggcggcgcatgaattcttccaggatgatgtagattgcggcggagccggtgttgcctttatacggcaggttggtaaaccatttttcttcggcaatcggcagcccggcggcggcaaggcctgctgccagcttgctgcggaaaaagccggaggaatagtgcggcagaaaccaatcgatttcttcggcacgcaagccgtgtttggcgatgaggcggcgcagcggcttttccacggtgtaggccacgatgttgtcgttgagcagcttcacgtcctgcttcaccgccatcaggctgcgttcggcgcaggcggcggcatcggcctctttccagctcagccattcgccgccctgccccacttcgccgccggcatacatgcacaccggcatttcgttggcataagacagcagctcgatccaatggattttgaaattgagctgcccgggcaggggctcgctgcccagctgcaccgcgccggcgccgtcggagagcatccagcgcaaaaagtctttttcaaacgcgatttccggcttggcctcttgtaggcgcaggctgccggtttcggcttggaaacgctcgccgcgcagcaccgcggaagccgcttccgaagccgccgccaccgcctcgcggcattcgccggtgcgcacggcgcgttcggcctgcttcatcgccgccatgccggccacgcacacgcccgccgtgctcaccacttcgcagggcggaatctgcggcagcagcccgtgcaccatcacggcgtggccgggcaggatttggtcggggtaggaagtgccgcaggctaggctgccaatggcttcgggcggcaggccctgctccagcaggccgcggatggccagcgcggaaagctcggtgttgctatgggtggtgcggcgggtgtgcgggtcgatggcgtagtggcggctggtgatggcgttggaacgcaaaatcattttgcgcacgcgcgagggcgtttcgcccgccatgccgagcacggcttccatttcgtcgttgcccaccggcgggttgggcaggaaggcggcgatacgcttgatgtaaacatcggatagtgtggccaattattgttttccttcggtagccgttgtgtattggggtcgtgcttgcaggcaagcataatcgatgccgtttgccggtgtttgaagctgtatgccaagccggcggatatttttcaggtagcctttaggccggcggcaaggccttgccgagaatcacgatatccgccagccgcgtttccaaatcgcacacctgcggcagccggcctccctcggcaaaaccatagcgcccgaacagcgccaagctcgccgcattatgggcaaacaccaccgccagcacattgcggatacccaagcccggcgcctgcgccagcatatgctccaacagccggcggccatgcccggcgccctgctctgcggggcaaacgtagatgctgatttcggcgctgatgtggtaggcacggcgcgggtaataatcgctgaaactgccccaggcgcacactttccccgccgcgttttccaacacatacagcgggcgcgtgccgccgtgcgccgcaaaccacgcttcgcgctccgccacgctcaccggctgaaatcggcggtggattgatgcccggggatgctggcgttataaatggcaacgatggcgggcaaatcggcatgggcggcggggcggatggcgggcatggttcaaatggtaaacacaaggataaggcgcgacaagtatagcaaatcgcgccttaaaattttcaggtagcctttactgcacggcaggcttgcgggcaacacaggtttcattgctgcccggggttttcctgagctttggccgcctcctgctccgccttttcggctttggccgcccagtaagacgccaagagcgaaccggaaatattgtgccacacgctgaaaatcgcgctgggcacggccaccagcggcatggcggcaaaatgccccttggccagcgccgcaccgaggccggagttttgcatgcccacctcaatagccagcgttttctgcgcatcataaggcagcctgaacagcttggcggcaaggaagcccagcgcatagccgatggcgttgtgcagcaccaccacgccgaaaatcagcaggccggtttcaataatctgctggcggctgcccgccaccaccgcgccgataatcagcacaatcgccaacaccgacaccagcggcaacacatccgccgccgcttccgtctgcttgcgaaacagcgtgtgcgccaccacgcccagcacaatcggcaacagcaccattttcatgatatcggtcagcatcttggcaacggaaatatccagccactcgtgcgcaaacaggtaaaacaccgccggcgtgagcagcggcgccagcagcgtggtgatcgaagttaccgccaccgaaagcgccacattgccgcgcgccaggaaagtcatcacattggaagccgtgccgcccgggcaagagcccaccagcaccacgccgatggccacttccttgggcaggttcaacgccagcgacagcaaataagccgtggtcggcataatcacaaactgcgccaccacaccgatgagcaccgccttcggatgctggcccaaaatcttaaaatcggcaggcgtgagcgtgagccccatgccaaacatcacaatgcccagcagccaagggatatacggcgccaccagctggataaacacatccggcaccacaaagccggccatggcaaacagcgccgcccacagtgcaaaagttttgccgacgaggcggctgaatctctgtaaaacgttcatggtggaattttgcaatttttaacggaaagggcgcaaggatacaagaaagcgccggcaaacgaaagggggaaaagccgcatcatgccggctttacatttcgggcgcacggcagaccgcgtgttcaccgcgttagggataccgtttttcaggtagcctctcaccccttgcccaagaggctacctgaaaacggagcttccgaaggaagcgaagtttctgcgaagctaaaacgatgtttgggcgtagcccaagctgagtttctgcgaagctaaagcgatgtcttggagcagacaaggcacagcttcttcccggcccgaaactgccgcccaatcgaatcccaacccatttcgcattacaataccccctccgcagcacgccgcaccccacccgacaccatgttcccccgcatcctttccgccagcgccgcccgccgcctgcaagcccacctgcgccgcggcggcctcgtcgcctaccccaccgaatccagctacggcctcggctgcctgcccaccagcccgcacgccctgcgccgcctgatgcagctcaaacaacgcccacagcacaaaggcctcatcgtaatcggcagcagcctgccccaactgctgcccctgctcggcaggctacctgaaaaccaaaaacagctcgctgaaaacacctggcccgcccccgttaccctgctcttccgcgccgccccccgcattcccgccatcctgcgcggccgacaccgcagcaaactcgccgtacgcatccccgcccacgacggcgcccgccgcctgtgcgccgccctcggcacccccctcgtttccacctcctgcaacaaaagcggccgccgagccctgtgccaacagcgcgaagtgcagcgctgctttggccgcaaagtatgggtgctgcccggccgctgcggcggcgccaaacagcccagccgcatcatcgacgccgaaaccggcaaacggctgcgctgaacgtgcggcaggcaaaaaggctacctgaaaatatttagctcggctgaaccacaacttcaacatagacgatgcccctgtttggatagaccaaacaggggctcatacatttctgtactttacgtcgcggcatacctttataggcagccttattgtagcaacggctcttatctcgtagtgttacaaaacattgcatacaactgtggagaagtatatcggcatggataatgcttgtcaatatttcagatgaagcgttaaattacatccatgaaatgtttgctaacttaaatttcatacttagaaaggattcttcgatgaaagcgcaacgctatattttgggcttagatctaggcattgcctccattggctggggcttggtttgggtagatgaagacgagcttcctatcggactactggattgcggcgtacgtacctttgaacgcgcagaagtgccaaaaactggcgattctctagctgccgcgcgccggcaggcgcgcagtatgcgtcgattaatccgccgtcgagcacacagactattgcggatgcgacgcttactaaaacacgaaggtgtgctaacagcagctgattttgatgaaaacggtttgccaatcggattgcctattgatgcttggatattgcgtgtagcggcactagatagaaaactctctgctcaggaatgggcggcggtattactgcacatagtcaaacaccgtggctatctgtcacaacgcaagagtgaagttaaaacgaaagaccaggaattaggtcgtttgttggcaggtgtaaacgaaaatcatcaattgctgcaagataaattcactcaataccgtacgccggcagaattggctataaaaaaatttgctgtagaaagcgggcatatacgcaataaaggcggtgattattcccataccttcaatcgcaaagatgtggaatgtgaactgcacatactgtttgagcggcagcgtgctttaggcaacctatttgcgtcgaccggattggaggaaaaaacggcaagcttgctcatgacgcaacgtgccgccttacaaggcgaagccgtgctaaaaatgctcggacattgcacgtttgagaagaacgaattcaaagctgcaaaaaacacttacagtgccgagcgcttcgtgtggctgagcaaattgaacaatcttcgtatctgccacagcggtgaagaacggccactggatgcagccgaaagagccctattgctggacgaaccgtataaaaaaaacaaattgacctacaagcaagtccgtactttgctcaatttacccgaggcaactgtattcaaaggtttacgctatgggaaaagcgaagacggccttgccgtagaaggtaaaacggctttcatggaaatgaaagcctatcatgcggtacgaaaggttttaaaagacgccggattagaaaccgaatggaacaaccgcatccgtaatccgcatgttttggatgccatcggtacagcattctcactatacaaaactgatactgatataacacataatctagaaccatataggctacctgaaaatgtattaaatgccttactaagtggtataagttttgataattttattcaaatatcacttaaagccttaactaaaattttgccaaaaatggaacaggggctccgttatgacgaagcctgtactacagtatacggtaaccatcacggccataacgagcaacacgacaatcggctgttgcctccgattccgaaagatgaaatccgcaatccagtagtacttcgcacccttacacaagtacggaaagtagtgaatgaaattgtacgacgttatggctcaccattgcgtatacatatcgaaaccggacgtgaagtaggcaaatcatttactgaccgcaaagaaattgaaaaacgacaggaagaaaacagaaaagaccgtgagagggctgccgaacgtttcaaagaattattccccaatataataggagaacctaaaggtcgcgatattctcaagctccgcctgtatgaacaacaacatggcaaatgcttatattccggctctaaaatcgacttgagtaggctacctgaaaaaggttatgtggaaattgatcatgcgttacccttctcccgaacttgggatgatagtttcaacaataaagtactggttttaggaagtgaaaatcagcggaaaggcagtcagacgccatacgagtatttgggaggtggacatgacagcgaacgctggcatgagtttgccgcacgggtttccggtagccgtttcccttttggtaaaaaacagcgcatcatgaccaaaaagctggatgaacaaggttttattgagcgtaatttgaacgatacccgatatattgcccgctttttatgtcaattcatcgaaaacaatatgcatctagaaggcagtagtaagaaacaggtatttgcctccaatgggcagattacttccctgctccgtggtcgctggggcttgcataaagcacgcgaagaaaacgatagacatcatgcattggatgcgattgtggtagcttgttccagtcactcgatgcaacaaaaaattacccattatgtgcgccaacaggaaatgaatgtatttaacggagaaataatcgataaagaaacaggagaaattcgtcatatatacttccctgaaccatggcctttcttccgtaaagaaataatgattcgcgtattcagtgaacatccactggaagagctagcagaaaaattaacatctcgccccgaagccgtacatgagtttgtgacacctttattcgtatcccgtgcaccaactcggaaaatgactggccaaggccatttggaaactattaagtcggctaagcgcttagatgaaaagttaagtgttattcgtttaccactgactcaattgaaattgaaggatattgaaaggattgttggctatccaaatcgtgaaccggctttatatgctgcattagcaaacagattaaaatcttttaataacgatccagccaaggcttttaatcctaaggaacatcctttttataaggtaggtaagaatggtcagcacagaacacaagtgaaagctatacgtgtagcaactatacagaaatctggtgtcatggtgcgaaaagataaaaatgatatatatcatggaattgcagataatgctactatgatacgggtagatatttttgaaaaaaatggtaaaaattatgtagttcctatttattcttggcaagtagcaaaagggatattaccaaataaagcagtagttgcttatgctgatgaagatgattggattgatgttgatgaaactttccactttaaattttcactatatcctaatgacttgattaaagtcactacaaaaaaaggagatttcttcggatattataatggattaaacagatctactggagccattaatattaaaactcatgatctaaacatccattatggtaaagatggtatctgggaaagtattggaataaaaaccgcattatccataaaaaaatatcaaatagatcctttaggtaaatccatcaagatctgcagatctgaaaagcgtatcatgcttagaaagaaaaataaaaaatacatataactctgaataaaataagatttctattatgacttggcgcagtatactcatcagcaactcagcacggctttctttacgacaaaatcatttgttgatacaacaaggggaagatattcctataccactagaagatattgccgtgattgtgatcgactcgaaagaagtcatcattactgtaccattactatctgctttggctaaaaatggcattactctattaacttgtgatgaacagtttttaccctgtggacaatggctaccgtttgctcaatattatcgctatttaaaaatattgaaactacaaataaatatgtcgttaccgcagaaaaaacaactgtggcagcaaattataaaacagaaaatccataatcaggcatggctattggattatagtgggaatgatatcgcagctaatcggctaaaaaacttggcaggatgtgtaaaatccggtgataaaggatacgtggaaggacaagctgctgcactttatttttcaatattatttggcagtaactttacacgatctgaaacaaatatagttaatgcctgtttaaattatggatatagtgttatacgttcagctgtagcacgttctttggtgcaatatggatttttacctgcattaggtttacaacatcataacgaattaaatccatttaatttagcagatgattttatcgaaccttatcggcagattgtggatttattgacctatcacctattgctttcaggcagcttaaagagcgatatactgactataccattaaaacaaaagctaatctctttactgtgtcatcaaattttacttggagaacagcgttatacggttttgtcagccattgatcgaacaatccaatcatttcaagctattttaatgtacggagaaaaaatgctcaggctacctgaaatgttggatctgaaggtacacggctatgagtgaggctaaatttatgcggttaattgtctttttcgacctaccggttacatctgcatcaaaacgtagggctgcaaaccagtttcggcatttcttgcaaaaagatggttatcaaatgttgcaattatcagtatatgcaagaattgtacgtggccgtgatgcgttggaaaaacaccacaaacgattacgcgctcaattgcccagcgaaggatctattcggtgtttggaggtaactgaaaagcagtttgcaggaatgtctatactgctcggagaacggaaaactcgtgaaaaaaaggtcaatgcagatcaacttttgctgttttagtgcaaatttttagatgaacataaagcaggaagtcattattaaacaataacttcctgcctgtctattgtaacactacgagataagagaagaagctacaacatatatcgactacgaaggccaatatgaacaattgtaacactacgagataagagaagaagctacaacgaatcgtactacgttcaatttcggcatcatattgtaacactacgagataagagaagaagctacaactaccgaccgccacgccgacaacatcttggaattgtaacactacgagataagagaagaagctacaacttcgagtatgcgcataccgaccctgtgttcattgtaacactacgagataagagaagaagctacaactgccggattcttcaagcagggcatagatggattgtaacactacgagataagagaagaagctacaacctaatgatggcaattaccttcttggctttgattgtaacactacgagataagagaagaagctacaacgttcgaaaagctattgtactttcgatggcaattgtaacactacgagataagagaagaagctacaaccttggtgaactcgatactgggcgtggccgtattgtaacactacgagataagagaagaagctacaacgggttcgatttcccatagtacaacatctgtattgtaacactacgagataagagaagaagctacaactcggtaaattccatactggcggcgtgatagattgtaacactacgagataagagaagaagctacaacgacaaggaataagtcgcattgccttgggtaattgtaacactacgagataagagaagaagctacaacaacgaaatggcaatatcgtacaaatgattcattgtaacactacgagataagagaagaagctacaaccagattgtaaggcttaccttcaacacgtttattgtaacactacgagataagagaagaagctacaacggcacaacagcaatttagccaatatcaagcattgtaacactacgagataagagaagaagctacaaccaacatctaacccgcctcaaagcccaaggcattgtaacactacgagataagagaagaagctacaaccttgtcttcggtttcccatttcttgttgacattgtaacactacgagataagagaagaagctacaacggcagagaaagcggatggctaaagcttgttattgtaacactacgagataagagaagaagctacaaccgaagtcccgctcgtccagcagcaccgtgtattgtaacactacgagataagagaagaagctacaactacgaaaacagccctgaaactgttgttactattgtaacatgtaggaaataaccgcgttgtttacaccacagtttgggaaaagtaagcctgcaacacctcaaacggcgtatcaccgttcaagctgcggtgcggctttaccgtgttataaaaattgacaaagcggcacagctccttctgccggtgttcgggactgtcaaactcctgcttatcgtgccacatctccatcaaggtacggatcacccgtcccgccttaccgttggtctgcggacgggcgacacgggtaaacttttggccaatcctgttctcataacaggcgacaccgaaagcatggttggccgagcctttgtattccgtcccgttgtcggaatagacgcattcgatcaggtatgggcagggttcaatcagctgttcggtcagaaattgggcggcactgtctgcggttttgtccggcaggatggcggcataccgttcccttgaaaagtcatcgatggcgacaaacaggtagtcgcgcctgtcggtggctttctggcctttgagcagcggcagccgtttggtgtcgaggtgtaccatctcgccggggtaggatttattgtagcgtttggcctgttttttgagcttgtcctgaatgctgtgttctaccttggccagccgcttcataccgtatttggcctgtttgaagcggttgttggtgctggtttggggtttgagcagcctgcctctggcagctttgagtgcgcggtagatggttaccctgctgacttggtagcggcgggcgagggaggaaacgttttccttctcttgggtataggccagccagatggcttggcggtggtgcggggtgagccgggtgtttttgtgcatgttcatgtttcagtattctcctggaaatactgtaaacaacgctactggtttctacagctacctgaaaaattcaacccttgtttttcaggtagcctttttgtatcggaagccgagcggctgggtttattcctgcatggtccaagccacgctgccgccggcgcgcatggggacgagctgcccgccgtggccgatggggaagctgccgggcacggtttgcgcttgtttcaccagggtgatggtgtcggtattttcaggtagcccgtagaagcgggcgccgttttgcgaggcgaaggcttcgagtttgtggagcgcgccgatttgatcgaaggcttcggcgtagagctcgatggcggtggcggcactgaagatgccggcgcagccgcaggcgttttctttggcgctttgcgggtggggcgcggagtcggtgccgaggaagaatttgtgcgattgcgcgccggatacggcttcgagcagggcgcggcggtggctttcgcgtttgagcacgggcaggcagtagtggtgggggcgcacgccgcccacgagcaggtcgttgcggttgagcagcaggtgctggggggtaacggtggcggcgaggttgctgccgctgctgcacacgaggcgggcggcttcggcggtggtgatgtgttcgaacacggttttgagaccgggcacttggtcgagcacgggcaggaggatgcggtcgatgaaggcggcttcgcggtcgaagatgtcgatggcggggtcggtgacttcgccgtgcacgaggaagcgcatatcttgggcggcgatttcttcgagcacggggaggagtttgaacaggtcggttacgccgctgtcggagttggtggtggcgccggcggggtagagtttgaaggcggcgatgccggcagctttggcttcccgtaccagggcgggggtggcgtggtcggtgaggtagagggtcatcaggggctggaaggggctgccggggggcagggcggcgaggatgcgctcgcggtaggcgagggcgtcggccacgctggtaacggggggtttgaggttgggcatgatgacggcgcgccccatctgtcgggcggtgtggggcaggacgtggcgaagggtgtcgccgtcgcgcaggtggaggtgcatgtcgtcggggcggatgagggtgagggtttgcatgatgggctttcgtgtgggggtgatgttttagcttggctggggcttacgttttcaggtagcctgcggaggggtaggctacctgaaaattatttgtgttggatcacgaggcggaatacgctgttttcggtgtcggaggagaggagccggtggccggtttggcggcagaaggcggcgaagtcgtcgggggcgccggggtcggtggcgcgcacggacaggatttgcccggcctgcatggtggcaagggcctttttggcgcggaggatgggcagggggcatttgaggccggtgaggtcgagctggaggtctggggtcatggtgtgggttctgttggtttggatgggcggattatagcggaaagtggcaacgcgaactttggtttgaatgtggaaaggctacctgaaaatgggaaaaatggttttcaggtagcctttagcttggcaagattatcggcgggagaaaatccgttgcagccaatcggcttttgctgtttgcaacgtaaaatctgcgccaccgcatttggtgcaacgttccggctggggaatgcctgcgtccgaacgggcaaatgctgcatatttctgcccgcaatttcggcatatccagtaagcggttttgccgctttcccttggcgcaatcggcattttcagtcttctttcacaaaagggtaatacggtttgccccaggcatagtcgggatgttgctgcatgatatgcagtaccagcggcagcaggctggtgaggatgcggcaggcgtcttttagttgattgcggttggccgaactgccgtaggttgcaccgccgtggataatttggttgcgcagggtgtagaggcggtcgaacataatcagcagcacggtatcggtatcttgtgcggctaaggcgcgttgtgctttttcccctgctttttcaaattcttcttgccaagcggtttctgaaattttgccgttatggaaatcccaaaacggctggaaaacatagcggttgcccaagagggagcggatggcgccgggaaaggtttgccatactaaggcataaatcagcttttcttcatccaaacggcagatggtgtttaggaattggcggaaatggcttcggtcgccggatatttcccgttcatcaatttcgcgggcataggcagcattgaaagcaatccataatgcttggaagccggtatcccaatccggcgcgaaagaaagccgcccgccctgctgggccagcatttgctgcatatgcttggggatagccggctgcttggcatgattggccgcatctgtgccgctcaacaattctccagccttacccaaccagcttaacgcacggtggatgcgcaggcggaatgggtcggagtaggtatcgcggtgttggtggtaatgggtttggatggtggataggttgatgctcataggggattcctgttttcaggtagccttttattgcctgctcataattattcacatcaccgccagcgcggccaggcacttttcgcgttggccgttttgcggggggatggtttggccgggcaggatgagggtgtagcgctggccgcggccgtgggcttcgagcacgcggtagcacaggagaccggcgaggcggtcggcgctggtgccggcggggtagtcggcgtagctgatgatgtggtcggcggcgtggaaggcgggctcttcgaaatgcttgtcgagcaggcggccgcttttggcgtagtttttccaggcgatgtgttgtagcgaggtgccgggctggtggtcttgcaggtgggcgaggtcttcgttgccgccgagcttgcggcggggttcgccttcttcggcgggggtgctgccgggcggggcggtgtgcggctggggtgcggggtagaccaggccttcttccggccaatgccacacgcattcgacgctgctgatggcaaacggccacacgctcgcgcagcgcagcggcggcagcatcaggcggccgcgccttgcgggcagcacgggccaggcgaagggctgcggctgtttggcggtgaagagggcggcccggaattcgggttcatcgtcgcggcggctgtcggccgcgaaccacagctggcggtggcgcattttggccgagggggcgggcagcagcaggatgtcggcgggctggccttggaagatttcttcgggcagggtgaggtcgaggcgcaggccgataagttgcaggcagttgagcaggatgcccacgcacaggaagccggccagccagaaggccaccagataggcgaggttcacttgatagttcaagcccaccagccacagcagcaccaccatcacggccaaggtaacgccgaggcgggtggggcgcaggcgcaaatcgcgcaggcgggggctgtattggccggcgctcacgatacggctacctgaagcagcatctgctccaaaagctgggtgatggactgcggttgcagggtttgcaggcggtgtccggccacggccacccacacggctttgatgtcttccggcagcacataatcgcgcccggctagaaatgcccaggctttggcggctttcaccacggctaggccggcgcgcgggctcaggccgtttacaaacaggccgggctggcgcgtggcctgcaccaggcggtacacataatcagcggcttgctgcgaacattgcacctgcatggcttcggcctgccattgcagcaggatttcggcgttgcacacggctttgagcgcgggcagcaggcggcggcggtcgccttgggcataaagctggcgttcggcttcggcggaggggtagcccagcgagaggcgcatcatgaatcggtcgagctgcgattcgggcagcgggaaagtgccgagctgctccaccgggttttgcgtggcgatcacgaagaagggtttgggcaggcggtaggttttgccgtctacggatacctgtttttcttccatggcttcgagcagggcagactgcattttgggcgaggcgcggttgatttcgtcggctagcaggaagtggtggaaaatggggccggggtggaatttgaactggccgtcggcgggctggaacacgttcacgcccaggaggtcggcgggcagcatgtcgttggtgaattgcacgcggcggtagcccaggccgagcaccacggccaggccgtgcgccagcgtggttttgcccacgccgggcacgtcttcgagcagcacgtggccgtcggccaggatgctggccatcagatgctggagcacggtttctttaccgagaatcagggcgttgagttgggtgaagacgttttgcaagtgggggttcatattgtgtttaatcctgatattgtgcgaatggggctacctgaaaaaggctacctgaaaaatagggaataggcgtgaagaagccctgttaaatcaacagggctaattttcaggtagcctaatcttgcaccggctcttcggcagcggcttgttcgatcagctgggaaatgctcatgccgcgctcgagcgactggtcgtatttgaagtgcagctcgggggttttgaagagcttgatgcggcgggaaagctcgctgcgcaggtggcctttggcgtgttccagcgcttcggcggtaatatcgcgggtggcgtcgtcgagcacggtgtaatacacggtggcgtggctgtagtcgcgggtgagctcgacttcgttgatggtgatgaagccggcgcgcgggtctttgaggccggtgcgcacgagctcggccagctcgcgcatgatttgttcgcgtacgcggtcttggcgggcgtagccgcggtgggatttggccatggggttcctctctggcgggttatttgagctcgctggtgcggtcgagcagggcatccatcagggtgtcgtattgttttttacggtgctggatgcgcagttggtcgaattctcccagctgcccttcgaaggtgtgggttttgaaatagggcttcaggtcgaaggccttttccagaaaacggataacgttgagctcgttttcccggtcgacggggcgtaggggaaagcgcccggtgagcacgaagttgtcgggcatcacggcggtgaccacgaggagcggcttggcgttttcgcgccggcggatttcgagcagcaggctgtaggtttcgaaggtataggtttgtttgtcgttcatcttcgcatactcaaatgggtgggcagcggtttggattggggggaaacggtggtgtttgccgattatacggcataggcggcatgatacgacaagcgccgccggcttggtagggggtggctgccgtgagccgttttaatctgccggcatgcggggcggcatggcggatgaatttgccggttttctgtttttattggcattttctgccagaaatatccagcagggaatggccgagtatgtggaaggaggctacctgaaacgggttcgggcagcctccggttcgctggtgtggcgctacagggtgcgggccacttccaccacgtcgaaggcttccagcaggtcgccttcctggatgtcgttgtaatttttcagcatcaggccgcattcgaagcccatgcgcacttctttcacatcgtctttgaagcgtttgagcgattccagctcgccggtgtggataaccacatggtcgcggatgaggcgcacgcggctgtcgcgcttgattacgccgtcggttaccatacaaccggcaatgttgcccactttggagatgttgatcacctggcggatttccacggtgccggtttgctgctctttctgctcgggggcgagcatgccgctcatggctgctttcacatcgtcgatggcatcgtagatgatgttgtagtagcggatttcgatgtcttcgttttcggccagcttgcgggcggagccgtcggcgcgcacgttgaagccgatgatgaaggcgccggaggcgatggcgaggttcacgtcgctttcggtgatgccgcccacgccgctgtgcagcacttccactttcacttcgtcgttggacagctttttgaggctacctgaaagtgcttcgtaggagccttgtacgtcggctttgatgatcacggccaaattctgcgcggcctggccttcgccggcgttggcaaacaggttttccagcttggcggcctgctgtttggccaaacgcacgtcgcggtatttgccttggcggaacagggcgatttcgcgcgcctttttctcgtcggccagcaccatggcgtcttcgccggcattgggcacgtcggagaggccgaggatttccaccggaatggaggggccggcttcctgcacctgcttgccgttttcgtctaccatggcgcggactttgccaaacgccgtgccggccagcagcatatcgccttttttcagcgtgccgctctgcaccagcagggtggccacggcgccgcggcctttgtccaaacgggcttccacaatgatgcctttggctggcgcttccaccggcgctttcagctccagcacttcggcttccagcagcacggcttccagcag

SEQ ID NO: 3154 - DNA, 23270 bp, synthetic construct
  source 1..23270: mol_type = other DNA
  misc_feature 1..23270: note = Synthetic
tcgtaaatttacatttttttacacattagccgttgacaaagtgcgctagaatctttaatattcgcgtcctatttagctacgattcgtagcgatgccgaataattcctccttagttcagtcggtagaacggtggactgttaatccatatgtcgcaggttcgagtcccgcaggaggagccattttctcttttgataaacttttatttgtctcctttgataaaagtttgtggtatcaaaagtgttagcccgatattttatcgggctttattttttccccctttctttttcaatctaattcgttatactgcacccaattttattttataggatttgattatgttatatccctctcttgcaattattggtggtttgttacttttaatttggtcagctgattgttttgttgatggcgcggcggcaacggcacgccattttggtatgccacaacttttgatcggtattgtaattattggttttggtacttctgcgcctgaaatgatcgtgtctgcattctcagcaattaatggtaatccagggatcgcacttggaaatgcttatggatctaatattaccaatatcgcgttgattttagggttaaccgcgctgattctaccgctcgctgtaaattcacaagtattaaaacaagaattgcctgtgttgatttttgtgacagtactttcagcacttctgatcatggatggtgatgtatcacgtttagacgcttggattttacttgcagtattttttatttatatgagttggacgacttggaacggattacgtaataaagatgacagcttggcaatcgacgtcaaagaggaattgcaagagcaagcatatatgtcacttggtaaagcgttattgtgggttgtcattggtttagcattattaatggggagttcgcagttgctagtgtggggcgcggttgaagttgcccactattttggtgtcagtgatttaattattggcttaactattgttgctgtggggacatcattacccgaattggcatcctctattatggctgcgcgtaaaaatgaagtagacctagcagtagggaatatcattgggtcaaatttatttaatacgcttgccgtagtcgggattgcgggagcaatttcgccaatgcacgtagggcaggaagtctttactcgagatatgtcagtgatgtcagcattaactgtcttattatttatttttggtttcggcaaaaaaggggaaattaatcgttttaaaggtgcgattttgttattggcttatattggatataacgcttatttattccaaaccgcaatttaattagtataacgagtaaaagaaaagtgagtgttagactcactttttttgcttaaagttaacgtccaaatagtattgtcccacctgaacttggctgtaatgtagcgcaaaatagcgagattgcaaaggtaatcactaaaataccaaccatgaacttaaataatatttgtccattgctagagagccatttaagcgagctgtaccatgtactcatttgtattgcagtgtgtcgcgcatattgaacgataattgcaaatccagacaacattaggccagtgccaaatgccatcgccatgacagcaataattccccagagatataggtcaagcatataggcaagaaatagcacgaaaattgcaccagtacaaggacgcattcctatacttaaaatgaccagtaattgtgctttccaagattgcgcttgaagttgattattgtcgggtaagtgttgatgtccacaactgcaacctagagaatgctcgtgtgaaatatctttttggttgttcatattaggattgaacggtgtatttgaaaatgtatttgagcatatagagatagtgcgaatatgtggtctgggttttactactgtttttaagcgtttggtttttagcattacttttattgcttgataaatccattgtacgccgagcaacatcattagaatcaatgcactacgttccaaccagagttgacttgctttgaaataactagatgataaatgtaatgtcacgacaataatcgatattgctgcaatcgctacaattccttgcataagcgatgaaaaaaaagttaaacgcatgcttgttttcagtttggattcatgtgttgaaagatagcttgctataacaaatttgccatgcccaggtccaacagcatgaaatacaccatacagaaaactgatgatgattaattttatgcctgattctgtcggtgtttgtttaatttgatgtaactgagcggaaattatttgattaaattcccgctgccatagcacgacttgtttgaataaccaaggaaaaagtaaataaattccggttaataagagaatgagtagcgctatcggtagatatttttttatcgttatcattgacatataatttgaattctttgtgcgaacatttgccctaaagtatcgtcttcatctcgttgagtttgatctaatgacgaagcatattgctgaattttcgcattaacctgtggttctaataattttccgtggcattgacttggaagttggctgaaatctaaaatgcttttatctgtcgcgggatagaacattgccacataataagttttatcataaatcattaatgtaaattcgttattgcttaagtccacaggcttggcaagctgcacatcaaaataatattgtaagcgagcatctactgctttgagcccataatttataggctgttttttgaatttgattttattattttgtctgtcatagagataactaaaataatgttcataaataatatttttaaatagttcttcagttaaattctgtttgccttgttcatcagaacgttttaattcatacaatagttcagaagaactgggttcgtctaacgtccattgagtagaaaagcctactaattgattattttcgacgagtaattttgttttgagatcaataaatgcatggggatgtgccaccgcttgcattgcccacagcgttaaacacaatattgagaaacattttttcatagctttgccctaaatgcgaagagtttgcaattctaacataaaggaaatgaaagatataaataaaagtgcggtcgaaaaaacgtatgtttttctgaccgcactttagcttaggattatcaggtcacggagatgataagctgtagaagatcaaacctaatctgacagtccccgtttagaattaccgtgtctgtcagattaatttgagcttaaattcttttctgcccaaatcccttttccatcaagtaatgttgccatcggagttctgccacagcacatttttccttgatgtgttcgatggtgattataatacattaaccactcatctaaatcagcttgtaatgtcgctaaatccgtatatattttcttcctaaatgcgacttggtaaaattcttgtaagatagtcttatgaaaacgttcacagataccattcgtctgtggatgcttcactttcgttttagtatgctctatgtcatttatcgctaaataaagctcataatcatgattttccaccttgccacaatattcactaccacggtcggtgagaatacgcaacatcggtaatccttgggcttcaaagaacggcaggactttatcattgagcatatctgcagcggcaattgcggttttcattgtgtagagctttgcaaaagcaaccttactataagtatcaacaaatgtttgctgataaatgcgtccaacaccttttaaattacctacataaaaggtatcttgtgaacctaaatagcccggatgagcggtttcaatttctccactcgatatatcatcctctttcttacgttctagggcttgaatttgactttcatttagaataatgcctttctcagctacttctttctctagtgcatttaaacgctgtttaaagttagcaagattatgacgtagccaaatggaacgaacaccaccgcctgaaacaaacacaccttgcttgcgaagttcgttactcactcgaacttgtccgtaagctggaaaatctagagcaaattttacaacagcttgctcaatgtgctcgtctactcgatttttgatattcggtacccgacgagtttgattaagtaatgcttcaacaccgccttgctctacggcttgttgatagcgatagaatgtatctcggctcatccccatcgctttgcaagcttgagaaatgtttccgagttcttctgctaaattgagtaaaccggtcttgtgtttaatgagcggattgttagaataaaacatgagagtttccttttttgtttagattgaattttagacactcatattctaaacgggaaactctcatttttataatgatttgtcagatcaagtctgatcttctacagataagcaaacctactgtgcttatttccctaaattatcgaagaatttttttacgccatcaaagaaacttgatgatttaggacgctgcttttcttgcccttcaaggctttcttccaatttgcgtaataattctttttgttcttcattgagcgaaactggcgtttctacaatgattttacaaattaaatcgccagcatagcccgaacgcattgcagtaattcctttgccacgcatacggaacattttgcctgtttgcgtgccttcaggaattttaagttttacgcgaccatcaagagttggcacatcaatctcaccgcctaacgctgccatcgtaaaactaataggcacttcgcaatataagttgctaccgtcacgttcgaaaatatgatgttcgcgaacatggatgaccacatataaatctcctgctggtgcgccattttcacccgccgcacctttacccgctaaacgtaattgattaccagtatccacgccagctggaattttaacggataaactttcatttttatgaatgcgtccatcaccatggcattttttgcatggtttctcaattttcttaccggttccatgacaggttggacacacttgttctgtgacaaagaaaccttgttgacggcgaacccgaccatgaccatggcaagttggacaagtttcaatttttgaacctttttctgctcccgtaccatcacattcatcgcaatgagcaagcgtcgcaatttggatatctttggtaacaccacgaactgcttcttctaaagtgatttcaatgtcataacgtaaatcttctccgcgaactacacgttgacgactcgaaccgccaccgaacatttcgctgaaaatgtcttcaaagccaccgaaaccaccaaagccgccaccgaaaccaccagcgccactgccaaagccgccttgttcaaatgcagcatgaccatattgatcgtaagcggcttttttctctttgtcgcttaagatttcatatgcttcattgatttctttgaatttttcttcgctttctttgtcacctttggttctatcagggtgatatttcatcgcaaggcgtttataagcgcgtttgatttctttttcgtcagcgcctttctgaatgccaagcgtttcgtaataatctttttttgccataattatttaaatgttatttttgataaaagtggttcaatgattttaggcgctagcgccgcagctgggagtgcaatcaaaaatgcgatagcccacgactgtaaccatgcgtttaaaaagtcagcagaaaacccgtttcgaaaaacagtcattccaaatgacataacacaggacattagtatgacattacatagaatgagaataggccgtcgccatttttgatctaattgcatatctctacctaaatgcactaaaagggcgaaaccgcccttgactgaataatctaggcaggtatttctacctgcctagtggataaatattatttatcttttacttcttcaaattcagcatccactacatcatcaccgcttttgccgctttgctgttgtgctgacgcatcagcttgtgcttgcgcttgaccagcttggataagtttttcagacacttgaattaatgcttgaacttttgcatcaatcgcggctttgtcttcacctttcgcggcttcttcaagttcattgaccgctttttcaatcggtgctttgtcgtcagcagataatttatcaccgacttcgcttaattgtttacgagtagagtgaactaaatgatccgcttggttacgggcttgcactaattcttcaaatttacggtctgcttctgcgtttgcttctgcgtcacgaaccatttgttgaatttcttcatcgcttaagcctgaagatgctttgatcgtaatttgttgttctttacctgtgcctttatcttttgctgacacgtggatgataccgtctgcgtcaatatcaaaggtaacctcaatttgtggcataccgcgtggtgccggattaataccttctagattaaattgccctaaagatttattcgcagacgcttgtttacgttcaccttgaagtacgtgaattgtcaccgcactttggttatcttcagcggttgagaacacttgcgattttttggttggaatcgtggtgtttttctcaatcaaggtggtcatcacaccgcccatcgtttcgatgcctaatgataatggtgtcacgtctaataataatacgtcagttacattaccagataacacaccaccttgtaccgcagcacctacagcaaccgcttcgtcagggttcacgtctttacgtggttctttgccaaagaattcagctactttttgttgaactaatggcatacgcgtttgaccacccaccaagatcacatcatcaatttgacctacacttaagccagcgtcatttaacgctactttcacaggttccattgaacgtgcgactaaatcttcaactaacgcttctaatttcgcgcgagttaatttgatgttcaaatgtttaggacctgttgcgtctgcagtgatgtatggtaagttcacatctgtttgttgtgcagaagaaagttcaattttcgctttttcgcctgcttctttcaaacgttgcattgcaagtgggtcattacgtaaatctacgccttgctcttttttgaattcatcaactaaatagttaatgacgcggttatcaaagtcttcaccacctaagtgtgtatcaccgttagtcgctaatacttcgaaagttttttcaccacctacttcatcaatttcaatgattgataagtcaaaggtaccaccacctaagtcgtaaaccgcaatagtttggttgcctttacctttgtctaaaccgtaagccaacgctgcggcagttggttcgttgataatacgtttaacatcaagaccagcgatacgacccgcatctttagtcgcttgacgttgtgcatcgttaaagtatgccggaacagtaattactgcttcagtaaccggttcgcccaagaaatcttctgcggtttttttcatttttttcaatacttccgcagagatttgtggcggtgctaatttatcaccttttacatctacccaagcatcgccgttgtcagctttcacaatgctgaatggcataatgttcacgtcacgttgtacttcgctgtcttcaaaacgacgaccaattaaacgtttgattgcaaataatgtatttttcgggtttgttaccgcttggcgttttgcaggttgaccaactaatgtctcgttatcgtttgtatacgcgataattgacggagtagtacgatcaccttcagcgttttcaatcacgcgcggtttgtcaccgtccattacagcaacacaagagtttgttgtacctaagtcaataccaataattttacccataatatgttttctcctagttagaaatctgttttatttttgacgacgtttttattatttcgtcttacgtgtttataaaatgtggattgcaatttctttttcaagggcttttttaaaaaatttttgaaatgttccaaaagcctgttgcaacttcatcatgagagaaaaatggggggagcgaaaataaatttcaaggggaaaaagtaaaagtgcggtcaaaaacaagggaatttttgaccgcactttttattatttatagcaaaaagtatttgctacattttttctaccgttttaatacctagtaaatctaagccttgttttaaggttttagccgttaaattagctaatttcaaacggctatttttgatattttcttctgcatttaaaattgggcaagcttcatagaaacttgagaatgcaccagcaagttcatataagtattgacacaaaatatgtggcataccgtcttttgctacgccattcaacgcttcttcaaattgcaataatttaatggcaagcacacgttctttatcgtctgttaactggatatcccccgttaattgttcagcatcaacacctgctcgcgcgaagatcgaacgaatacgcgtataagcatattgcatataaggcgcagtattgccttcaaaggtcaacatattgtcccaatcgaacacgtagtccgtggtgcggtttttactcaagtcagaatatttcacagaaccaattgcgactgcttcgacaaccgctgatttttcgtccgcacttaaatctgtactacgctcagaaattaatttatctgcacgttctacggcttcatctaataaatcttttaatttaactgtaccgccagaacgcgttttaaatggcttgccgtctttgcctaacatcataccgaaaaaaggatgctcaagggaaaaactgtcaggcacatagcccgctttgcgagtaatcaaccacgcttgttgcatatgttgtgattggcggctatcagaaaacaccatagcacgatcggcttttaaggtttcataacggtattttgctgcagcaatatccgtggtggtataaagaaaaccgccatcctttttctgtacgattacgcccattgggtcgccatctttatttttaaattcatccaaaaatacgacgagcgcaccatcatcttcaacagctaacccttttgcttttaagtctgtaacgatttcaggtaacattggattgtataaactttcgcccatcacatctttttctgttaaagtcacattcaagcgattatagttttcttggttgtggtgcatagtaatatccaccaattttttccacatggtgcgacaatattcatcaccactttgcaatttcaccacatagttacgtgctttttctgcaaaggtttcatccgaatcataatgttcttttgctgcacgatagaatgcttccaaatcgcttaattccattgccgttgcattttcattttccattttctccaaataagcaatgagcataccaaattgcgtaccccaatcgcctacatggtttgcgcgaatcaccttattgcctaaaaactcaagagtacgcacaacggcatcgccaataatagttgaacgcaaatgtcctacgtgcatttctttagcgacgtttggtgatgaatagtcgatcacaatggtttgtggttgttctgttttaatgccaaaattgaccgcacttaacgctgtattcgcattcgctgctaaccaattttcatctaagaaaatattaataaatcccggtccagcaatttctaacttctctgcaacgccatttaattctatgttatcaagtactttctgtgcaaattcgcggggatttaaacctaatttttttgccgcgcccataatgccattcgcttgataatcaccaaattgtggtttacttgattgacgtactgccgcttcaacgccttgttgtgcgcctgcagcaatcattgcttgttgaattttatctgataaaagttgttgaatattcacgttttgcccatctataaataaagtagaaaataagccgtatgataccgaactatcttgtatttcccaaaggatttttattgtgttagtaaaaaacgatgccccttgtaacctaagctacaaggggcagagcgttgcgagaaattcatctcttattgtaacaacgtttttcatttcgcagtgccattacaacggtatgaattttaatctgtaatttttttgtcgtcaatcttctttttacggtaaaaattgttaaaatttaatcaatgagttagctataggagattgccatgaaaacttcgtcattaaattatatcttaggtttggatttagggattgcttctgtggggtgggctgtagttgagattgatgaacaggaaaatcctttaggattaattgatgttggcgttcgaacctttgaacgagctgaagtgcctaaaacgggagaaagtttggctttggctcgccgtttagcccgttcttctcgtcgtttagtcaaacgccgtgcggaacggttgaaaaaagcgaaacgtttgttaaaagccgaaaaccttttgttatcgacggacgaaaaattgcctaatgatgtgtggcaattacgtgttaaaggtttggaacaacaactcgaacgtgaagaatgggcggcagtattattacatttattaaaacatcgtggctatttatcacaacgtaaaaatgagagtaaaactgaaaataaagaactaggtgcattactttctggtgtgaatactaaccatcaaattttgaaatctttggcatatcgaacaccagcagaaatcgcaatcaataaattccaagcagaagagggacatatccgtaatcaacgcggatcttatacgcatacgtttagtcgtttagatctacaagctgaaatggcgttattattccaatgccaacgggaatttggcaatacttatacatctgcaaaactacttgaaaacttgaccgcacttttaatgtggcagaaacctgcgttagccggcgaagcgattttaaaaatgttaggtaaatgtacctttgaaccaacggaatataaagccgcaaaaaatacttattccgcggagagttttgtatggctaacaaaattaaataatttgcgtattttagaaaatggtgaagagcgagctttgacggataatgaacgttttatgttacttgaacaaccttatgaaaaaacaaaattaacttatgctcaagtgcggtcaattttggctttaaataatgaagcaattttcaaaggcgttcgttattttggagaagataaaaaatcggttgaaaccaaaacaactttgatggaaatgaaagcctatcatcaaattcgtaaagcattagaaagtgcagatttaaaagctgagtggaatgcacttaaaaatgattcggtattgttagatgaaattggtacggcattttcgctttataaaactgatgaagatattaacagctatttgaatggaaaattatctgtaaaggtattaaatgcgctattagaaaatctgaattttgacaaatttattcaactttcgctcaaagcattgcaacaaattttacccttaatgttacaaggacaatgttatgatgaagctgtttcggcaatttatggtgatcattatggtaaaaaatcagaagaaagtaacgttttcttgccagttattcctgcaaatgagattcgaaatcccgtcgtattacgtacattaacgcaaacccgtaaagtcattaatgccattgtgcgtttatatggctcacctgcacgtattcatattgaaacagggcgtgaagtgggaaaatcttataaagatcgtcgagagttagaaaaacaacaagaagaaaaccgtaagcaacgtgagagagcggttaaaaaatttaaagaaatattcccaaatttcattggtgaacctaaaggcaaagatattcttaaaatgcgtttgtatgatcaacaacaagcgaagtgtttatattcgggtaagccattagaacttcatcgtttgcttgaaaaagggtatgtagaagttgatcacgctttgccattttctcgtacttgggatgacagctttaataataaagtactcgtgctggctaatgaaaaccaaaataaaggtaatttaacgccatatgaatggttagacggcaaaaataatagtgagcgttggcaacattttgtcgcacgagtccagataagtggattttcatataagaaaaagcaacgtattttgagtcaaaaattggatgaaaagggatttattgaacgtaatttaaatgatacccgttatgttgctcgttttttgtgtaactttattactgataatatgttattaactggtaaaggttcaagaaaggtttttgcttctaatggacagattaccgcgttgttacgtagtcgttggggattacaaaaagtacgtgaagataatgatcgtcatcatgcgttggatgcggttgtcgtggcttgttcaacggtagctatgcagcaacgaattattcgttttgtgcgttatgaaactggtgatgtgtttaaaggtgaacgtatcgattatgaaacaggagaaattattccactttattttccaaccccttgggaattttttagagagaatgtggaaattcgtatttttagcgataaccctaaattagaattagccaatcgtctaccagattatcctaaatataatcacgaatttgtccaacctttatttgtatcgagaatgccaacacgaaaaatgacggggcaagggcataaagaaactatattctctaaaaagacaaaaggagtaaatcgtatagatgctaaagatgatgcatctaatgaaattgtgcgagttaaaaaaattcctttaacagaattaaagttagaggatattgattttatagttggttatgatgtgaatagagaagaagcattatatgaatccttaaaaactcaattagaaaagtacgataataatccagagaaggcttttgctgagaaattctataagcctaaatatatcattaaggataataataaggttttagaaaatacatcagcattagtgaaatctgtaaaagttattcaaagaaaacaaggtaggcaagatatattaaatacaggagtagatgttaacaacggccatgcagataatgctagtggttcaatagttagaattgatgtctttataaaaaataagaaatatttttacattccagtttatacttggcaagtagcaaaaggaattctacctaatatggctcctttagcaaagaaaaaggaaatcgactgggaacttatggatgaaatatctgtatttcaattttctatttatcctaatgatttaattaaattaaaaactaaaaagtttgaattctttggttattttgtgaaatttaatcgcaataatgtatcttttgatataagagcacatgataattcaaaaaaactaggtaataatggtgtttttgaaagtattggtggagccacagctgtgttagttgaaaaataccaagtcgatgaactcggtaaaaatatccgcccttgtcgtccaactaaacgacaacacgtacgttaactgaatccctacactcttcgagtgtggggattttttatatttaaggaagaaattatgacgtggcgtagtattttaattagcaagggcggtaaactttctttgcagaaaaatcaaatgctgattcaacaagaaggaaatgaatttactgtaccattggaagatattgcgattgtagtggtggatagtcgggaaacggttatcacgattcccttattatctgcttttggtttatacggcattacgtttttaacttgtgatgatcaatttctaccctgtgggcaatggttaccttttaatcaatatcatcgtcagctaaaaaatttaaagttacagctagaaacaagcttgccccagaaaaaacaactttggcaggcaattgttcaacaaaaaattcgcaatcaagctaaagtgctcgaaatttgccaatttaaagcagcgtcagaacggttatttaagatggctgagttagtaaaatcaggagataaagataatttagaagcacaaagtgcggtcatttattttcaagttttatttggtaaaggatttaagcgaactgaagatgaaaattcggtaaatagtgcattaaattatggttataccgtgatgcgttctgccgtagctcgtgctgttgtattatatgggtggctgccacaaatgggcttgtttcatcatagcgaactgaatgcttttaatcttgctgatgatttcattgagccatttcgtccattagttgatttattggtttttgaattgagttaccaagatcaattgggtataaatttatcaccgaatttaaaacaacaattaatcaaggtattaaattatcaacttttatttaaacaagaaaaagttaatgcattaactgcgattgatcggacaattgggtcttttcaatcagcactcgtcagtaaaaatccgagtttgctcaaattaccagaaattttaccgcttgcggagcatcaatatgagtgagaatgtgtttatgcgtatgattgtgctatttgatttgcctgtaacaacgaaagctaaaatgcgagcagcaaaccaatttcggcaatttttgctaaaagatggttatcaaatgctacaactttcaatttataccagaattgtacgtggtcgcgattcaatggaaaaacatcataaaagattagttgatcatttacctgaagaaggctctattcgttgtttagccattacagaaaagcaatttgcaagcatggaaattcttgtgggagagaaaaaaatgcaagaaaaaaaggtcaattcagaccaacttttactatttaaaagttgtttttttatgcaataaaaaagccctgaacccttatagttcaaggctttttagtgtccctattatagcactgcgaaatgaaaaagggagctacaactgctatttcatcattgatgaatgtactcaaattatagcactgcgaaatgaaaaagggagctacaacatttttgtatttatattacccgacattgtaattatagcactgcgaaatgaaaaagggagctacaaccaagcgtgcatttgcacgttcttttgactaattatagcactgcgaaatgaaaaagggagctacaactgcattaacatcattctctattgcagtaaaattatagcactgcgaaatgaaaaagggagctacaactcaccattagacaagtgcatttctaaagcaattatagcactgcgaaatgaaaaagggagctacaacactcaaggaggttattatgcagtatggtttattatagcactgcgaaatgaaaaagggagctacaacactcaaggaggttattatgcagtatggtttattatagcactgcgaaatgaaaaagggagctacaactgaaaaatgaacctttacctattgctgctgattatagcactgcgaaatgaaaaagggagctacaacacactaattaacgttgctcttgatgaacagattatagcactgcgaaatgaaaaagggagctacaacccttaaaacgtagtgttgcacacattgacgattatagcactgcgaaatgaaaaagggagctacaacgctatatatacgccatttgcgtaaaccccaattatagcactgcgaaatgaaaaagggagctacaacaaatgtatgtgactgaccgggataaatatgattatagcactgcgaaatgaaaaagggagctacaaccaagcacgtgatgtgatgacttggcttgaaattatagcactgcgaaatgaaaaagggagctacaacgctttatgtgtagaagatcaaacctaatctgacagtccccgtttagaattaccgtgtctgtcagattaatttgagcttaaattcttttctgcccaaatcccttttccatcaagtaatgttgccatcggtgttctgccacagcacatttttccttgatgtgttcgatggtgattataatacattaaccactcatctaaatcagcttgtaatgtcgctaaatccgtatatattttctgcctaaatgcgacttggtaaaattcttgtaagatagtcttatgaaaacgtccacagataccattcgtctgtggatgcttcactttcgttttagtatgctctatgtcatttatcgctaaataaagctcataatcgtgattttccactttgccacaatattcactgccacggtcggtgagaatacgcaacatcggtaatccttgggcttcaaagaacggcaggactttatcattgagcatatctgcagcggcaattgcggttttcattgtgtagagctttgcaaaagcaaccttgctataagtatcaacaaatgtttgctgataaatgcgtccaacaccttttaaattacctacataaaaggtatcttgtgaacctaaatagcccggatgagcggtttcaatttctccactcgatatatcatcctctttcttacgttctagggcttgaatttgactttcatttagaataatgcctttctcagctacttctttcactagtgcatttaaacgctgtttaaagttagcaagattatgacgtagccaaatggaacgaacaccaccgcctgaaacaaaaataccttgcttgcgaagttcgttactcactcgaacttgtccgtaagctggaaaatctagggcaaattttacaacagcttgctcaatgtgctcgtctactctatttttgatattcggtacccgacgagtttgattaagtaatgcttcaacaccgccttgctctacggcttgttgatagcgatagaatgtatctcggctcatccccatcgctttacaagcttgagaaatgtttccgagttcttctgctaaattgagtaaaccggtcttgtgtttaatgagcggattgttagaataaaacatgagagtttccttttttgtttagatttaattttagacactcatattctaaacgggaaactctcatttttataatgatttgtcagatcaagtctgatcttctacagcatagataacatttgtcccgaccagtgcactgtcattatcataaaagctcgtgatactactcattaagttttcagtatcaacaagtggcgtaccctgacggtgttctatccctttccatttaggacgaccgccagattcaaagttttgtaaaacagcagactccatcgttcctgccaacgaacgcataagcggggcgcggtttgctcaataaagtttattagagcaccgagaaatgaaaaatggcgttataatctcattctatttcaccagtattatttccccttaatataaaattaaattactatgattcaaaaatttcataaactattccaaaattcaaccgcactttatactgattttttgtcttttgaacaaaaaatttcggaattagctcagataatgcaagtggatatctcgaaatttgaaatcgatcatttagcggtgagagtaaataattataaagatgcggaaatttggctgacagcactgacgcaatacggtagaattttttccgataatattgtaaatgggcgtgtaatttatcttattgaactgaatgaacctttagatttcttaggacaaagcgtttcaatagtggaattaccctttccaaaggcaaaaatttatctgcgtgaaggttgggaacatattgaatttgtcgtgccctttttgccgaatgaacaaacagttgattgggttgaacggataaagttgcaatttaatttgaaccaattgccacatttgaaactcaaagtgagcgaaccgaaagcagacggggaacaattaccgaatccctctcttgctgtgagctttgtggataaatcacaaaatgatgttgtaataaaaattcatccttattccattagaacagtggttttaatggagcaaataaaatagaaggaaacttaaatgaaaaaattaacgatcgcattagctttaatcgcaagccttggtatgacaggttgtgcaaatacagatgtttttagcggtgatgtgtattctgctgatcaatccaaagaagctcgttcaattagttatggcacgattgtgtcgtcacgccctgtaaaaattcaagcggataaccaaggcgtaattggtacagttggtggtggtgcattaggtggtatcgcaggttcaactattggtggtggtacaggtcgtgctgtagcttctgcagttggtgcgattgctggtgcaatgatcggtagcaaagtagaagaaaaagtaagccaagttgatgcattggaattagttattaagaaagatgacggtaatgaaattgttgtcgttcaaaaaacagatccaacattaaaaccaggtgctcgtgtgcgtatcgttggtggctcaacccttaacgtttcagcactttaattctttttatgttaataaggcttttagtttcggctagaagcctttttgtgtattttacgaaatctcatggtattcaaatctactaaaagtgcggtgcgtttttcgcttattttgatgagtgtattcaatcttgttggctgtgatgaaatcgcacattatcaattgaaaaaaacaatgatttctaaggaatcatctcatattgaaaccgagcaagtattcactacaaatcaaatgttacgtggtgtttattctgatctgacattatcaatgagtgagttggataatgatgataaagccgcgtttttgcgagatttgttggaaggtttggtgatttacgacgagcatgggaacattgtgccagctgttgctgaaagctggcaaactaaagataataaattgtggcaattcaaaattcgtcctgaagctaaatggtcgaatggagaacctgttaccgctcgggattttgtacatagttggaagtttttgacgcaacaaaatgcgccgttaaaacagtacttgcgttttatcaatttaatgaatgcacaagcagtaattgataataaaatgccaatagatagtcttggggtgagagcattagatgcacatacgctagaaattcaattagataagcccactccttatttaccgaatatgttggcacatatcgctttgttgccaatgaaatatggtaaacgtaaggaatttgtggggaatggtgcttatcgctttgaagaacaacaaggaaaatttataatcttggaaaaaaattcagaatattggaatagcgaaaatgtgcagtttgatcaaattgtttatcaaaaattatctgatagccaagatgtgacagatttagatttggtaataaatcctattcaacaagcgcaagcaaatcaacactttccacaactttgtacttatttttatgaatttaattttaatgatccgaatttaagtcaaagtgcggtcagaactgcactggtttctatgatttcatcacaaaatattgtgcaaagtgaaaatttaacgatgttgccagttaatgaatttttaccgcgcaatatgtggttagacgataatcctacttggcaagctacgcttgttgaacaactcttacaaaaggctggaatctctgaaaacaagccgttacagttgaaggtgacttatgataatactggtattcacccgagtatcgctaatcgaattatgcgcgcgtggtcgcaatccgatttgattcgcgttatttcagagccggttagttgggaaaaattgcaagaaaaacgccagaaaggcgattttcaagtgattcgttcagggtggtgtgcagattacaatgaaccatcagcatttttccaatttcttcattcaatgcatcctgataataaaactggttttaagagtgatgaagtcgatcagctgttagaaaaaagtttgttagtgaagaatgaatcggaacgtttggcgttttatcgtcaaattgaaagtattatcaagcgagagcgtgtgtttttgcctatattccagtatacgcaacctattttcttcgcaccagatattgacggctttgataaacgaaatccgacaggcgtgatttacagcaaagatttacaccgtaaaactaactcaaattaagtatttatccataaactgggaagtcaaatttgcgcatcctgcgcgaattgcattagaatattcaggattttgaatttctatttttattatgacgattttagttctaggtattaaccataaaactgcaagtgtgggattgcgcgaaaaagtggcgttttcggaagaaaaacgccagcttgccttgcaacaaattcatcagttgggtttaggacaaagtgctattgtattatcaacttgtaaccgcacagaaatttatcttcataacaaaaatattacccctgaacaatccgcacaatggaatgatgaatgtgtagtttggtttgcacaaattcatcaaattgatctatttgaattacaatcttgtctttatttacaccagaatcaacaagcagcccaacatttgatgcgtgtagcttgtggattagattcgcttattttaggtgagccgcaaattcttggtcaggtaaagcaagcctatcaaatgagtgaagattattatcataatattcatcaatcttctgtatccagtgagttatcacgactcttccagaaaactttctccacggcaaaacgcgtgcggacagaaacacatattggcgaaagcgcggtatctgttgcttatgccgcgacaagccttgcgcgtcaaatttttgaaagtttacgtgagctgaatgtgttgttgattggggcgggtgaaaccattgaattagtcgcacggcatttattacgtcatggtgtaaaaaaattgattattgctaaccgcactttaagtcgtgcacaggatttaatctgtaaactcgaaacaaatacaccaacagacgtatttagtttagcgcaacttcaagatgcgcttaatcaggcggatgttgtgatttcttcgacaggaagcccagatgtattagtgacgcaaaatatggtgagaacggcacaaaaaatacgtcgtcataaaccaatgttgattgtagatattgccgttccgcgtgatgtagatgaaaaagtcaacaaacttgatagcgtgtatcattatactgtagatgatttgcataatattattcaacaaaatatgagcgagcgcgaaaaagcatctgcacaagctgaagagattatcgaagaagaatgtttggactttttttcgtggttgaaactgcgccaatcagcaagtttaattcgtgattatcgtcaaagtgcggaggaaattcgccaagatttattagaaaaagcgttaaatgccttacatcaaggtgaaagtgcggataaaattttacaagaactgagtttaaaactgacgaataaattacttcatgctccgactcaggcaatgcaagcaatggcaaaacaaggtgattcaaaaggtttgcgtcatttttctacgtcaattaaatcaaaaaatacataaagttgacaaaaacttgtgctatctcaatatttcatttcttagaatcccataaaattgtccctacacgaatctactgaaaaatgagtagatttcagcataggagatgacggtgggtatattttttgtaacaggtacagatactggcgtaggaaaaaccattgccagtcgtgctattattcaagctttgcaagaaacgggagagcaaattgtaggttataaacctattgcgacagggcaagatgaaccggtttatacggatgtattagataacggcgaaagtgattatggaaaagaagataatcatgatgtgttggtattgatgaactctacgaatgaaacggtcagttatcaagatgttaatagctatactttttctcataccgtaccgatgttaacatcagaaagtgagcggattaagttagagaaagttgatgcagatttaaattgtttaaaagccacatacgacaatgtattagtcgaaggatcttttggatggttgagtccaatgaataaagatattacttttggtgattgggtcgtgcagcataagatgcccgttgtactggtagttggcataaaagaaggttgtgttaatcatgctttgttaactgtgaaagtcattgaaacaatgggattaaccttagtaggctggattgccaatcgtgttaatcctggcttaagccattatgctgaaataattgatacgttaaatgcgaaaattaacgctccattgcttgggaaaattccttatattcataagcccgaaacgcaagatgttgggcgtttcattacagaaattggttgtttaaaaggattggattaaatttaagtgtgttagtagatagatactaacacgctttgtttatctatttgatttttcgttattttgggaagtgatgtattttttcaccgcacttttgtttgttatttaataccttttttgtctaagtgaaatctttgagtattatataccaaatttcttataatacccctgcatctaaagataatcttccttgttcgacacgaatacctttggcgaattttttaatcaatgcatcacgcggtttgctctcgtccaatgtgtaaataggcatagccatcattaacgcggcaacgccttggttaataaaaggcataattggctgtaatttttccatatatttttgtggttcgcctgaccattttaaaatacgaatatctcgtagataaactgctcctttttcagcatcataatagggaatagtatcaatagttagattgagtttccctgtgagttcttgtttttgtatgcctaggatactatccattgcaccactaatttctactcgttcagagttgttttgaccaattcttgtagtgagattatttaatttataatcaagagaaaataagcctggaaaaccgagcttatctgcaatttcgcctttcttggctaaataattatttacttcatcttcgctaacagaaaaggcttgaacagattgaataatgcctaaactaaggatgatgaaaaatataaaagatttgagtaaattttttaccattggatttattcctatttttagtccttaacttacgttaagatatgtcaacattgagccatttagatttaagcaatgacgattatttaaacctaaatagctcctatctcggagatttttatgttaattgatgcaaatcgcgaatttgcggattatgtcgaactaatctatcgacaacaaaaaggggaacgggttcattgttttgaatataaaggaaacaaatattggttaaaacagccagaacatcccaggggtattgagcgtttgttaaaggctcgccccaagcagttgtttcaagacgaactacggactttattatatttagaaaacaaacgggcacctgtaccacgtttattggtcgcaacagatcattattttgttttggaagatgctggagaaacattaaatcatttgttgcccataaaaagtgcggtggaaaaacaacaaattttgcaagacgttgttattgcgctgacgaatttgcataaaatggatctagttcatggtcgaccagcaattcgtgatattgcttgggataatgggatagttagatttattgattttgaaaatcatgcccatacccgtgatttaacttggaaaaaa

SEQ ID NO: 3155 - DNA, 23267 bp, synthetic construct
  misc_feature 1..23267: note = Synthetic
  source 1..23267: mol_type = other DNA
ttagttttatctaaaaaagcggtaaattcgaccgcacttcgccattctgtgattgatttaaggcagcaacgattacataacggtttgtctgaacatttgttaacacaaatggaacgacatttacaaaaaggtaatcaagtattgctgtttttaaatcggcgtggttttgcaccagtattactatgtcatgaatgtggttggatcacagaatgtcaacattgtgataagccttatacttatcatcaacatcaacgtgcattgcgttgtcaccactgttcttctcaaaagccaattccaatacagtgtgaacattgtggttctactcatttaataacaacagggttgggtactgagcaactagaattgactttaaatacttattttccacaatataaagtgacgcgaatcgatcgggatagcactgttcgtaaggggaaattagatgcatatttagcggatattcaacaaggacgaagccaaattttaattggtacacaaatgttagcaaaagggcatcatttccctgatgtgactttagttgccttagtaaatgttgatagtgcgttattttcggtagattttcgtgctgaagaacgcctagcacaactttatgtacaagttgctgggcgtgctgggcgtatggaaaagcaaggtgaggtagtactgcaaacgcattatccagatcatccactattacaaactttgttgactcgaggttatgatgaatttgcgcagcagtcgctaatgttacgtcaaaatatgggattacctcctttcagtgcacaggctttatttaaagcacaaagtcgccatggacaagaagctgaacaagttttgcaacaagttgcctgttattttgagcgctggaatgaaagagaaaaagctgatttgtctatcttgggacctatcgtggctccttttagtaaaaaagcagggcaatatcgttggcagttattattacaacatccttcaaagcagcaactacaacgtgcgttatctgcatttcagcaaacacaaccagttaaatttgggcaagtacgttgtgtattagatgttgatccgcttgatttaacttagctttggtttgagttaacagggttttttcagtaaaattgcacagattttttacaaattatgttaggaataggtttttagcgtggcaagacgagattatgcccgtcgtggcagtaagaagaaaagtaaaaaaggaacaaataaaattacattattgttgattgctggtgtattaattgctggtttcgcaattgctttatttttaatgaaagaaaaagcaccagaaaaagtagttattgtccccaaagtagataatactcaaccgcaaagcgtgttgccaaaccggccagaggaagtgtggagctacattcaagcattagaaacacgtactgtgccggtaaatgatgatccaaaatctttagataaaaatatgcgcttgacggaagaacaaaagaaaattttgttagcaatggagcaagagcaaaaggccgcagagcaagcacgtttgaagcagcaagaaacaataaagaaaacagaagaaattacgttaaaagaaacagcactttcgacatcgaaagcgattgacgccaaagcagaagtgaacaagcctgtcaataaaccagtggcagtagtggaggtaaaaaaagcagagcctgccaaagagccgattaaagtagagcctgttaagaaagttgataaagcagaagttgtgaatatcactacaagtgagagaaaatatggtttgcaatgtggtgcttttaaaaataaaacgcaggcggaaaatttgcaagcacgtttaaccatgaaaggattacatgctcgtgtgaattcaagtgaagagtggaatcgagtgattgttggacctattggcgatcgtgcttcagcagtgaaagcacaggaaaagaccaaagttattactaattgtgttgttattggcatgtaaggtaagttaaaaaaaacgtgggtaaattacccacgttttttgtttttcgacttgcgtaaatgtaaaaaatccttaaaatgaacgaacgttcattcagctatgttttgtctgtttgtgacctatcttaatttccaattacatttattcaatatttattatgcgtcaatctgatttagatatgaccgagcatatttttatggcgatagatcagctgatggcaaaagatggcttacataatttgtcaatgcataaaattgcaaaggcagcaaagatctcgccggggacgatttacatttattttaagtgtaaagagcagttactcgaacaatttgctcggcaagtatttacacgttttcagcgtgcgctcgaaaaaaattatgatgctaatcagagtttttttgagcaatatcgtcaaatgtggtggaatgtttggcactttttagaagaaaatccaaacatcttattaaatatgtaccaatatcaatctttacctggttttgatacggtaatcaaagaatgggatcgtagtcattggactgtattttgtgagcgcgcgcagaatgctggcgaactttgtgatttaccgaccaatgttctatttacattaggtttagacagtgcaatccaaattgcatggaagaaagtgtattttaaagaattactttccactgagattcttgaatcagtgatccaacgtacttggtgtgcgatacagaaataatttatatagtgatattttacggagcctctgtatgagtgaaactcaagcaactcaaccaaaacgttctcacgtttttttgatgaaaattattcttggaatcatcgtattagtgtttgctggtgtgatcgttttcaatattattcaagctaaaatggttgaaaagtttatttcaaatatgggagaaaaagcttatcccgttactgcaatgacggttattagtcagcaatggacacctgtgatcgaaacaacgggtctagttcgccctaatcaaggcgcgatgttgagtgctcaaacttcaggtgcggtaagtaaagttcttgttcaatctgggcagattgtgaaaaaaggtgatgtgttagttgcattagatagtgcggtagaaatggcaaatttacaagcttcacaagcacaacttgcgtctgttaaagccacttatcagcgttatttatctttatataaaacaaaaagcgtatcacaacaagagcttgataacgcaaaatctgcttatgatgcattagtggctaatattgctgcgttgaaatcatcaattgaacgccgacaaattgttgctccttttgatggtaaggcagggattgtgaaagtcaatgtaggacaatacgtgaatccaggaatggaaattgttagggtcgaagatacgagcttgatgaaaattgattttgcgttatcgcaaactcaattagataagctgcatattgggcaaaaagtaacggctactgccgatgcacgtacgggagaaacgttcgctgctaagattacagctattgaacctgcgattagttcagcaacaggcttaattgatgtacaggcaacgtttgaacctgaagatggtcgtaaattgctatcaggtatgtttactcgcttacgtgttgctttaccaacagaatatgatcaagtcgttgtgccacaggttgcagtgagttacaacatgtatggtgaaattgcttatgtattaacagcactttcagcagaagaacgtgaggtattagcgggtcgtaaggatttcgatagtaataatcttgataagacttatcgtgttaaacaagtgactgtgtttactaaagatcgtcaaggtgtatatgctcagttgaaaggagatgagattaaacttggcgatagaattgtgacaggtggtcagcaaaatttatctaatggtagtttagtgttagttgttgataaagtaggcgtaggtacagctcagcctgcagaaaaaacaaacctataaagtgcggtcagaaatagggaaaaattgatgaattacactttattattaaaacaattagaagaaatgttggcacctgaaagctatatgatttcacgtatggctaatatgtcagcatttttatatgagcatatgccaaatctgaattgggttggcttttatattgtgcgagatggtgtactcaaagtaggtccttttcagggcaaagtggcttgttcagatattagttttggcaaaggtgtatgtggttatacatggcaaacaggcaaaacgacggttgtagatgatgttcaccagtttgatgggcacattgcttgtgatagtgcatcacaatcagaggtggtgatacctatctttagagatagtgagatgattgcagagcttgatgtagattctccatttttggcaagatttagtccagaagatgttgaattcttagaaaaatgcgttgagtttatctgaataaaagaatagggatttaaaatgcgatttaccgatatttttattcgtcgtcctgtattggctgtttcgattagtttgttgattattattttaggtttacaagcaattgcaaaactagcagtacgtgaatatccaaaaatgactacaacagtaattaatgtgtctaccgtttatcctggtgcggatgctagtttaattcaagcctttgtgacctcgaaattagaagaagctgttgcacaggcagatagcatcgattatttatcatccaaaagtagtccgaatagttcgttaattaccgtaaagatgaagctaaatacggatccaaatgccgcattagcagatgtgttagcgaaggtaaattctgttcgttctcaattaccatcaggtattgatgatcccgttattacttcttctacagggggaactgggatgatgtatatccaatttaattcaactaaattggatgcaagtcaagtcacagattatattgaacgggtgattaaaccacagttctttactatagaaggggtggcagaagtacaaatttttggtgcgtctgattatgcattacggatttggcttgatcctgctaagatggcggcgcaaaatttatcagcaatggcggttagaagtgcgttatcttctaataatgtacaaaccgcagcaggtaatgacaatggtttctatgtcacttataaaaataaagttgaaactaccacaaaatcagttgaggaactagggaatctgattattagttctaaaggcgataaattagtgcgtttgcgtgatattgctgatattgagttaaataaatcaagtgatagtactcgtgctgtcgcgaatggttttgagtctgttgtactcgcaattaatccaacatcttcagctaatcctcttgttgttgcagagaatgtgcgtccattatatgagcaaattaaaaacaatttgccagacagtatggatgcggaaattttatacgatacaactattgcgattaatagctcaattgatgaagttgttaagacaattttagaagcgaccttgattgtattagttgttattactttattcattggttcattacgtgcaattttgatccctgtcattacgattccgatttcgttaattggggtgattatgctgttacaagcatttgatttctcgattaatttaatgactttactagctttaattttagcgattggtcttgtcgtagatgatgcgattgttgtgttagaaaacgttgaccgtcatattaaattaggagagaccccttttagggctgcaattattggtacacgtgagattgccgtacctgttatttcaatgacaattgcacttatggcagtatattcaccgatggcattaatgggcggaattactggtgcattatttaaagaatttgcgttaacacttgcgggtgcggtatttatttcaggtattgtagcgttaacgttatctccaatgatgagcagtaagttattaaaaccgcatacagatccaagtcgtttagagcagtgcattgaacaaatgctaacgaaaattaataacggctataattatgcactaaatcttgttatggcgagccgtaaatgtatgctagcgtttgcagcaattgtttttgtaactttacctttcttatttacttcactttctagtgaattaacacctgctgaagacaaaggtgggtttatggcaattggtcgttcgccatcgaatgtgaatgtcgattatgtgcaaggagcaatgaaagagttcgagcagattttaaaagacacacctgaagttgatttttcgatggtaatttcaggtattcctggtggtaatcaatcattaagtgtgattacattaaaagattggaatgagcggagtcgtagccaggctgaagtattaaatgaattaaataaaaaagcagcaagtattcctgaaatttcgattactggttttaattttcctgaaattaatacaggggagcaaggtcctccaattggctttgtgattagtactgcgaataactaccaagaattggctaatgtggcaggtagtttattagaagaaatgaagaaatcaggttactttgtttatactgcgttagatttaaaatttgatactgcacaaatgcgcattacggtagataaggaaaaagcaggtacttatggtgtcactatgcaacaaattagtgccactttaggtagtttcctttctgcagcaacagttgaacgggtagatattgatggacgtgcataccgtattattatgcaagtaaaacgtgatcaacgtttatcgccagagagtttaaataattattatgtaacggcaagtaatggtcaatcggtaccattgagtagttttttaacgatgacattagagcctcagccaacttcattacctcgttttagccaattgaattctgctgtaattagtgcagtacctcttccaactaaaagtacaggtgatgctattgagtggttaaaagtcgcagcgaaggagcatttaccacaaggatataattatgattttacaggtgaagcacgtcaattagtacaagaaggaaatgctttagcgtttacttttgtacttgctgttatcattattttcttagtattagcaattcagtttgaatctattcgtgatccattagtgattatgatctcagtaccgttagccgtcagcggggcattactcacattgaatttcttaggaagtatgctgccaggtatattgcgaatttttggtattgtgatttcattcccaggcacaacattgaacatttattctgaagtaggcttaattactctggtaggattgatcactaaacatggtattttgatgtgtgaagtggcaaaagaggagcaattaaatcatggcaaaaatcgtattgatgcgattaccgaagctgctaaagtacgtttgcgcccaattttaatgacaacagcagcgatggttgctggggttattccattgttgtttgcttctggtgctggtggcgtatctcgttttagtattggtattgtgattgcatctgggctaacaattggtacattatttactttgtttgtgttaccagtgatttacagctacattgcgacagaacataaacctttgcctgaatttgatgagagtattaagcctttaactgagaaaagtgtacattcagagtaaaattttgcaaaaacagaccgcactttgaagcggtcttagataaatgcaaaagttgcaaagggcagatcaattttgatccgcccttttgttcgagtattcgtattaagctagaatgattatatcaatagtgaattattattttgtttctttagaacacccacactattttattcaaacatgagtttgtgattcatttgatggccaagcgttaacaacggctttgactaatgttgctaaaggaattgcgaaaaatacgccccaaaaaccccataatccaccaaaaataagtactgcaataatgataaggagaggatgtaagttgacggcttcggagaataaaaatgggactaacaagttaccatctaaaatctgactaactacataggcggccaatagataccaaaatgttggtgtaacaccaaattgtgcagcagcaactaaggcaatagggatagtgactaatactgcaccaatataaggaaccagtactgataaaccaacggcaactgccaataataaagcataattcaagccaaacaataagaaaattagataagtaacggctgtcacaataatgatttcaaccagtttacctcgaatataattggcaatttgtaattgcatttctttccagacatttgacgctagtgtacgattacgtggtaaaaaacgactgactcccttaattagctcatctttatcttttagtaagaaaaataccattaaaggcactaagaaggcataaatacctaaagttactaaactgagtaatgaagtaagcgaaaattttaaggcagattccccaaaagcgagaattttttcacgtactgtttttaaaacagaatcaatagtttggtaatcaacaagttcaggataatgttctggtaatgagagcagccattcatttagcttattaaacatatggggaagatcagtaactaaattgattgtttgagtccacaaggttggaattaaaacgagtacaataattaagatcaaaccaagaaacccaccaaatactagggctgtagagagtaaacgtggtagtttaagcttttcagtgaggatgcgaattggccattcaagtaaataagctaatacaatagcaattaaaagcggggcaattaagtgactgaaaaaatagattgatataaaaccaaacaataaaatagcgaataatcccattgcttgcggatcactaaagcggttgttataccaattttttaacatttcaaacatgatattccctcaattcaagcattttgctcgattataaggtaaaatctaggcagatcatatcattaagcgaggaaattctatggtgattacgatttatcataacccacgttgttcaaaaagccgagcggcattaaccttattagaagaaaagcaaatccagccacaagttaagttgtatttagaacagcaatttactgtgccagaattacaagcgctagtgcaaaaattaggtataggtagtgtacgagagatgatgcgtactcaagatgaattatatcgcaatttaggattagataagcctgaagttacggagcagcagctgttagaggcactttctcagtattcagcgctgcttgaacgaccgatcgtagtacatggcgaaagagcaaagattggaagaccaccagaaagtgtacttgagattctgtaatttcgttttataatgttgcccgcttgtttgttacaagttggcaacatttttatcacaatactaattgaggaaaaacgatgacaaagaaaatacaaacaccacaaagcgcattgccttatcagcatcaacgtggtgtcattcgtgataatgcactacaagcattgttacatgatcctttgtttcgccagcgcgtagaaaagaaacgtaaaggcaaagggagttatcaacgtaaagaaaaacatgtagggcgatattttgcaaagcccgatgataaaatttttaatgttaaagattttatcatcgggttttttataaccacgttttttcttattaatatgcaactcatttaagctcagcgaggtaaatttatgacgatgcaaacgaaattattatttagtaataattggaatgtgagaattagtgacccaggtgaagaagggacacatagccatttctttgaaacaatttacatcacgctagctgcacatattgatagtaatgggattagctatgagtttacgcgaaaaatagaagatcaagttaaaactaaccgcacttttacagatttagctgaactctttaagtttttaggtgattatgtagatcctgttagtatgggatttcttggtatcaaaattggtaatttaggcgtacaagcttaagattttttatcattcctcaaaaaaacgatgccccttgtaattttcattacagggggcagagcgttacggtcattcttttcagaagccttattgtagcaacgtctctcatttcgcagtgcaacaatatgtgaaccactctacattattagataaatatgatcaacacttttgtgcttttgctttaaactatttagagggaatgttcttcaataaaaataaggaaaataatatgcagcaaccattaaatcagaaatttcaatatattttaggattagatctcggtatcgcttcggtgggttgggctgtagtagaaattgatgagaatgaatacccaacgaggttaattgatgttggagtaaggactttcgaacgagcagaagtgcctaaaactggtgaatctttagcgctttctcgccgtttagcaagaagtacgagacgtttaatccgccgtcgagcatatcgtttattattagcaaagcgtttatttaagcaacaagggatgattacgcaatccgatttgagcgaagggttgccaaaccaagtatggcatttacgagttgaaggattagaaagaaaattattaccaagagaatggagcgccgttttattacatttattgaaacatcgtggttatctttctcagcgtaaaaatgagagtaaaacggataataaagaattaggcgctttgttgtctggagtcaaccaaaatcatcagttattacaatctgaatcttaccgtacccctgctgaattagcggtgaaaaaatttgcagaggaagaggggcacattcggaatcaacgtggttcttatacccatacattcaatcgattagatcttttagaagaacttaatttactttttgttcaacagcgtcaatttggcaatgaagatgcaagtgagattttacagcagcgggtgactgaattattaatgtggcaaaagcctgcattatcaggcgaagctattcttagaatgttaggaaaatgtacttttgaaccgacagaatataaagcggcgaaaaatacatacagtgctgagcgatttgtatggttaactaaactgaataatttacgtatattggaaaacggtattgaacgtggattaatagaagatgagcgtcaattattgattaatcaaccttatgaaaaagcgaagttaacttatctacaagtgaaaaaattattacaacttccagaaaatacaatttttaagcatctacgttatagtcaaaataatgctgagtcagcaacattcatggaattgaaagcatggcacgctattcgtaaagcattggaaggcaatgggcttaaaacagaatggcaaggacttgcaactaaacctgaattattagatgaaattgggacagccttttcgttatataagacggatgaagatattagtaaatatctaaatggtcaattgccaaataccgtgttgcaggcgctattagaacagttaaattttgataagtttgttcagctatctttgcaaagcttacgaaaaattttgccattgatggaacaaggtaagcgctatgatgaagcatgtagagaaatctatggtgatcattatggtaaacagagcaaacaagaactggttttcctttccgcgattcctgctgatgaagttcgtaatcctgttgtattaagaacgctttctcaagctcgtaaagtgattaatagtattgttcgcttatatggctcacctgcgcgtatacatattgaaacaggtagagagctaggtaaatcttttaaagcacgacgtgaaatccaaaaacgacaagaagaaaatcgtagtgagcgagaaagagcggttaaaaaattccaagaatgctttcctgattttgtcgggctaccgaaagcgaaagatattttgaagttgcgtttatatgagcaacagcatggaaaatgcctttattctgctaaaaatttagatattactcgccttaatgaagaaaattatgttgaaattgatcatgctctcccattttcgcgcacttgggatgatagttttaataataaagtgttagtactggctaatacaaatcaagaaaaaggaaatagaacaccttatgaatggctaaggggagaggaaaattcagcacgctggaaaagttttgttgctttagtaatgggaagttgcttttctcatgctaagaaacaacatcttttaactcagaaattagatgaagatagttttattaagcgaaacttaaatgatacacgttatattgctaaattcttgtcaaattatattgcaactcatatgcaattagttgggaacgggaaacataatgtttttgcctcaaatggtcaaattaccgcgctattacgtcgtcaatggggattcacaaaagtacgtgagagcgataggcatcatgctttagatgcgattgttgttgcctgtactactagggcaatgcaacaaaaaattacgcgttttattcgttttgaagaaatgagtccgtttacaggagagagaattgataaagaaacgggagaaataattcctctgtattttccgaagccttggcaatattttagagaagatgtgaatatacgcgtgtttgatgaccaacctaacattacattgaagaagatgctgccagatagaccagaagcaaatcatgaatttgtacaacccttatttgtttcacgtgcaccaacacgaaaaatgcgtggtcaaggccatatggaaaccgttaaatccgccaaacgtttatcagaaggtgttagtgttttaaaagttccattgacacagttaaagccaaatttattagaaaatatggttaatcgagaacgggaaagtgagctttatcatgccttaaagactcgtttaactgaatttaataatgatcccgctaaagcatttgctataccattttataaaaaaggaggtcaacgagtaaaatcagttagagtagaacaggtacaaaaaacgggtgtacttgtacataaatgtaaagggatcgcagataatgcttcaatcgtgaggacggatgtatttgttaaaaacggtaaatttttcttagtaccaatttatacttggcaagtagcaaaaggtattttagctaataaagcgattattgcgaataaacacgaagatgaatgggaagaaatggatgaaaatgcgatcttcaaattcagtctttttccaaatgatcttgtggaattaaaaaccaaaaaagagcgcttttttggttactatataggattagatcgtgcaaatggtagtattagtatcagagaacatgattctgcggtttcgaaaggtaaagacggcatttaccgtgttggtgtgaaattagccctttcttttgatagatatcaagtcgatgagcttggcaaaaatattcaagtgtgccgtccgagtaaaagacaacctgtttgctaacacattaatcccaattttccttttgagaaaattgggatttttttaaggagtcagaatgagctggcgtagtattttaattagtaatggaggtaagctgtcattacaacaaaaacaaatgttaattcagcaatcagatagtgagtttacaattccattagaagatattgctgtcatcgtcattgaaagtaaagaaactgtaattactattcctctgctgtccgcattagcccaaaatggaattacgctgttaacttgtgatgaacaatttttaccttgtggacagtggttacctttcgggcaatattatcgacaattgaaaacccttaaattgcagttagaggcaacacagccacaaaagaagcaactttggcaaaaaattgttcagcaaaaaattcgtaatcaagcttttgtattagcacaggttgattatattgacgaagcgaagcgtttaaatcgaatggctgatgcagttaagtctggagataaagaaaatattgaagggcaagcagcattaatttattttcaaaccttgtttggtaaagcatttaggcgtactgaagaaaataggataaatgcacatcttaattacgcctatactgttttacgttcagctgtagctcgtgctttagtgctttatggttggctaccacaattagggttatttcatcgtagcgagttaaatccttttaatttggccgatgattttattgaacctttcagaccattagtcgatttaatggtatggcagttatggtcagaagataaattacagcaaggattatctcctttaactaagcaagcactgattaaaatattacattatcaaatgctgtttcgagaagaaacttttagtgtattagcagctatagatcgtacagtaggttctttgcaggtagcattagtttcacaaaatgcgaaattgttaaaactacctgaaatgatgccattaaaggagcatcattatgagtgagggtaaatttatgcgtttaattgtgttttttgatttgccagtgacaactaaagaaaaacgaaaagcagcaagtcaatttcgtcattttttattgaaagatggctatcaaatgttacagctttctgtttatgcacgaattattagaggaagagatgctatgcagaaacataataagcgattatgtgaacatttacctgaagaaggatcaattcgttgtttagaagtcactgaaaaacagtttgcgagtatgacaattttattaggcgaattaaagcctcaagagaaaaaagtaaatgcaaatcaaatgctacttttctgactatttagtattagatgtttgcttattatataacacataaaaatatatttgattgcttgttttttgttcttttattgtcttgtcttagcagaaaatttactcttttttatcttattaaagaatattcttgaggcaatttttgcttaaaaatttaaaagactatttgaaaatagtaaaaaatgtctctcttttttgtcataaaaaacgctctcattctttggtatataaggaatgagagcgttgagattgtagcactgcgaaatgagagagggaactacaacattatttatctcgcggctatgattacgtgaattgtagcactgcgaaatgagagagggaactacaaccccactccacttcggtggagtggtttatccattgtagcactgcgaaatgagagagggaactacaaccaaggtgcttgataaaaacgatgatattttattgtagcactgcgaaatgagagagggaactacaactcatctcgagttgctgtgtatagataaagcattgtagcactgcgaaatgagagagggaactacaacttgatcagcgtttcaagccaatattttttaattgtagcactgcgaaatgagagagggaactacaacgatcaatttatggtttgatttgtacggtcaattgtagcactgcgaaatgagagagggaactacaattgcttgtaactgactgtaacttcacttgcaattgtagcactgcgaaatgagagagggagctacaactctttatgacctttttagccatgcttcattattgtagcattatgaaactaaatagagaattaataacttaattacttttataagttgtgaaccatttttactcttttcttagttaggtgatgataaaaacgcaatctatgagattgcgtttttgctattcattagcactagcttaatctttgttttgcttcgttgatagcttcggcgacgcgtaatggggatactccgcctttggcacagcgcttatctaaacaagattgaagtgaaaggatttcatagacatcttcttctactacatcactgaattgcttaaattcagcgacagttaatgcttcaagcgctttgtgttgttgaattgcatagacgactgtttcacctacaatatgatgtgaatcacggaatggcacaccttttgctacgagataatctgccaattccgtcgcattcgaataaccttttaatgctgcttctttagtacgttctacattaacatggatcccctctaatactaaggttgccatatcaatacaatcttgccatgtgtctagtgcatcaaagataccttctttgtcttcttgcatatctttgttataagctagtggtaagccttttaatgtcattaacatacctgttagtgctcccatgacacgacctgctttgcctcgaattaattcacatgcatcagggtttttcttttgtggcataagggatgaaccagaagtaacacgatcagagagctcaacaaagtttgcttcgccactattaaaaataatcatatcttcggcaaatcttgataagtgtgccatactcagtgatgcggtagaaagtaattcaacgatatgatcacgatctgatacactgtctaagctattacgagtagcaaatgcaaagcctaaatcctgcgcaagttgttcacgatctacagcataagctgtacctgccaaggcaccacttcctagtggacaataatccatacgtttataagcatcagttaaacgtgaatgatcgcgttctaacatttctacgtatgccatacaccagtgggcaaaagtgattggttgagcgcgttgtaagtgagtgtaaccgggcatgacagcatgttgattgttttctgccgtactgactaatttacgttgtaatgttctgatagataactgtaattcaagcacacgctgtttacaccacattttgatatccagcgcgacttggtcgttacggctacgtccagtatgtaattttttacctaaattaccgactttatcaatgagtttactttctacccaactgtgaatatcttcggcatcatcttgtaaaattgcttgtggatttgagcgtacctctattaataattcgtttagtgcaatttctagttgttgttgttctatgctgtttaatacaccaacactaactaaggcttttgaccagccaatagagcctgtaatatcctgttctgctaaacgataatcaaaacgtaatgaatcattgaaatctttaaaacgcttatctgccgcttgtgtaaagcgaccaccccaaagtgccatatcttcctcttgttttttaaggtttaattcttgtaccaataatttctccgctaaaaagtgcggtcagtttttcaggatatttccaacttgcaatatctacaccacgattgagtatcgttgctgcatctaatgctgctttcactttgacaatcatgccgtcagtgatcactttctctgtaatgaattgctcaatttgtgtcgttgtcaattcagataagagttgcttatttgcgtctaatacaccctctacatcagagagcatgactaaatcagcattaatcagggcagcgatagcagttgcagcttgatctgcattaacgttcattaataagccattttcgtctactgcaattgagctaataataggcaagaaagcttcgccaagcaaatagtttaataatgtaggatttttaggaataacagtcgcaacatgccctagttcgggatcaagttgaatggctctagttaggttgccatctgctaagcataagccaacaggatttaaatggaacttcgcagcttgggcaactaatgtcttattagcgataccagctaatgcccctgtaatgatatcaatttgatcacttggtgtgatacgcagtccatttttcttctttacgggtaaattcaagcgctgcataaggtcatctgcaacgcaaccgccaccatgaacaacgactaaagcacgatcaaaatgttgttgataattggctagtgcggtaaataaattttgcagagcgataggcgtatcaagtaatacgccgcctaatttaatgactaacgggttcatttaaattaatcctaatgtttctggtaaaccataacgaatattggcacattgtacggcctgtgctgctgcaccttttaataaattatcttctgcaccaataataatgatatatccatttttagtgacgaaaccaatatcgcaataaggggtaaattcgacagctttaatgcttggtaacccttgttgataaagacgcactaatggtttattcgcataatattgttgatatgcagcctgaatttgctcatctgtgatacccaccttgagttttgccgtgatcgtcgcgaggattcctcgtttaaagttacccaaatgaggtgtaaagatgacttctgtacctaaatgcgttgcgatttctggttggtgacggtgattaaatataccataggcattgaaactgacttcacaaaaactcgtcgtgagtgaggctttccgcccagcaccgcttacaccactgatggcattgataatcgggagttggtttagatcgagtaaatgatgctcaattaacggttttaaacttaattgcgaaactgttgggtagcaacctgcaacagcgactaaatttgtttgcttaatttgtttatcattccattccgcaagcccataaacagcttgttgtaatagctcagggtattgatgttcaaaaccataatagtcagtataaaattgcatatcattgacgcgaaaagcaccagataaatcaaatactttacagtgatgttgtaagaaaatgggagctaaattatgactgacttcatgagctgttgctaaaaaaacaagatcgttttgttgtgctagcgtagtcaagttttctggcaaaggttgcaatgataaattgacaatgtgcttaagttgagggtagatatcagccaaagctttgtgggcatcttgactttgatttgatacatataaccctgttaatgtgaatttagggtgctgagtcaaaatacgcgcgagttcagctcctgtataaccgcttgcaccgatgatgattgctttttgcatgtgatgttgtaccttaaatatactaagataatattacctttgattaattatgctattattgtgcataaatatctaaaatacaatatttatttcatttcgtaaggtaaattcaatgaaaaacattccttcttttttacagatgtatcaacaattaatagcatcaccgacgatgagtagtgtagaaccgaattttgatcagtctaatcgttttttgattgagttattagcaagttggttagagacgataggatttaagacagagattatggcggtagaaggaagtcgaaataaatttaatttattagcaagttatggtgagggtcaaggaggactattacttgctgggcataccgatacagtaccttttgatgaaggacgttggcgcttcgatccatttaagttaacagaacaagatggcaaattgtatggattggggacagccgatatgaaaggtttttttgcttttgtgattgatgctgtgaaacaacttgatttgaagcaattaacaaaaccgcttcgtattttagccactgcggatgaagaaacgacgatgttaggtgcaaggacttttattcaacatacacatattcgtccagattgtgccattattggtgaacctacttcattaaaaccaattcgggcacataaagggcatattggtgaagcattacgtattatcggtaaaagtggtcattctagtgatccaactaaagggatcaatgcgattgaattaatgcatgaagcgacaggctatttaatgcaaatgcgtgatgagctatgtgcaaaatatcatcatgcagcctttgaaatcccttatccaactatgaatttcggtgctatttcgggtggtgatgcggtcaatcgtatttgcgcatgttgtgagctgcattttgatattcgccctttgcccaatttatgtctgcaagatttaaatgatatgttacaggaaaaattagcgccaatgtttgagaaatggggtgatcgtatctcattgcacgcattacatgaaccaataccgggctatgaatgtgagcattcagcccaaattgtacaagtagttgaaaaattattaggggaaaaatgcgaagttgttaattattgtacagaagcacctttcattcagcagctttgcccaacattagtattgggtccagggtcaattgaacaagctcatcaacctaatgaatttttatcgactgaatttattcatccaactcgcgagctattgagtaaaatgatttggcatttttgtatttagcatagatgtgtttgcactggcttttatatagaaaagtgcggtcagttttacaaaagttttgtcaacctgatcgcacatttaaatgtcatggcttatttcaacaaatcttcattttttgcgtgaatccatttgcctcgtttcttatcaatatattgaaaatattcattggtgaaggtaccttgtgaacaagtgagtttatctaagcgtgagttaacatctttattttctaatgctttgattaatgtttttggtccagttaaactgaatacgcctccattgacgcgttcttgctcaatgttatcaataatgatatctaatgtttccttcaaaaaagcattgccttttttactggctaaaaagaaattagtatattgaccacgacgtgcgatcacgacttcatcgtcttcctcatcaataatgctgtctaagcaccacacaagatgtccatcaatatccatataaacaccgccttcatgataaagagtgaaaattcgccaaaaatcagcttgtgcggcaccgtcagttaatttgctataagcgttaaatgtacgttcatcaccgtgagttttaatgtagtcagcacgtgcttctgtgctgacataacgatattcatagctccaagagagtaaacgattaaaaagatagttacagtaaatgggtaaagtgactttgttactgtagttcgtttgccaaattactcgattaatttttgtgttcttcgtagattggcggcgagcaggatcaaattctgggatagtgaaacgttttttgggaaaaatgaaatggaaaggataacttaatgttttgacaatattaccgagtaaacgagttaagccgttcgcaattaagattaagtttttgtatttaacgggtttatacatcagagaatgccatattgaataaaaatcattgtgcgtactttatcatcttatacagaaaagaacaaaatgcttatggaagatatgtctattttcttaggttagcttgtgacataaagatatttgagtagtcatggcgggcgataccagtctcgaaccagtgaccccctccttgtaagggcggtgctctcccaactgagctaatcacccttcttcttttttacacatgaaatatgacattgtcatcatcgaggatgattatttgaggcaatatattttgtaagaaatttaaacttaaagaagaggttttttaagtcttaagtggtgggcgataccggtctcgaaccagtgaccccctccttgtaagggaggtgctctcccaactgagctaatcgcccacttgagacttaaaatctttgggtaatataacgaagtggaacacttaaaagtggtgggcgataccggtctcgaaccagtgaccccctccttgtaagggaggtgctctcccaactgagctaatcgccctcgttatataacaacattggacacaccatcaaataagttgaaaagtggtgggcgataccggtctcgaaccagtgaccccctccttgtaagggaggtgctctcccaactgagctaatcgcccaaatgttgtgaggaggcattataattattagttctattcagtcaacaagtttttgcaaaaaaatactcaattgttttaaaaataggcataaattcataatttttattcggaattatttaaacttatagtacaattttgaacaaatttttcttgaaaaaatgaaatgagataaaggttatacaatgaaattagcagcattatttaatttagatccaaatgtaaaagtgcgtacacgttttgcaccaagcccaacaggatatttacatgttggaggtgctagaacagcactttattcatggctatatgcaaaacatcataatggtgaatttgtattgcggattgaagatacggatttagagcgctctacaccagaagcaactgcagccattttagagggtatggaatggttaaatctagcatgggaacacggtccttattttcaaacgaagcgttttgatcgttataaccaagttattgatcaaatgattgaacagggattagcatatcgctgttattgttcaaaagaacgcttagaaacgcttcgtcatacacaagaacaaaataaacaaaagccacgttatgatcgccattgtttacatgatgatgagcatgatcctaaacagccgcacgttgtacgttttaagaatccaacggaaggttcggtaatttttgaagatgcagtacgtggacatattgaaattagcaatagtgaattagatgatttaattattcgccgtactgatggttctccaacctataatttctgtgtagtagtggatgattgggatatgggcattacccatgttgtgcgtggcgaagaccatattaataatacaccgcgtcaaattaatattttaaaagcattaggtgctccaattccaacttatgcgcatgtttcaatgattttaggtgatgacgggcagaaattatcaaaacgtcacggtgcagtcagtgtgatgcaatatcgcgatgatggttatttaccagaagcattactcaactatttagttcgcttaggctggggacatggcgatcaagaaattttttctgtggaagaaatgattaatttattcgagcttgaaagcgtgagtaaatcagcgagtgcatttaatacggaaaaattactctggttaaaccatcattatatccgtgaattacctgcagaatatgttgcaaaacatttagcatggcattatcaagatcaaggtattgatccttcaaatggtcctgcgctagaagaaattgtcaacatgttagcagaacgttgtaaaacattaaaagagatggctatttctagtcgatatttctttgaagaatttgattgttttgatgaagcagccgtgaaaaaacattttaaagcagctgcgattgagccacttgaaaaagtgaaagaaaaactgaccgcactttcaaactgggatttacagagtacgcacgaagctattgaacaaactgcaacagaattagcgttggggatggggaaggttgggatgccgttgcgtgtcgcagtaacaggctcgggtcaatcgccatcaatggatgttactttagtcggtattggcagagaacgtagcttagcacgtattcaaaaagcaattgattttattaaaagtcaaaatgcttaatatttaatcttgtaatacaatatcatgaaattgatgttgacagcttgcgtggcggaatttatcattaccgccacgacatttctaatatggggttatagctcagttgggagagcgcttgaatggcattcaagaggtcgtcggttcgatcccgattaactccaccaagtttttcttgtctccatttttatcatcgttttttaacttattcattgttgtctctga

SEQ ID NO: 3156 - DNA, 23261 bp, synthetic construct
  misc_feature 1..23261: note = Synthetic
  source 1..23261: mol_type = other DNA
tatagtagtgcggcctatcctgactcttgctgtgtgccctaatggtaaaaattctttatctccaacttgccgtgttattggtggtggttgcattgagcgggttgatagcggggtcgcctgccgcatggtcggcggctgccggaggggtgagttatgttttaccttctgctgttacggtcctgttcttaaatattttccgcagtatgccgcaatatgtcggttatgcttttattttcggagaaggtttaagaatagtgctggcactggttttaatggtggcattctttgccctatatcaccaggagttgcggtttataccgtttcttttaggcttgttagccaccagtcatgtgattttttttattttttggaaagcaaaatatcatgtcaagcgcaagtgaaaccgtgactgctgccgactatatcaagcaccatctgcaaagtttgaccagtttgtccgatgtggcgaaaggtcaaggtttgcagaatatcgccgatttctcttatatcaacttggatgccatattttttgcagtcgttttaggtgctttgggttgcttcctgttgcgcagggcggctgtaacagctacttccggcgttcccggccgctttcaggctgcggtcgagctgttgtatgaatttgttgatgatatgtgcaaaggcattattcataatgcagaatcacgcaaggctgttgctcctttgggtttaaccctttttgtatggattttcctaatgaatgccatggatttgttgccggttgatttgtttcctgtgacatggcaaggcattactggtgatcatcatgcattgttgcgtgtagttccaaccgctgatttaaatacatcgttggccttggcaattggtgttttgtgtgtctgcatctattacaacattaaaatcaaaggtggcaaaggatgggtgcatgagctgtttacagcaccattcggtccgtttttggctccggccaactttttgctgaatattttggaatttctatccaaaaccgtttctcatggtatgcggttgtttggcaatatgtatgcaggtgagctggtgtttttgctaattgctttgcttggcggtgcttgggctgctggcggacatttcagtttaatggatcccgtcttgtttgtgttccatatcgttgcaggtgcagcttgggctatattccacattttgattattaccttacaggcttttatcttcatggcattggcgttcgtttatatcggtcaggcacatgatgcccactaagcattatgtaatggttaaaggttttatgttctaaagtttgaagttttagttttggttgtttagtcgtagttttaacttttgttttatttaaggagtgtaaaatgggtttgattgctattgcttgcggtttgatcgtggcattgggtgcattgggtgcctctattggtatcgcaatggttggttctaaatatttggaatcctctgctcgtcagcctgaattgattggcccgctgcagaccaagctgtttttgattgcaggtctgattgatgcggcattcttgattggtgtggctattgctctgctgttcgccttcgttaatccgtttgttaagtaatcagggaaactcttattctgtatgagcagaatagaaagattgcttgattaactctatacacgaaggttaagtaatgaatttaaatgcaaccttaattgcgcagttaatcgtcttttttatcttggtttggttcacaatgaaatatgtgtggcctccgattgctaaggcgcttgatgagcgcgctgacaaaatcgcagaaggtttggctgcggctgaacgcgggaagagtgattttgaacaggctgaaaagaaagttgcagaactcttggccgatggtcgcaatcaggctaccgaactggtagcgaatgcggaaaaacgtgcggcgcaaattgtagaggaagcaaagaatcaggcttctgttgaggctgcccgtatcgcggctcaagcaaaatcagatgtagagcaggaaactaaccgtgcacgcgaagcattgcgtgagcaagttgctgctttagctgtaaaaggtgctgaagccattttgcgaagtgaggttaatgctgccaaacatgctgatttgcttgctaacctgaagcaggagctgtagcttatggctgagttcgcaactattgccagaccttatgcaaaggcattatttgaactggcgaacgaaaaacatcaaattgaatcttggttgagtgggttgaaggaattagcgtggtcggtagatcaggctcgtgttgcttcgctgattgaagatacccgaactaatagcaaggaaaaagctgattttttgctcaaattgcttactgatgagcaggttgcgggagacaaaacttttcgtaattttgttcatgtagtggcagacgaaaagcggcttttggttttacctgaaatttatgttcaatatcaagatttagttttatcgcgtaataataccaagaaggcggtcatttacagtgcatttgaatttgctagcgaagggcaaaaggccaaaatcgtagcagatttggagcaacattttaatacccggttagaagctgtttttaatgttgagcctagcttaatcgccggaattaaggtggaagtggatgatcaggtattggatctgtctatacagggtaaattgcaaaaactgtatacggcaatgacgaattaggagagttttcatgcagcttaatcctgctgaaatcagcgaattattgaaagccaaaatcgaaaacttagacacaaagcaagagatacatactcgaggtacggtaatttccgttactgatggtattgtgcgagtgcatggcttatcagacgtaatgcaaggtgaaatgcttgaatttccgaataatacgtttggtctggcaatgaacttggagcgcgattcggttggtgctgttgtgttgggtgaatatgagcacatcaaagaaggagatgaggttaaatgtactggccgcatcttggaagtgccgattggccgcgaattggtgggtcgtgtagtaaatgcactggggcagccaattgatggtaaaggtcctattgatacaaaactgacagcacctattgagaaaattgcgccaggtgtaattgctcgtcaatcagttgaccaacctatgcagacaggcgtgaaagctattgactcaatggtacccattggtcgagggcagcgtgagttgattattggtgaccgtcagacgggtaaaacagctgttgcattggatgcaatcgtcaatcaaaaagggactggcgttgtttgcatttatgtagcagtaggtcaaaaagcatcttctattgcgaacgtagttcgtaaattagaggagtatggcgcaatggagcatacaattgtagttgcggcaacggcttctgaagctgcggcattacaatttattgcgccttatgcaggctgtactatgggtgagtttttccgagatagaggagaagatgctttaattgtatatgatgatttgtctaaacaagctgtagcttatcgtcaaatttctttattattgcgtcgtccacccggtcgcgaagcttatcctggcgatgtgttttatttgcacagccgtctgttggaacgcgctgcccgtatcaatgctgatgaagttgaaaagctaactggtggtgaggtaaaaggtaaaacaggttctttaactgcactgccaattattgagactcaagccggtgacgtttcagcgttcgttccgactaatgtaatttcaattactgatggtcaaattttcttagaaactgatttgtttaactcaggtatccgtcctgccattaatgcaggtatttccgtctcccgtgttggtggcgctgcccagactaaagttattaaaaaattaggcggtggtatccgtttagctttggcgcaatatcgagagctagcagccttctctcaatttgcatctgatttagatgaagccacacgcaagcagttgcagcatggtgaggtagttactgaattgatgaaacaaaagcagttcagtacattaaatacagctgagatggctttgaccctatgggctattaatgaaggttcatacggaaatgttcctgtttctaaagcattatcttttgaagctgagttcttgagttatgtgcgtactcaatatccaaaagttttagaaagcatcaatgagacaggtgctatgtctgatgataatgaaaaagccttaacagaagcgatgaagtctttcaaagcgtcttatgcacatacggcataagcggtaaagaaaggagtctagaatggctgttgggaaagagattctcaccaaaattcgtagtgttcagaatacacaaaagatcactaaagcgatgcaaatggtgtcaacctctaagatgcgtaagactcaggaacggatgcgtttggcgcgtccgtatgctgataaagtacgtttggtaatgggccatttggcacaaacacaagaaaaccacggtattaaattattgagcgagcgccgtgagatacgtcgcgctggttttattttaattactacagataagggtttatgtggtgggctaaatgcgaatgtgctaaagaaatttttagcacaaatgcaggattaccaagaacgtggtattgagactgatgtagtttgtatcggtagtaaaggcttagctacttgccagcgtattgggctaaatgtaattgccagcgtagtaaatttaggtgatacgcctaggttagaattgttggtcggttcattgacagagctgtttaagcggtacgaacagaacgaaattgatattattcatattgtttattctggtttcgtaaatactatgcgccaagagcctcgaatggaagtattactccctattgggcggaatactttggaggcagctcaagtcgaaggtcggggatataattgggattaccgttatgaacctacacctgttgctgtattggaatacctagttcgtcgttatttggaatctgtggtttatcaggcgttaagcgataatatggcttcagagcaggccgcacgtatggtagccatgaaagctgctacagataatgcaggtaatgcaattaaggagctgcgtttggtgtacaataaatcgcgccaagcggctattactacagaattgtcagaaattgttgcaggtgcagcggctgtatagcttgctgatttgcatttagaaattaggatgcgataatgagccaaggcaaaatcgtacaaatcatcggtgctgtagtggatgtggaattcccacgtgacgctatcccgcatgtttttgatgcattaaaattagttgaaaatgacctaaccttagaagttcaacaacttttaggggatggtgtagtgcgtaccattgcgatgggtagttcagatggattaaagcgtggtatggctgtgaataataccggagctccaattactgttcctgttggccgtgaaactttgggtcgtatcatggatgtattgggtaatccggttgatgaggcaggtccggtaaatgcatccaatacacgtgcgatccatcaagaagctcctaagtttgatgagctttcttcaacaacggaattattagaaacaggtattaaggttatcgacttgttatgtccgtttgccaaaggcggtaaagtaggtctgttcggtggtgccggtgtaggcaaaaccgtcaacatgatggaattgattaacaacatcgccaaagcacatagcggtttgtccgtgttcgcaggtgtgggtgagcgcacccgtgaaggtaatgacttctaccacgagatgaaagattccaacgtattggacaaagtggcgatggtttacggtcagatgaacgaacctccgggtaaccgtctgcgtgtagccttgaccggtttgacgatggccgaatacttccgtgatgaaaaagacgaaagcggtaaaggccgtgacgtattgttcttcgtggacaatatctaccgttacaccctggccggtacagaagtatccgcattgctcggtcgtatgccttcagcagtaggttaccaaccgacattggctgaagagatgggtcgtctgcaagagcgtattacctctactcaaacaggctccattacttctatccaagccgtatatgtacctgcggatgacttgactgacccgtctcctgcaacgacatttgcccacttggacgctaccgttgtattgagccgtgatattgcatctttgggtatttaccctgcagttgacccgcttgactctacttcacgccaactggatccgatggtattgggtcaagagcactatgacgtagcccgcggcgtacaatccactctgcaaaaatacaaagaattgcgcgatattattgccattctgggtatggatgaattgtcagacgaagacaaactgaccgtgatgcgcgcgcgtaagatccaacgcttcctgtcgcaaccgttccacgttgccgaagtatttactggttctcctggtaagtatgtgccgttgcgggatactattgccggcttcaaagctatcttgagcggcgaatatgaccatcttcctgagcaggcgttctacatggtaggtggcattgaagaagctgctgagaaagcaaaaaccttaaactgataggaggctggcatggatgtcatgcgagttgaagtggtaagtaacgaatataacatctattcaggcgaggccagctttgttgtggttccgactgttcagggtgagctcggtatttatccgcgacatgagccgattatgagtttggtacggccaggtgcattacggctgcaaattccaggtgaaaaagaagaggttttggtagcagtttcaggcggcgttttggaggttcaacctgataaattgaccgtattggctgacgtggctatccgtagtagtgaaatggatcaagcccgtgccgaagaagcgaagaaggctgcagaggcaggtattgccaaggctgcggacgacgaagctttggccaaggcgcatagtgcgttggctgctgctcttgcagaactcaaaaccctcgactatattcgctcaagaaaacatcaataatctatattttagattagataaaaagcacggcttgccgtgcttttattcaattctgtaattatttaattcattgatttaaaataaaatttattcatattttgaggttgtggctagattggtctcaaagatttaagtactgtaaaaataaatatcaaagaccggacaagattttattggggtaagaagaaggaagattaaattaacaccctcagaatcattttaattgcagataatgagtaataggacaaacgaggcagcttttaatggcctagtttaatggtgatgttgttctgttcttaataaaattaaactggataaatcaaaagttttttctctttgatgttggttcggatatattaagttgtctgagtaaggaaaaaaaattatgggaaaaatattgtgtttcgctgttgggctgctattgtcggcttgcgcgagcatgccaagcagtgaggcgctaaatggtgaatggctgccggaggaaattggtggaagtccgtttactgctcaagcgagtttgacatttgatagcgaacagcagttgctcagcagttatgccggatgcaatcggctgacaactcgttatagtgctgacaatgggaaattggatttcggttatacgtcatctacgaggatggcttgtgattccgaacatagcgaggcagagcataaaatcagccaagtgtttgttcaggctgagaagtttgggattcaagacggaaagttgttgattaaagacgggcaggggaatgttctactgcgcgctgtaaaatcgtcttaagcatttgtttaaaaatatgacggtaatacgtaatctcatggtgcagttgttttgaatgaccatgaggccgtctgaaaatcgaaaacggtaaaattagcaaacggcggcagaatgctttttatcttactttgccaaattgggtccaaacatattttcagacggccttccaatcaaatctgtcgaatgacgggcggcttgcaaataggcggccagcggatgtccgcagtccaacatacccagccgatggaataaatcggctgttaccaaaacggaatcgttcatcatttctccattgcacatcgccaatgcagcttcttccgcagacattaaagcaaacgacgccacttcaccgtcttgattttgcggcattacctcattcggcagtatcacatcgaaaatatgcaaacattcgcggtgcaatccgcgcgatacctgatgcaggctgatgcagcgtccggtgtattgcaagcggttgagaaccgcatccgtcagcccggcctcttcgcggccttcccgtttcgccgcttcccatatctgttctccggccgaaataccgccgcctaccaacgtgtccaacttgttgggatcgacggctttatgcggactgcggcgggcaatccaaaaatgcaggccttcttccgtaaccgccaaaccgttgatatgaaccgcatggctatataggccgagtgggcgaaaggcggagcgttcgagggcaaagaggatttgcctgccgtcggccgaccaaacgtcgaaacgttcgttgcgccacccgccgaaaaggccggcatcataccagtggagggcaagctgttccaactgcctgcccatttctatccaattgtccgtaaacagatgcaggccgtctgaatcttcgtgtagaggattaggccaatcctgaatcagatgttttcgccaaacttcattcacaaaacccaatgccaatccgttcaaccgcagcggcagccaatcttcggcatggtagcggaaagccgtttgcagggcggagagcaatccgtcctgcagggtggtaggcaatggaggcatggaggagtagggcaggtgcatggcattccttattcgccgacgctcggacgtgtaggcagataaatatcgaaacgggtggacttgccgctgtattgataggcaggcgtgcattgcgcgagcaaggcgcccaaccgaggccgcttgaccacaatgcgtttcgttgcgacatctcgggcggcggccaacaactccgcatcgtcggtgttttgcgccgaaccgattaattggtggaaataagccatttcctttttgacggcagccgatttttgccgttcgggatacatagggtcgagatagacgacatcaggcctgcctgccgcagccaaatccgacagtagctgcaccgcatcaccgtaatgcagcgtcatccgtttcgcaatggcagaggtttcttcagccgcccgtgcccgtctgaggccgtctgaaagcaggcaggcgacaaccggatgacgttcgataatcgaaaccggcaaaccttgtgccgccaaaacgaaggcatcgcgccccaaaccgcccgtggcgtcgataaccgacgggcaggccgtatggtttaccgcctttgcaatcagctcgccgccgcctttcaaacgtcggtattgcgcgccgccgccgacaaaatccacctgcacatggcccttttctcccgctttgcacaaactgatgccttcactatccgcatacaggtagaggccgtctgaaggaggatggtcatatatggagatgccgtatccgctgatttcagccagagtgtcgtcagatgcgccgtctgcggcataacagaaaaaattcatgatttccttggaatatatagaagggtaaatgagaaggccgtctgaagagtgacgaggcaacgcaaaatcgctgatacagaaaaatgcattaagcttctgtatcgaaaacgatatttctgcataatgggtttgaatttagaaaaaaatgataaacgatgccccttaaggctaagggccttaaggggcagagcgtcgcggcacatcttttcagacggccttattgtagcaacgtttctcatttcgcagtgcaacaatatgcgccgattctaaggttaaagtttaattaagtcaagcatttttatttgcatatttatctttctttctgatatattttatattgaaataattttggttattgattcataaatggagaaacaaatgactgtttttaaacccaatccactgaattacatactcggtctcgacatcggtattgcatccgtcggttgggcgatggtggaaattgatgataaagaaaatcctattcgtctgattgatttgggcgtgcgtgtctttgagcgtgcggaagtgccgaaaacaggagattcattggcggcgacaaggcgtttggcgcgcagcattcgtcgcttgatccgccgccgcgcccaccgtctgcttcgggcgcgccgcctgttgaagcacgaaggtgttttaaaccccgaagattttaatgaaaacggctttatcaaattattaccgaatacaccgtggcaacttcgcaccgccgcattggaccgcaaattgacacctttagaatgggcagcagttttgctgcatttggtcaaacatcgcggctatctgtcgcaacggaaaaacgagggggaaactgatgataaggaactgggcgctttgctcaaaggtgtggctgataatacccacgctttacaggcaggcaattttcgcactccggccgaattggctttgaataaatttgaaaaagaaagcggtcatatccgtaaccagcgcggcgattattcgcatacattcagccgcaaggatttgcaggcggaactggtcttactgtttgaaaaacaaaaagaattcggcaatcctcatgtttcagacgacctcaaaaacggtattgaaaacctgctgatgacgcaacgtcctgccctatccggtgatgccattcaaaaaatgttaggacattgcaccttcgagccggcagaaccgaaagctgccaaaaatacctataccgccgaacgttttatctggctgaccaaactgaacaacctgcgtattttaaatcaaggaaacgaacgtccgctgactgatgccgaacgtaccacgcttatggacgaaccatacaaaaagtccaagctgacctatgcccaagcccgcaaactgctgggcttggacgatacggcattcttcaaaggcttgcgttacggcaaagacaatgccgaatccgcaacactgatggaaatgaaggcttaccacgccatcagccgcgcactggaaaaagaaggtttgaaagacaagaaatctccattgagcctttctcccgaattacaagacgaaatcggcacggcattctccctattcaaaaccgatgaagacattacaggccgtctgaaagactgtttgcaacctgaaatcttggatgcgctgttgaaacacatcagcttcgacaagttcatccaaatttctttgaaagcgttacgccgaattgtgccgttgatggaacaaggcaaacgttacgatgaagcctgcgccgaaatctacggggatcactatggcgagaaaaattcggaggaaatgctttatctgccaccgattcccgccgacgaaatccgaaatcctgtcgtcttgcgcgccttatctcaagctagaaaagtcattaatgccgtcgtacgacgttacggctctcctgcgcgtatccatattgaaacggcaagggaagtgggcaaatcgttcaaagaccgcaaagaaatcgaaaaacgtcaggaagaaaaccgtaaagacagggaaaaagccgctgccaaattccgagaatatttccccaatcttgtcggcgaacccaaatccaaagatattctgaaactgcgcctgtacgagcaacagcacggcaaatgcctatattcgggcaaagaaatcgacttaggccgtctgaacgaaaaaggctatgtcgaaatcgaccatgccctgccgttctcgcgcacatgggatgacagtttcaacaataaagtgctggtagtgggcagcgaaaaccaaaacaaaggcaaccgaacaccttatgaatatttaaacggcaaagacaacagccgcgaatggctggagtttaaagcgcgcgtagaaaccagccgtttccctcacagtaaaaagcaacgggttctactgcagaaattcgatgaagaaggatttaaagaacgcaacttgaacgatacgcgctacgtcaaccgtttcctatgtcaatttgttgccgaccatatgcacctgactggaaaaggaaaaagacgtgtatttgcctccaacggacaaattaccaatttattgcgcggcttttggggattacacaaagtacgtgcggaaaacgaccgccatcatgctttggacgcagtcgtcgttgcctgttcaaccgttgctatgcagcagaaaattacccgttttgtacgttacaaagaaatgaacgcgtttgacggtaaaaccatagataaagaaacaggagaagtgctgcatcaaaaaacacacttcccgcaaccttggaaatttttcacgcaggaagttatgattcgcgtctttggcaaaccagacggcgaacccgaatttgaagaagccgacacgcctgaaaaactacgtgcgttgcttgctgaaaaattaccatctcgccccgaagccatacacgaatacgttatgccactgtttgtttcgcgtgcgcccaatcggaagatgagcgggcaaggccatatggaaaccgtcaaatccgtcaaacggctgaatgaaggtatcagcgtattgcgcgtaccgctgacacagttaaaactgaaagacttggaaaaaatggtcaatcgggagcgtgaacccaaactatacgcaggactgaaagcacgcttggaagcacataaggacgacccggtcaaagcctttgccgagccgttttacaaacatgataaagcaggcaaccgcactcagcaggtaaaagccgtacgcgtagagcaagtgcagaaaaccggcgtatgggtgcgcaaccgtaacggcattgccgacaacgcaaccatggtgcgcgtagatgtatttgaaaaagctggcaaatattatttggtaccgatttacagttggcaggtggcgaaagggattttgccggatagggcagtagtcgcttacgcagaagaggaaaactggaccgtaatggatgaaagtttcaaatttaaatttgtactttatgccaatgatttgattaaactaactgctaagaaaaatgaatttttaggctatttcgtcagcctaaatagagcaactggagcgattgatattcgtacacatgatacggatagtacaaaagggaaaaacggcattttccaaagtgttggtgttaaaaccgccctttcattccaaaaataccaaatcgacgaacttggcaaagaaatcagactatgtcgtctgaaaaaacgtccgcctgtccgttaaataaactcatccctgtttcagacgacctgaagcagggatttttcgtcgcacaaacacaaaggagaaaacacatgacatggcgcagcctgcttattcaaaacagcggcaaactgtcgctacaccgcgaacaaatgctgattcgtcaaaacggagaatcttataccgttcccttggaagacattgctgtcattgttgtcgaaaatcgggaaacactgattaccgccccgcttttatcggcattggcagaatatggaaccactctgctgacttgcgacgaacaattcctaccctgcggccaatggctgccttactcgcaataccaccgccaattaaaaaccctcaaactgcaactgaatatcagcgaacccttaaaaaagcaactttggcaacatatcgtccgccgaaaaatcctcaaccaagcatttgttgccgacgaaacaggcaatgacattgcggctaaacggctacgcgcattggctgctgaagttcgctccggcgatacagggaaccgcgaagctcaagccgctgccctctattttcaagccgtgtttggagaaaaatttacccgcaacgacaacaatgccgtcaatgccaatctgaattacgcctacgccgtgattcgggccgccgttgcccgatccctcgccttatatggttggttgcccgcactgggactgtttcataaaagcgaactcaatcccttcaatcttgccgacgactttatcgaaccattgcgcccgcttgccgacctgaccatactgaacctgaaagagcaaggtcgtctgaaaagcgaattgatgccgcaaaccaaacaagccttgatcagaatcctgcactcccaagtcggcatcgaacagcagaccttcagtacactggcagccatagacaaaatgatggcctcattccagccaagcctcgccgccaaaaacgtcaaactgctgaaactgcccgaaatcctgcctttgaaagaatatcaatatgagtgaggcaaagtttatgcggattatcgtctttttcgacctgccggttaccaccgtcgccaaacgcaaagccgccaaccaattccgacatttcctattgaaagacggctatcaaatgctgcaactttccgtatacagccggattgttaaaggcagagatgcgttacaaaaacaccacaacagactatgcgccaacctgccgcaagaaggctcgatacgctgtttggaagtaacagaaaagcagtttgccgccatgaaactgcttttaggtgaactcaaaacccaagaaaaaaaggtcaattcagaccaattattgctgttctaatctccgttttttagacaaaagaaagcggggaatccttataaaataaggattccccgctgaggcattgtagcactgcgaaatgagaaagggagctacagcccgtgcaggacggcaagccgtggacagcccattgtagcactgcgaaatgagaaagggagctacagcattgcaaaagcatttaggctggaaacgcaaattgtagcactgcgaaatgagaaagggagctacagctgtaattggttttgggtgtaatgttttaacattgtagcactgcgaaatgagaaagggagctacagctgtaattggttttgggtgtaatgttttaacattgtagcactgcgaaatgagaaagggagctacagcgttttgcgactgggtgcacatttttgtaagattgtagcactgcgaaatgagaaagggagctacagcgcccaaatcatagatttctttgatcgcaagattgtagcactgcgaaatgagaaagggagctacagccggttcgctcgttgtgatagacgaagcacaattgtagcactgcgaaatgagaaagggagctacagcgaagttatcaatggttatgagaaaaagcctattgtagcactgcgaaatgagaaagggagctacagcaaaccctttgcaagttgcctaccagcttgcattgtagcactgcgaaatgagaaagggagctacagcgcaagtcggaacatgcggaacggcttgcctattgtagcactgcgaaatgagaaagggagctacagcgccgcgccgcgcatatagtccacatgccccattgtagcactgcgaaatgagaaagggagctacagctggctcgctggttgtgatagacgaagcacaattgtagcactgcgaaatgagaaagggagctacagcctatacttcaaaatcaaggaagaccgccgcattgtagcactgcgaaatgagaaagggagctacagcaagtagcctctgaacaactttgccaaatctattgtagcactgcgaaatgagaaagggagctacagcatattatgggcggctaaaactaaagagccaattgtagcactgcgaaatgagaaagggagctacagccaattggagagcataattccagcatcttttattgtagcactgcgaaatgagaaagggagctacagcaaggactattgatagcggctaagttatacaattgtagcactgcgaaatgagaaagggagctacagcatcaaagtaatggccgttggaaataaagcaattgtagcactgcgaaatgagaaagggagctacagccaatgcgggatgccatgcaccctttgttgaattgtagcactgcgaaatgagaaagggagctacagcgtcacaggtgttgtaaaacaaacatcatctattgtagcactgcgaaatgagaaagggagctacagcaaacggaaatgaacaaggtaataaattggaattgtagcactgcgaaatgagaaagggagctacagcgtcgaattgacttcaattccgtgggagaatattgtagcactgcgaaatgagaaagggagctacagcccaaaagctgaaaagtccgaaaaccaacgcattgtagcactgcgaaatgagaaagggagctacagcccctagcaactgcgccttttgcggttcagaattgtagcactgcgaaatgagaaagggagctacagagacctttgcaaaattcctttttcccgacagccgaaatctaattaaagattttcggctgtttttgtttcaaatatccactgattctactcaaataccccccccttaatcccccttggatacctgataatcaggcatctgggccgccttttaggcagcaacaggcacacttagcctgttagccgctttcaacaggttcaaacacatcgccttcagatggctttgcgcactcactttaatcaacccgaaataggctgcccgcgcatagcggaatttacggtgcagcgtaccaaagctctgttcgaccacataacgggttttcgataaatagagacctttgcaaaatccccccaaaatcccctaaatgtcttgatgggaatttaggggattttggggggattttgcaaaggtctcctacagcttaaaatcaagccgtctgaaaaagtgcgagcataggtatggggagtgaggctgattatcttaatataaaggaagaagatttttcatgaggtgaaaccgattatcgtggatggcgaacggcggattccaagccgaaaacctgtggaatccgccgtttgcagtggcggcccttaaggccgcgattccgtttagcgtttggcaaagccctgtttgcgcaggtagtctagcatgaaggggcgtaccggccgacccagggtgttgcgcacttgttgcgcccaatccaaatctttgccgctgcgttcgcggtagtaggttttgacggtttcgttgtagtcttccaaaacggtttttgccgccggacggtagcggttttccgataccagcgtctccaacggcaggcgcgggcgttgcaacgggtcttggtcgggatggccgaggcacacgccgaatagcgggacgacatgttcgggcaggccgagcagttcgccgacgcgggcgatgtcgttgcggatgctgccgatatacaccgcgcccaagcccagggattcggcagtcagcaccatgttttgcgccataatgcccgcatcgattgcgccgattagcagaacttcggtccaatcggtttgaaccgcatcgtctagcgcgtgatggcgggcggcgtcgatgcagaaaaccagaaattcggcgcagtgttcgacgtaggcgtgtcccgcaccgccctcggcggcgcaaactgcgcgcaattctttgcggacggcgatgtcggttacgcggatgatgctgccgttttgcagatagctggatgtggacgacgcgcgggccgcctccaaaacggcggacagcatttcgtcggaaacgggttcggcggtaaagcggcggatggaacggtgcgccagtgcggtttgcagggcgggacggctgttcaaagtcatggcttgctccttgtcagatggatagggaaggggattgtaacagaataggccgccgccccgccgaagaggccgtctgaaacgccgccggacaatgttttcagacggccccaacctgcccgcgggcaggcttgatatacattaaaattttatccgcccgtgcccacgatggccgctttttttgttatccttgccccgtctttcaaaagtggaatgaaaaatgcggcttattacggcatgccgcaactttccgcgcgaattcacctattttattgaggagcagtgaagatgaaccggcattcggatattgtcgtcgtcggcgcagggccggcgggattgagtttcgcacgcaccctggccgacagcggcctgcggattaccatagtggaaaaaagcccgctcgaaagcatttccaacccagcctacgacggccgcgaaatcgccctgacccacctctcgaaagagattatggagtgcctgggcatgtggcagcgcgtacccgaaaatgaaatttacccgctccgtgatgcgaaagtttggaacggctcctcttcctaccaactccatttcccgcagcctacacaggcgcgcggcggtgcaaccgaccgcttgggcaacctgatttccaaccacaacatccgcaaagccgcctacgacgcagtggccgaacaagacaatgttaccctgctggcaggcgtgggcgtgaaagaagcccgcaccgatgccgacggcgcgtatattacattggataacggcgaagaactgaccgcccgcctgctggtggccgcagacagccgtttttcgcaaacccgccgccaaatcggcatttctgccgacatgcacgacttcggccgcaccgtcatcgtctgccgcttcaaacacgaaatatccaactgccacaccgccgtcgaatttttccaatacggccgcacactcgccctgctgccgctggaagagcacctgaccaactgcgtcatcaccatagacagcgacaaagcgggcgcgctgcttgccatgtcgcccgaagaattggccgccgatttggaaaaacaactgaaaaacaaactcggcaaaatggaaaaaaccggcaccctgcatacctacccgctggtgggcgtgcatgcccgccgcttctgcaccacccgcgccgcccttatcggcgatgccgcagtcggcatgcaccccgtaaccgcccacggtttcaacctcggcttggaaagtgccgacatcttgggcaaactcgtcatgcaggcggcacaaaacggacaagacatcggcgcaagctccctcttggaacgctacgatgccaaacaccaactccacacccgcccgctctatcacggcaccaacgcgatggtcaaactcttcaccaacgaagccgccccggccaaactgctgcgcaacctcgtcctgcgcgtcagcaacaacctgccgccggtgaaaaaattaattacccgccagcttaccggctgatgtgaaatgaatgaggccgtctgagacaatcttttcagacggcctaaatattatttggacagtattccgaacgatctgaaaggaaaaagaaatgttgctgacacgtctcgccgccctatgcctgaccgccgccctatgcgcctgcggcggcacacaaaccgaaaccccatcccaaccggaaaaaccggccgcagccccgacctcggaagcatctgctttccctgccgtgccgtctgaaaacaccgctgccgcctcatggaaaacggctgccgaattccgcgcgcccaacggtttgcgctacctctatgtcgtcatcgacacccccgcaacccgcgatgacctgattgcggttgcgggtgacatacaccgcaaagaacccgatgcatggctgtttttattggatgccgaagaaaaaatacccgaaatgctggcggctaaccgtagcggcgatatgtcttccttcccggccgaatgggtcaaacaacatttgtcgggcagcacgtcgctgatgttgatgcctgacggaaaacgccgatgggccgtgttcgaaggccaatcgcgcagcgagccgattgccgaactgccctgcatagaaggacaggggatgtgtaccgattaggtttgtgtcagcctcgaacaaattctgccgtatccaccgaaaaggccgtctgaaaacatattttcagacggccttcccctatcccctcaaatcaatccggcctgcttcaactcgttttttagataagcataataaaccggcgcgatgatgatgccgccgatgccgaaaatccgctcgaacaccaccattaccagtagtaattcccacgcactcgattcgatttccgaaccgataatcttcgcattcaaaaaatactccagcttgtgcaccaccaccaaaaacaccagcgaggccaccgccacatacagcgacgcacccaagctcaaaataataatcaccgtattggacaccagattgcccgccaccggcaccagccccaccacaaacgcaatcaccaaaacagtgaggcggaagggcagttccaccccgaacgcgggcagaatcagataaaggtacacggcggtaacggccgtatcaatcaaagaaatcttcacctgcgcgataaacacacgctcgaagctgctttggaaattgacgatgcgccgcaccagctccgccttgaagggcggcatccggcggcgtttcatacgggcgtttagacggtggaagctgagcagcgcgccgacaatcacaccgatgatgatgtaaacgaacaccgtcaggctgtttttactgatgcgcgtcagcgtatcgccgtattccttcagcagcccggccgccgccgttttgatttcggccagattgttcggcagcatattggctaccgatgccggcaggtcggcactgtttttcgtatcctcgataatcgccgccagcttgcccatcatcaccgcgatatggccgccttgaatcaagtggtacacgccgaaagccatcagcacaatcgccagcaacaccaagcctatggtcagcgtggccgacaacagattgacattatgcgcgttcagcgagcggcgcaggaaggcattgcgccgaaacagccggcggcggaaccacaaaatcaggccgttggttcgggtaatgaaaatataggtcaggataaccgacagtagcagcggcaggaaatgaaagtgcagcacggccaacagtgcggcggcagtgagaaaataggacaccgtgcggagtttcggcgtatcggcgggaatgcgggtcgtcatatcaatcttttcgttgggcatacagtcaggcccggccatgcgggcgggcaggcattataccgcgtacgagccgtctgaaagcagggcggacgaccgagttttcagacggcctctttctcgcgcgggcaaaacggccgttgccacacagatttattatgtatatgataacggacttagtgccggtgtagctcagtcggtagagcagcgcattcgtaacgcgaaggtcgggggttcgattcccttctccggcaccatttctaccgataaaaggccgtctgaaaaatggctttcagacggcctttgcatttattggggcgtttgttcaaggttgaggacttggaaagtttcttttaggatggataagactccatatatgcctcttttttgagaaacgatatatttatttttaaagaaatgatggtctatatatgtttgccaatattccttatcctcccattcttgaaaacgtgcatcttcaattttgctatgcttaattaacattacagcaataatatcagcacaattaaaaccataactctctattggagtatcaggccaagactgaacattgaataatctagcaaaatctttggcatccgtgcgatttttattaatactggcaattaaatccgaatggaaacagaaaatgaacacaccagtaattcgcaacaatataacttgaggaacactcttatttatatttagcccttgacttaaagaatggtatatctctaaaaatcgaacaaatcgttcagtttctctaagtgatatatcgtgtcgcgcaatcatatctccaatgaaattgataaagcttatgttttcaggagattcataaattaaaccttgtagttcattgcatatatgactttttcgtattaactgtttgaaatgttcaactgcagccaaagctcggtcttcctcaaaccgagccacaaccttatccggcaaggcaaagctatacttcaaaaacttatccaaatatttttgcgcatctacttccatcccataccgatgattaattgctgcgcgcagttgtttggtgttcgttaccagcacgactttgacgttttcaacatcaaagacatgcttgatgacttccagcatatcgacagcgtaatcggggcggcagcggtctagttcgtcgataaacagaataatcggtttttcctctgcaaattcttttaggcaggctttgagcgtttccagatttttttccgcttcgatttgctctttcaacaaggtttcgacggttgcatcaatagttgcatcaatggaatggctagcaagtgtggtggcagcaccagctacggttgccgccgcattttttgcttcttgattatcatttataatttggctcattccttctgctaaatcttccatattttgctttaggacatgaccaaccgctgccttagcaacggttttcatcacaaatcctgcggctttcgcgactttcttcgccatttctttgcgctgttcagacggctgctcgccagtatcttcaggcgtacatgctttgatgatttcggcaagcaatgccagcaaaggctctccgctatggtctgaacggaaggcatcgatatagacgggttgataatcgggatgttgctgctgcatgagccgaatcagcttttggcaaaattcggttttgcccgttccccagccgccgtcgatgaccataggggaaaggtcgatatctgaggtaagcagcctgatgatgttttcggctatcggcttacgcttgaattcgtcttgtgtatcgaaagtgggtttttctaaagtttgagtttccatgccatccctttgtttaatcataaattcaaataagaatacccgcatcgtcattcccgcgcaggcgggaatccagaccttagccattcaggaatgtttagagattgccgtaattttaaacttctggattcccgcctgcgcgggaatgacggcataggtatgtcttggtttaatcatatggatatgttctgatatttaaaaggccgagacctttgcaaaattcctttttcccgacagccgaaatctaattaaagattttcggctgtttttgtttcaaatatccactgattctactcaaatatcccccccttaatcccccttggatacctgataatcaggcatccgggccgccttttaggcggcaacaggcacacttagcctgttagccgctttcaacaggttcaaacacatcgccttcagatggctttgcgcactcactttaatcagcccgaaataggctgcccgggcatagcggaatttacggtgcagcgtaccgaagctctgttcgaccacataacgggtcttcgacaaataccggttgcgcttcggttgcgcttccgtcagcggacggttgcggtgggctttgcgcataatgccgtccagtaaccgatgttctttcagatgtt

SEQ ID NO: 3157 - DNA, 23249 bp, synthetic construct
  source 1..23249: mol_type = other DNA
  misc_feature 1..23249: note = Synthetic
tggttatcagcgcaatcgacgccgaataaacatcagtacttaaaaaggaaatatcgtgtccaaaatcatcgtagtaacttcaggtaaaggcggcgtaggcaagaccactaccagcgccagcatcgcaaccggcctggccctgcgcggccacaaaactgccgtaatcgacttcgacgtcggtttgcgcaaccttgacctgattatgggttgcgaacgccgcgtcgtatacgacctcatcaacgttatccacggcgaagcgactctcaaccaagcccttattaaagacaaaaactgcgaaaacctctacatcctgcctgcatcgcaaacccgcgataaagacgcactgacccgcgaaggtgtagacaacgtgatgaaagagttagccagcgaaaaaatgggcttcgaattcatcatctgcgactctcctgccggtatcgaacaaggcgcactgatggcactctactttgccgacgaagccatcattaccaccaacccggaagtatccagcgtccgcgattccgaccgtatcttgggcattttgcaaagcaaatcccgcaaagcagaacaaggcagcactgttaaagagcacctgctgattactcgctactcccctgagcgcgtagccaaaggcgaaatgctgtctgtacaagacatctgcgacatcttgcgtattccgttgatcggtgtgattcctgaatcacaaaacgttttgcaagcttccaattccggcgaacctgtcatccaccaagacaatgccgcagcagcagaagcctataaagacgttatcgcccgcctcttgggtgaaaaccgcgaaatgcgtttcctcgaagctgagaagaaaagcttcttaaaacgactgttcggaggttaatacatgtcactgctcgatatgctgttcggcagaaagccgaaaaccgccacagtcgcgcgcgaccgcctgcaaatcatcatcgcacaagaacgcgcacaagaaggccaagctccagactatctgccgaccttgcgtaaagagttgttggaagtcctgtccaaatacgtcaacgtatcattggacgacatccgcatctcccaagagaaacaagacggcttggacgttcttgagctgaacatcaccctgccggaacaaaaaaaggcttaacacatgaccttgaccgaattgcgttacatcgtagccgtcgcacaagaacgtcacttcggacgtgccgcacgacgctgctttgtcagccagcccaccctctccatcgccatcaaaaagctggaggaagagctgtcggtatccctgttcgaccgtagcagcaacgacatcatcacgaccgaagcgggtgagcgcattgtcgcccaagcccgccgggttctggaagaagcagaactcatcaagcaccttgccaatgaagagcaaaacgaattggaaggcgcattcaaactcggcctgattttcaccgttgccccctaccttctgcccaagctcattaccgcgctgcgtgaaaccgcgccgaaaatgccgctgatgctggaagagaactatacccacatcctgaccgagtcgctcaaacgtggcgatgtcgatgcaatcgtcgttgccgaaccgttccaagagccgggcatcgtgaccgagcctctgtatgacgaacctttcttcgtcattgttcccaaaggccatcactttgaagaactcgatgccgttacgcctcagcttttgggcgaagaacaagtgttgctgctgtccgaaggtaactgtatgcgcgaccaagtgttggcaagctgttccgaattggcttccaaacaaaaaatccaaggtttgaccaataccctgcaaggcagctccatcaacaccatccgccacatggttgccagcggtttggccatcagcgtcatgccggctaccgccttgaccgaaaacgaccatatgcttttcagcattatcccgtttgaaggcaatgcgccgcaccgccgtgtcgttttggcctatcgccgcaactttgtccgtccgaaagcactgactgctttgcgcactgccattttgcaatcgcaactgaccggtgtaaccttcgtcaacgaataaaccgcaaaacaaaaggccgtctgaatgttcagacggcctttttatttctaaccgaataaaggattaatagtgggtatgaacctgactgccgataacaccacccaaagccgcaccacccaaggtagagccggtatcaccaccaatcaagttacctgccacgccacccaataccgcaccagcagcagtgttgcgttgggtttgggtcatattggcacatgcacccaaagaggcggccagcatgatcaaggtcacagtttttgcaaaagttttcttcatggtttgattctccatcagggtttaagctgtatatggagcagtatggcacaacctttcattaatatattttctgataagtaaagacagattaaactaagataatgcttttgatgaacggttaacttcaaaaacaaacggcaattccaatagaatatttataaaatttaatatatttggcataaaattgcgcatacatcaaccgcattcggtagtgatacaatgacaacttgtctgaactaccgggaacacccgtcatgagtacctacgcactggcacacatcatccacgtttattgcgcgattgcctttgtcggcggcgtatttttcgaaatgctggttctctccgttttgcacaccggccgcgtttcgcgtgaatcgcgtcgcgaagtcgaacgtgccatgtcccatcgtgccgtccgcgtgatgccgattgtcgtcatcaccctttttatcagcggcatcgtcatggtgtacaaccgttatctgccaacgctgcaccatcctctcgacagcgccttcagcattatgttgagcatcaaaatcctgttggcagtaagcgttttggtgcattttgccatcgctgttgtcaaaatggcccgacacaccctcaccgtcggctggtcgaaatatatacacgccgttgtattcagccatatgctgtttatcgtcttttttgccaaggcgatgttctacctgtcttggtaaaccttacccataccccacacacaaggattttttatgacccaatacccgtccgtcggctcgccgatgttttacggcatcttctttattgccgtcttaatcatgatcgccatcgatatggtatcgctgaaaaaaaacggcacccacaaagtcagtatcaaagaagccctcgcctggagcggcatttgggtagccgtatcctgcgcatttgcaggctggctctattttgaactggcgggtaatccgacttacggggccgttgtcgccaaagaaaaagtcctcgaatttttcaccggctatgtacttgaaaaatcccttgccgtcgataacatcttcgttttcctgatgattttcggctacttcaaagtcgaacccaaattccaacaccgcgtcttgctctatggcgtattcggtgccatcgtcctgcgcgccattatgatcttcatcggcgcagccttggtacaacaatttgaatggattttgtacctcttcggcgcattcctcttatacaccggcattcatatgatgaagcccgaagccgaagctgaagaagacctttcccaaaacaagatcctgactctgctcaaaaaagtcatcccgaccagccaacagtttgacggtgaaaaattctttaccatcgaaaacggcaaacgcatcgctacaccacttttgctggtattagttatgatcgaattgagcgacgtcatcttcgccgtggacagcatccccgctatttttgccgtaacgaccgaccctttcatcgtcctcacttccaacatttttgccatcttgggcctgcgtgccatgtactttttgctggcagactttgccgaacgctttattttcctcaaatacggcttggctttcgtgttgagctttatcggtatcaagatgctgattatgcactgggtacatatcccgatttccatctccctgtccgtcgtcttcggcgcactgggcgcgtccatcctgacttccttggtgtacacacgtcagcaagagaaaaaataatctgccgatataaaaaggccgtctgaacatttcagacggccttttcaaatatcaaacaccagcttatttagcagcatctttcaatttgtcggcagcttcttgagtcgcatcggctgctttacccatagcgtctttagctgcgtctttggcagcatccttagcatcagaaaccgcttctttagcttcttcaaccgctttaccggcagcatctttagcgtcagaaactgctttatctgcagttgctttagcatctgcagcagcgtctttaacatcagaaacagcttgctcagccgcacctttggcttcagaagcagcagcatcaacagcagaagctgcattttcagccgcagcgtttacatcggaagcaacagcagaagccgcctcttgggtttcttttttcgcttcttgtgtacacgccgccaagccggctaccatcattgcagcaatcaataattttttcatgttgtatatcctttggtctaaaaaatatctgtcaaaactgacagaccaaaaaatcataacataataaatgctcaaaaaagggagaattaacgccaaataacagccggtttacgttttttgaaaaaaatttcaaaaaaacagttgacgaaaagaaacaagctacctataatgcacagcttatcgggtcgttagctcagtcggtagagcagcggacttttaatccgttggtcgagcgttcgaatcgctcacgacccaccaaatatgaaaacctgctttgaaaaaagcaggtttttttcatgttctccgtaataatctacttctcctacaaatatacttgtatgccagacaatttaagcatacactgactacacacgactacaacaacaggagaaccctaaatgaaacaattggccatgtacatcaacggacgctttgaaaatgatttcaacggcgaatggcgcgacgtattgaacccttccaccgaagaaaccatcgcccgcgaacccaaaggcggcaaagcggacgttgaccgtgccgtagcggcggcgcgtgcggcgcaaccggcatgggagcggctacctgcggtcgaacgcggcgcgtatttgcgcaaaatcgcccaaggcatacgcgaacgcgccgacgagctgaccgacaccattgttgccgaaggtggcaaaaccaaagacttggcgcgcgttgaagtcatgttcaccgccgactatctcgattaccaagccgaatgggcgcgccgttacgaaggcgaaatcatccaaagcgaccgtccgcgtgaaaacattttattgttcaaacgtccgctgggcgtcgtggcaggcatcctgccgtggaacttccccttcttcctgatcgcccgcaaaatgggcccggctttggtaacaggcaataccatcgtcgtcaaaccaagcagcgttaccccgattaactgccacatctttgctgaaatcgttcatgcttcaggcttacctgcaggcgtattcaacgtcgtcaacggcccgggcgcagaaatcggcaatgccttggcatcacatccgcaagttgatatggtcagcctgacaggttctgtcgatgccggccgtcaagtgatggaagccgccgccaccaacatcaccaaagtctcactggaactgggtggcaaagcccctgccatcgttctgaaagatgccgacttggatctggccgtcaaatccatcttggcttcacgcgtgggcaataccggccaaatctgtaactgcgccgaacgcgtgtatgtccacagcagcctgaaagtcgcgtttatcgaaaaaatgaccgccgccatgaaaggcgtacgctacggtaatccggccgaagccgagcccggcgcactggaaatgggcccattgattgaagaccgtgccgtaaaatccgttgccgaaaaagtcgaacgcgcagttcgacaaggcgcaactttggtttgcggcggcaaacgtgctgacggcaaaggctacttcttcgaacctaccctgctgacagatactgacaacagcatggacatcatgaaggaagaaaccttcggccccgtcctgccggttgccactttcgacacactcgatcaagtcatcgctttggcaaacgacagcgaattcggcttgaccagctccgtctataccaccaatctgaatgaagcgttttatgtaacccgccgcctgcgtttcggcgaaacctacatcaaccgcgaaaacttcgaagccatgcagggcttccatgccggttggaaaaaatcaggtatcggcggcgcggacggcaaacacggtttggaagaatatctgcaaacccaagtcgtttatttggaaaccgatatctaactgccgatactgcccttcatgaaacaaaaggccgtctaaaaccgatttttcaggtttcagacggcctttctgcctttatagaaaaaaacaccgacatcgcgtaaaatagagccaatttttcactttattcaggccgtctgaaaactccggcagcctgactcatttttccggaaaacaccatgagcgaacaaaacaatcctcaaatcgagccgcagttggacgaaaaccaaatcatcgccctgcgccgcgagaaactgcacaacatccgcaaagaacgcaacgcctaccctaacgatttcaaacgcgacagctttgccgccgacctgcacacccaatacggtgaaatcagcaaagaagaactcgacccgcaaggcattcccgtcaaagtggccggccgcatgatgctcaaacgtcaaatgggcaaagccagcttcgccaccattcaagacgttaccggtcaaatccagctttatttgaacaacaaaggcgtgagccaagaagttttggacgacttcaaccactgggacttgggcgacatcgtcggcgcggaaggtactttgttcaaaaccaaccacggcgaattgaccgtgcgcgtatccaacatccgcctgctgtccaaatccctgcgtcctctgccggacaaacacaaaggtttgagcgatcaggaaaccaaataccgtcaacgctacgtcgatttgattgccaacgaagaatcgcgcaatacgtttatcaaacgcagccaaatcatccaatccgtgcgcaatttcatggtgaacgagcattatctcgaagttgaaaccccaatgatgcacccgattccgggcggtgcgacagcaaaaccattcgttacccaccacaatgccttggatatcccgctctacctgcgcatcgcgcctgagctgtatctgaaacgcttggttgtcggcggtttggaacgcgtgtttgaaatcaaccgcagcttccgcaacgaaggcatgtctgtgcgccacaaccctgaattcaccatgatcgaattctacgaagccttctccgactacgaacgcatgatgcaaatggcggaagacatcatccgcaacgcctcacgcgcggtaaacggcacggcaaaaatcagctacaacggcaaagaagtcgatttggaaagcccgtttgaacgcctgaccattctcggtgccatcaaaaaatacaatccgcactacaccgatgagcagttgaacgatgaagaatggctgaaaaaagaaatcgtcaaacacggcgaaagcctgcctccttctccgggtatcggcagcctgcagcttgccttgtttgaaggttgcgccgagggcaaactgtggaacccgactttcattatcgactaccctgtcgaagtatcgccattggcacgcgcatccgacagcaaaccaggtttgaccgaacgcttcgaactgttcgtggtcggtcgcgaactggcaaacggctactccgagttgaacgatccggaagaccaagccgaacgcttcaaggcacaagtggcacaaaaagacgccggcgatgacgaagccatgcactacgatgccgactacatccgcgccatggaattcggcctgccgccgaccggcggctgcggcatcggtatcgaccgcttggtaatgctgctgaccgattcgcaaaccatccgcgacgtgattctgttcccgcaaatgcgtcccgaataacgcattaaaataaaatcaaggccgtctgaaaacaagactctgttttcagacggcctttttgttcaaatatgtaaaacggtagaattcaaatcgataattcctttacatcataataataaaattccatgataatcaaaagcataatataaaaaagaatatgtaaacgtttttcagtttgttgacagtctgctagaatacatccagttacagacagcctccacacacaggccgtctgaaaattcagaaactctgaaaggtttgtatggatcaatttttcgaacagcttcacggctgggtaaacgccatcaacgatccaatgtggtcgggattggtatatatgcttttaggcgcaggcctctttttcaccgttaccaccggttttgtacaattccgcctcttcggccgcagtatcaaagaaatgctgggcggtcgcaaacaaggtgatgatccacacggaatcacaccgttccaagcattcgttactggcttagccagccgcgtaggcgtgggcaacatcgccggcgtggcgattgccatcaaactcggcgggccgggcgcggtattctggatgtgggtaaccgccttaatcggcatgagttcggcgttcgtcgaatcttcactggcccaactctttaaagtccgggactacgacaaccaccacttccgcggcggtcctgcctactacataactcaaggcctgggacaaaaatggctgggcattttgttcgccctgagcctgattttctgtttcggctttgtatttgaagccgtacagaccaataccatcgccgataccaccaaagcggcatggggctgggatcaacactatgtcggtgtcgccctggtcattctgactgcccctattatcttcggcggtatccgtcgcgtatctaaagccgcggaaattatcgttccgctgatggcggttttatatctcgttatagcactcttcatcattgctaccaatatttccctgattcctgatgtgttcggtcagattttctccaacgcgttcaactttgattcggctgcaggcggtttcctcggcggtctaatttcgaccaccatgatgcagggcatcaaacgcggcctgtattccaatgaggcgggtatgggttccgcgccgaacgccgcagccgcagccgaagtaaaacaccccgtctcccaaggcatgattcaaatgctgggcgttttcgtcgataccatcattgtctgctcatgcaccgcctttatcgtcttgacctatcaacagccttacggcgacctgagcggtgcggcgctgacccaagcggcaatcgtcagccaggtaggcgaatggggagcgggcttccttgctgccatcctgtttatgtttgccttttcaaccgttatcggcaactatgcctatgccgagtccaacgtccaattcatcaagagccattggctggttaccgccgttttccgtatgctggttttggcatgggtctacttcggtgcagttgccaacgtacccttggtatgggatatggcagacatggccatgggcatcatggcatggattaacctcgttgccatcctgctcctgtccccacttgccttcctgctgttgaaagactacacagccaagctgaaaatgggcaaagacccagagttcaaactctctgaacaccctggcttgaaacgcaaaatcaaatccgatatctggtaaaaccaaaggccgtctgaaatttcagacggcctttttaatccctgccatttagacaaaacgatgccccttaaagcagaagccttaaggggcagagcgttgcggcacatcttttcagacggccttattgtagcaacgtttctcatttcgcagtgcaacaatatgtccaaattctaattccaaatcggcacccagtcaagcatttcatttgcatggtaatacttacctaggatatatttatacttactaaacatcatattacggagaaactgatggctgcattcaaacccaattcaatcaactacatcatcggcctcgatatcggcatcgcatccgtcggctgggcgatggtagaaattgacgaagaagaaaaccccatccgcctgattgatttgggcgtgcgcgtatttgaacgtgccgaagtactgaaaacaggcgactctctcgcagcggcaagacgcttggcacgcagcgtccgccgcctgacccgccgtcgcgcccaccgcctgcttcgggcccgtcgcctattgaaacgcgagggcgtattacaggctgccgattttgatgaaaacggcttgattaaatccttaccgaatacaccatggcaacttcgtatagccgcattagaccgcaaactgacgcctttagagtggtcggcagtcttgttgcatttaatcaaacaccgcggctatttgtcgcaacggaaaaatgaaggcgaaactgccgacaaggagcttggtgctttgcttaaaggcgtagccgacaatgcccatgccttacagacaggcgatttccgcacaccggctgaattggctttaaataaatttgagaaagaaagcggccatatccgcaaccagcgcggcgattattcgcatacgttcagccgcaaagatttgcaggcagagctagttttgctgtttgaaaaacaaaaagaatttggcaatccgcatatttcagacggccttaaagaaggtattgaaaccctgctgatggcgcaacgccctgccctgtctggcgatgctgttcaaaaaatgttggggtattgcacctttgagccgacagagccgaaagccgctaaaaacacctataccgccgaacgtttcatctggctgaccaagctaaacaacctgcgtattttagagcaaggcagcgagcggccattgaccgataccgaacgcgccacgcttatggacgagccatacagaaaatccaaactgacttacgcacaagcccgtaaacttttggatctagacgataccgcctttttcaaaggtttgcgctatggtaaagacaataccgaagcctcaacattgatggaaatgaaggcctaccatgccatcagccgtgcgctggaaaaagaaggattgaaagacaaaaaatccccattaaacctttctcccgaattgcaggatgaaatcggtacggcattctccctgtttaaaacagatgaggatattacaggtcgtctgaaaggctgcttgcaacctgaaatcttggatgcactgttgaaacacatcagcttcgacaagttcgttcaaatttctttgaaagcgttgcgccgaatcgtgccgctgatggaacaaggcaaacgttacgatgaagcctgcgctgaaacctacggggatcattatggcgagaaaaattcggaggaaatgctttatctgccgccgattcccgccgacgaaatccgcaaccccgtcgtcttgcgcgccttatctcaagcacggaaagtcattaacagcgtggttcggcgttacggctcccctgcccgtatccatattgaaacagcaggggaagtaggaaaatcgtttaaagaccgcaaagaaatcgaaaaacgccaagaagaaaaccgtaaagaccgtgaaaaagccgccgccgaattccgagagtatttccccaattttgtcggcgaacccaaatccaaagatattctgaaactgcgcctgtacgagcaacaacacggcaaatgcctgtattcgggcaaagaaatcaacttaggccgtctgaacgaaaaaggctatgtcgaaatcgaccatgccctgccgttctcgcgcacatgggacgacagtttcaacaataaagtgctggtattgggcagcgaaaaccaaaacaaaggcaaccaaaccccttacgaatacttcaacggcaaagacaacagccgcgaatggcaggaatttaaagcgcgtgtcgaaaccagccgtttcccacgcagtaaaaaacaacggattctgctgcaaaaattcgatgaagatggctttaaagaacgcaatctgaacgatacgcgctacgtcaaccgtttcctgtgccaattcgttgccgaccatatgctgctggcaggtaaagggaaaagacgtgtctttgcatccaacggacaaattaccaatctgttgcgcggcttttggggattgcgcaaagtgcgtgcggaaaacgaccgccatcacgccttggacgccgtcgtcgttgcctgctcgaccgttgccatgcagcagaaaattacccgttttgtacgctataaagagatgaacgcgtttgacggcaaaaccatagataaagaaacaggagaagtgctgcatcaaaaagcacacttcccgcaaccttgggaatttttcgcacaagaagtcatgattcgcgtcttcggcaaaccggacggcaaatccgaatttgaagaagcggatacccccgaaaaactgcgtaccctgctcgcagaaaaattatcttctcgccccgaagccgtgcacgaatacgttacgccactgtttgtttcacgcgcgcccaatcggaagatgagcgggcaaggccatatggagaccgtcaaatccgccaaacgactggacgaaggcatcagcgtgttgcgcgtaccgctgacacaattaaaactgaaagacttggaaaaaatggtcaatcgggagcgcgaacctaagctatgcgaaggactgaaagcacgtttggaagcacataaagacgatcctaccaaagcctttgccgagccgttttacaaatacgataaagcaggcaaccgcacccaacaggtaaaagccgtacgtgtagagcaagtacagaaaaccggcgtatgggtgcgcaaccataacggtattgccgacaatgcaaccatggtgcgcgtagatgtgtttgagaaaggcggcaagtattatctggttccgatttacagttggcaggtagcgaaagggattttgccggatagggctattatcgcttttaaagatgaagaagattggcaacttattgatgatagttttaactttaaattctcattacaccctaatgatttaattgaagtaataacaaaaaaagctaggatatttggttactttgccagctgccatcgaggcacaggtaatattaatatacgcattcatgatcttgatcataaaattggcaaaaatggaatactggaaggtattggtgtcaaaaccgctctttcattccaaaaataccaaatcgacgaactcggcaaagaaatcagaccatgccgtctgaaaaaacgcccgcctgtccgttaaattaatctatccctgtttcagacggcctgaagcagggattttttatatcaaaataaggggaaaacatgacttggcgcagcctgcttattcaaaacggcggcaaactatccttgcaacgccggcaactgctgattcaacaaaacggcgagtcccacaccgtaccattagaagacatcgccgttattatcatcgaaaaccgcgaaaccctgattactgccccgctcctatcagccttagccgaatatggcgcaaccttactgacatgtgacgaacagttcctgccctgcggacaatggctgccttatgcccaatatcaccgccaactcaaaatcctcaaactacagctgaatataagcgaacctttaaaaaagcaattctggcaacatatcgtccgccaaaaaatcctgaaccaagcatttgtcgcagacgaaacaggcaatgatcttgcagccaaacggttacgcactttggcagttgaagtccgttcaggcgatacaggaaaccgtgaagcccaagctgccgccctctacttccaagccctctttggagaaaaatttacccgtaatgacaacaatgccgtcaatgccgcattgaactacacctacgccgtactccgtgccgcagtcgcacgcgccctgaccttatatggctggttgcctgcattaggcttgtttcatagaagcgaactaaatccattcaacctcgctgatgactttatcgaacccttacgcccattggccgacctggtcgttatacatttgcatgaacaaggccgtctgaaaactgatctgacccccaacatcaaacaaaaccttatcaagacccttcactgtcaaatctgcatcgaacggcaacatttcagcaccttggctgccatcgacaaaatgatttcttcatttcaagccagcgtaaccgacaaaaacgccaaacagctgaaactacctgaaatcttgccattgaaagaataccaatatgagtgaggccaaatttatgaggattatcgtcttcttcgacctaccagtcaccacagcggccaagcgcaaagccgccaatcaattccgccagtttctattaaaagatggataccaaatgctccaactttccgtatacagccgtattgtcaaaggtcgagattcgttgcaaaaacaccacaacaggctatgtgcaaacctaccgcaagaagggtcaatccgctgtttggaagtaacagaaaagcaatatgccaccatgaaactactattgggagagctgaaaacccaagaaaaaagggtaaattccgaccaactattattattttaagccctatttttcagaccaaataaaacgggaaacccttatagaataagagtttcccgtttaggtattgtagcactgcgaaatgagaaagggagctacaacgaaaaaaaattgcaagtatccattgataggattgtagcactgcgaaatgagaaagggagctacaaccagctatctatccgtatccctccctgtatcattgtagcactgcgaaatgagaaagggagctacaacgaaaaaatgtatctctaccaagcgcaaggtattgtagcactgcgaaatgagaaagggagctacaacctcaaaaacgctattagcaagggttggggcattgtagcactgcgaaatgagaaagggagctacaactttatgaaaaaggtaaacaactgggcgacaattgtagcactgcgaaatgagaaagggagctacaacgtaaatttgggtcgttctttaggtttagtaattgtagcactgcgaaatgagaaagggagctacaacaatacagcccaaaccaagcaagagaggaccattgtagcactgcgaaatgagaaagggagctacaacgttctttctttgccttttaaaatgcagttaattgtagcactgcgaaatgagaaagggagctacaacttaggcgcgtttgtagtcgtttggattatcattgtagcactgcgaaatgagaaagggagctacaacacataaaacgccgctaggtgtccgtatgcgattgtagcactgcgaaatgagaaagggagctacaaccttacgacttttagacagactacgacaataattgtagcactgcgaaatgagaaagggagctacaacgcatgccgtaactcgtgttgatgtggctgaattgtagcactgcgaaatgagaaagggagctacaacatgtggtcaagtgtatcgatgattacaacaattgtagcactgcgaaatgagaaagggagctacaacgggaacaagcgtaaatggaaaaagcagaatattgtagcactgcgaaatgagaaagggagctacaactacatttcacacaccgaaagacggtcgctgattgtagcactgcgaaatgagaaagggagctacaacatgattagaccctttattatcgctatggctattgtagcactgcgaaatgagaaagggagctacaacaatcgcccaagctgcttgacgtaaacttgcattgtagcactgcgaaatgagaaagggagctacaacttacaaatctttttggataccccttgacgcattgtagcactgcgaaatgagaaagggagctacaacactgaccatgtacctgtctattggtttgacattgtagcactgcgaaatgagaaagggagctacaacaaaagggataatcaacatgcgcttgattatattgtagcactgcgaaatgagaaagggagctacaacataaaacaccttttattgcatggggttaatattgtagcactgcgaaatgagaaagggagctacaactcaaaccatgatgcagtcagaccgtcttccattgtagcactgcgaaatgagaaagggagctacaacactgaccatgtacctgtctattggtttgacattgtagcactgcgaaatgagaaagggagctacaacacgatagtgcggccatcaggcaggtcaatcattgtagcactgcgaaatgagaaagggagctacaacttgctacctgtagttgctttgattgctttaattgtagcactgcgaaatgagaaagggagctacaaccacttgttattgcttttgttaatggcaaggattgtagcactgcgaaatgagaaagggagctacaacagttctttgctttatatgcaggcttcaaccattgtagcactgcgaaatgagaaagggagctacaactatttgctgatttgcgagctttgcaacagcattgtagcactacgaaatgagaaagggagctacaacctatcagcaaggcactggccaacaagaacaattgtagcactgcgaaatgagaaagggagctacaacgagtcaaaagagatatacctgctccctaccattgtagcactgcgaaatgagaaagggagctacaacatcgacaaagataccggcgaagttctcacgattgtagcactgcgaaatgagaaagggagctacaactgcccggcctaatatgtactgcatcgccgaattgtagcactgcgaaatgagaaaggggccatccaaataaaaaagcaccacctaaacaggtagtgctttcatattaatttgcttattcagcagaatcagctgctttatcaaccaattcaaccaatgccaaaggagcattgtcgcctttacggaaaccgtatttcagtacacgaacatagccgccgttacgagcagcaaagcgtggacccaattcgttaaacaatttaactacaacatcacgatcgcgagtgcggtcaaaagccaaacgacggtttgccaaagaaggttttttacccaaggtaatcaagggctcaactacgcggcgcaattcttttgctttaggcaaagttgtcacgatggtttcgtgagtcaacaaggaattcgccatattgcgcagcatcgcagcacggtggctgctagtacggtttaatttgcggttgccattacgatgacgcatgtcattatcctttaatcttcaaacttacggcttttctaagcctacaggcggccaagcttctaatttggaacctaatgtcagacctttagaggccaacacttctttgatctcattcaaagatttacgacccaaattaggggtcttgagaagctcggtttcagtacgttgaatcaaatcgccaatatagtaaatatcttcagctttcagacaattagctgaacgtacggttaattccaaatcatctacaggacgcagcaagataggatcgataggaggcgctttttcttcaacctcttcaaccggagtaccttgcagatctgcaaaaatagacatttggtcaattaagatacgtgcggcactacgtacagcttcttccggatcaatagaaccattggtttcaatatccaaaaccaatttatccaaatccgtgcgttgctctacgcgtgcaggttcaacttcaaagctaacacgactgatgggcgaaaagctcgcatccaactgaatcgcaccaatctgtttattctcatcacgcaatacgcgacggcctgaaacagattgataaccacgaccttgctctactttaatttccatgtcgatttggccattgtcagccaagtggcaaataacatgttcaggattgatgatttccacatcgtgtggcaaatcaatatcaccagctacaacagcaccggcacctgtttttttcaaagtcaactgaacttgattacgaccgtgaagcttgaatacgatacctttaatgttcaagagaacgtcaacaacatcctcttgaacaccatcaatagtagagtattcgtgcaatacgccggaaataactacttcagttggggcaaagccattcatggatgacagtaagatacgacgcaaagcattacctaaagtatgaccaaaaccacgttcaaatggctgcatagacaccttggcccgagtggaagacaaggtatctacatcgatttgacgaggtttcaaaaattcggttgtgctattttgcatttaactgtccctcattgagctagcattatttagagtagaactctaccaccagctgttcattaatatcgccagacaattctgagcgatccggcatatttttgaatacgccttccaatttatcggcatcaacagatacccagcttggcaagccaatttgagtagccaggctcaatgcttcttggatacgtacttgtttcttagctttttcacgaacagctacaacatcacctgctttaacttggaaagaagggatattaacaacttgaccgtttacgacgatagctttgtgagaaaccaattgacgtgcttcagcgcgagtagagccaaaacccatacggtaaacgacattatccaaacgagactccagcaattgcagcagcaattcaccggtagagcctttacgacgatctgcttccgcgaagtaacgacggaattgacgctctaatacgccataaatacgacggattttttgtttttcacgcaattgcaaaccgtagtctgacaaacgtggttttttcgcaccgtgctgaccaggtgcagaatccattttacatttggaatccaaagagcgacgtgcactcttcaaaaacagatccgtaccttcgcgacgtgctaatttacatttagggccaatataacgtgccatgttttaaatcactccaatattaaatacgacgttttttaggcggacggcaaccgttatgaggcaacggggtaacgtcagtaatgctggtaattttgaaaccaagagcgtttaaagcacgtacagaagattcgcgaccagggccagggcctttaatgcgaacttctaaatttttaacgccatactcttgggcaactttaccagctgcttctgctgcaacttgtgctgcaaatggtgtacttttacgagaacctttaaaaccagcgccgccagaggtagcccaagacaatgcattgccttgacggtcagtgattgtaatgatggtattgttgaaagatgcatgaacgtgcacaataccttcgcttacggttttacgtacttttttacgtacacgcgaagctgtgtttgctttagccattaatcaaattccttaaaatttatttcttaccggcaatcgctttgcgcggacctttacgggtacgagcatttgtgcgagtgcgttgaccacgacaaggcaagccacgacgatgacggaagccgcgatagcaacccatatccatcagtcgtttaatgctcatcgttacttcacgacgcaaatcgccttcaacttcatatttagcaacttgctcacgcaaagcgtctaattgagcctcgtccaaatcttttgctttagtagtaggagcaatatttgctgcctcacaaatcaatttagcacgagtcgcaccaataccataaatagcctgaaggccaattacgatatgggcattattagggatatttacccctgcaatacgagccatattttttcctttttagggcaaagtatgtcactataccacaaaatcaatagttaagaaaactagcttcttaaccttgacgttgtttgtgacgtgggtcagtacaaattacgcgaactacacgattacgacgaataatcttgcaattgcgacaaattttctttacagaaggttgtacacgcattttatttccttttatcgtttatcttgctcggaaaacaatccgagcacgggttaaatcataaggagttaattcaactgttaccttatcacctggagaaatacggatatagtgcatccgcattttgccagatatatgaccaagtactacatgatcattttccagttttactttaaatgttgcattgggcaaagtctcaaggatttcgccctgcatctgtatggtatcttctttagccataagcctacttacgtgacaaagatttcatatctggacgactcatcaagtcttcatactgactactcattcgatatgaattgatttgtgtcctaaaatccattgtaacgacaaccaaaataagcaaagatgttccacctaaatagaaaggaaccttcaatgctgtcgttaaaaattcaggtatcagacagattatagtgatatacaaagcaccaaataatgtcagtctcagtacaactttttccaaatatctagaggtttgctcacctgggcgaatacccggcacaaatgcaccactcttcttcaaattttcagccatctctttagggctaaacactaaagcagtatagaaatagcagaagaagatgatagttgtagcaaataatacaatatacaaaggctgtccgtgttgcagcattgcagcaaccttatgaagaacagaattcgtactatttgaaccaaaccaacctaaaagtgtagatggaaataaaatgatactggaagcaaaaataggaggaataacacccgccatatttagcttgaacggcatatgaatgctttgtcccggcatcatcccagaaccaaactgtcttttagcataatgcacaggaactttacgctgagcactctcaaaatacactacagcatagatcaacagcaaaataccaatcacaattgatactgccatcaacatactcatggaaccttgttcagtcaaagttaacaaccgaacaataccggatgggatacccgatacaatgcctgctgtaatgattaaagaaataccattaccaataccacgctcggtaatttgctcccctaaccacatcagaaacatagtacctgtaaccaaacagactactgtagaaatatgaaactcaagcgaactcgttacaacaacaccttgttgataaacaaatgttgcaacaccaaagctttgcaatacagccaataataccgtcccatacctagtatatttcgtaattattttcctaccagcctcaccttccttctttaaagcttttaaagaaggaacaatttcagaagcgagctgaacaataatcgatgccgaaatataaggcatgataccaattgcaaatatactaaagcgctccaacgaaccacccgagaacatatttaacattccgaatatgccgtttgcagcgccttcgtataacttagctaatgcaacagcatctacgcccggtaccggtatatgagcaccaatacggaaaacgactaaagcacctaaaaggaacaccagacgttttttcagatcaccaaatttggataatcctgataaagattgttgattagccactgtagtgcaagccttattcttctactttaccaccggcagcttcaatagcagctttagcacctttagtagcttttacaccttttaaggtaactgcttttgagatttcaccagaagcaataacttttacattagaagcagttgcaggaatcagaccagcttgtttaagaactaagacatcaatctcgttcacagcaatcagatttaattcactcaaacgaacttcagcattagcggcagcagtcaaagatttgaaaccacgtttcggcagacggcgttgcaaaggcatttgaccgccttcaaaacctaccttgtggaagccaccagaacggcttttttgacctttatgaccacgaccacctgtcttacccaagccgctaccaataccacggcctacacgacggctagtgtgagtagcaccctcagcaggttgaatagtattcaaaaacatattaagactccactttcaacaagtagctgattttattgatcatgccacggttttcaggggtatccaaaacctctacagtatgttcacggcggcgcaaacctaaaccacgagcacatgcacgatgagattcaattgtaccgatcaggctcttaaccaatgtaactttaatctttttttgctcagtcatggttagctcccaaaatatcttctactgtcaagccacgtttagcagcaatatcagcaggggtatacagtttagacaaaccgtctaatgtagcgcgtacaatattgtaaggattagtagaaccatgtactttagctgagatgttatggatccccatagcatcaaatactaaacgcattggaccaccagcttttacaccactaccttctttagcaggttgcataaataccttagtagcaccatgacgaccaataacctcatgatgaatagtaccatttttcaaaggtactttaatcatagagcgtcgagcttgatccattgctttttgaacagcaactggtacttcttttgatttacctttgcccataccgatgcgaccatcaccatcaccaacaacagtcagtgcagagaaagccatgatacggccacctttaactactttagtcacacgattaactgcgaccatcttttcaatcagtccgtcaccgcgttcttcaatttcatgttttgccatctgaaagtctccaaatattagaagcttaaaccattttcacgtgcggcttcagccaaagctttcacacgaccgtgatattggaaacctgaacggtcaaaagcaactttttcaacacccgctgctttagctttttcagcaatacgcttaccaactacagctgctgcttcaacgttactacctgatttcaggctactacgtacttcagcttccaatgtagaggcttgagccaatactttatcaccttcagcactaattacttgagcataaatatgattattgctgcggaacacacataatcttaccattttcaagtccgcaatacgcgcacgggttttgcgtgcacgacggagtcgggttgtatgtttatccattagtgaacctcaattattttttcttggcttctttcatcactactacttcacccacataacgaacacctttacctttataaggctcaggagaacggaatgcgcgaatttcagcagcgacttggccaaccacttgtttatctgcaccagtcaaaacgatttctgtttggctaggagtttgaacagaaacaccttcaggcatttcatatacgattggatgagagaaacccaaagacaagttcaaaactttgccttgagcgtgggcacgataacccacaccaatcaattgaagttttttctcaaaaccttcagaaacacccttaaccatgttattaaccaatgcacgagcagtaccagacatagca

SEQ ID NO: 3158 - DNA, 23249 bp, synthetic construct
  misc_feature 1..23249: note = Synthetic
  source 1..23249: mol_type = other DNA
gctttggcaaaagaacataatctttgggtaatcgaagactgcgcccaagcgcacggcgcaaaatacaaaggcaaatccgtcggctctatcggacacgtcggcgcgtggtcgttctgccaagacaaaatcatgaccaccggcggcgaaggcggtatggttacgaccaacgacaaaaccctgtgggaaaaaatgtggtcgtacaaagaccacggcaaaagctacgatgccgtgtaccaccgcgaacacgcgcccggtttccgctggctgcacgaaagcttcggcacaaactggcgtatgatggaaatgcaggcggcaatcgggcgcattcagctcaaacgcctgcccgaatggactgcctgccgtcaagcgtacgccgccaagctggcggaaagcctaggcaaattcaaaagtatccgcttggttgaagtcgccgactacatcggacacgcgcaatataagttctacgccttcgtcaaacccgaacacctcaaagacggctggacgcgcgaccgcatcgtcaacgaactgaacgcgcgcaaagtcccctgctatcaaggtagctgctccgaagtgtatttggagaaatccttcgacaacacgccttggcgtccgaaagagcggctgaaaaatgctgtcgagttgggcgacaccagcctgatgttcttagtacatccgacgctgaccgacggcgaaatcgcgttctgcaaagaacacatcgaagccgtattgaccgaagccacacgataacccttcagacggcatatgccgcctgaaagcacataccgccccacgatatgactctggaaaccctgcttgccctaccgcgcaacatcaagaaaatctgtttcctcatacacgattttctgatgattttcattgccttttggtttacccaaagcctgaaggccgactactcgaacgaatggttcgaccctaccaactggcagtctttcctattgaccgcgccgttgaccatcggcctgttcgtcagaatggggctctaccgtgccgttacacgcttcatcagcttccgcatcctctccaccgcgctggcaggcagcctcgcctccgccgtattgttcttcctcaacacattgatttttgaagaaaggctgcgcctcgccctgccgattgtctatttcttactgctgtttgtttccgtgaccggctcgcgtatggttttgcgcggactgttgtccgaacaccccaaaaaacagatgatccccgtcatcatttacggcgcggggcaggcgggcagacagcttctcgaggccgtcaaacaaatgcgcgaatattccgccgccgcctttgtggacgacgaccccaaactgtggcacaccgtcatctacgaccttgccgtttaccagcccgatgccatcgccttcctcatcgaacgctacggcgtggaaaaaatcctactcgccatccccggcgcgacccaggaacaacgccgccgaatcatcaacaaactggaagcctatccgtgcgaagtgttgaccattcccggaatgaaagacctgatggacgggaaaatcagcatcggcacgctcaaaaaaatctctgtgtccgacctgctcgggcgtgattccgtcgcgcccgacaaccgcctgatgagtgccgacatcgaaggcaaaaccgtcatggtaaccggcgcgggcggctccatcggttcggaactctgccgccagattatccgccgccgccccgaaaagctgctgctgttcgagttatccgaattcgccctgtacgccgtcgaaaaagaattgcgcgaaacctgcatccaaaaacgcctcgacaccgaaatcctgccctttctcggttcggtgcaaaaccgcacgctgctcgaacacgtcatgaccgccttttccgttgcgaccgtctatcacgccgccgcctacaaacacgtccccatggtcgagttcaacaccgtcgaaggcatacgcaacaacatcttcggcacactcgagtgcgcgcttgccgccacgacatcgggcgtggaaactttcgtcctcatctccaccgacaaagccgtccgccccaccaacaccatgggtgccagcaaacgcatggcggaactctgccttcaggcgctcgccgccgaacccggacaaaaaacccgcttcagcatggtgcgtttcggcaatgttttaggttcgtccggctccgtcgtccccgcatttgaaaaacaaattgccgaaggcggcccgattaccctgacccaccaagacattacccgctacttcatgaccattcccgaagcggcgcaactggttatccaagccggcgcgatgggcaaaggcggcgacgtattcgtcctcgatatgggcgaatccgtcaaaatcatcgaccttgcccgccaaatgattaccttaagcggcctcaaacccaaaacacccgaacaacccgacggcgacatcgaaatcctcattaccggactgcgtcccggcgaaaaactctacgaagagctgctcatcggcgacaacgtccgcaaaaccggccatccgcgcattatgacggctgacgaggcgatgctgccgtggcacgagctctctgtcctgctcgaccgcatccgtgcggcctgcgaccgttacgaccagcaggcaatccgcaccctgctcatcaacgccccgaccggctttaccccaagcgacggtatctgcgacctgctttgggtacgagaaacacacagaaaaaatgccgtctgaaccttcagacggcataacgtacaaaccaacctaccttacacacacggagtttgacatgcagttctcagcattcggcgaaaaattcacgcaacacagcggcatcctccaactgatggacgacctcggcgacgcgctcaaaagcgacaagcccgtcaatatgctcggcggcggcaatccggcgcgaatcgccgaagtcaatgccgtgttcgccgacgtattttccaaactggcagcagaacatgccgtcgaaaacatcggcaactactccaatcctcaaggagatgccgcgctgattgacgcgctgaccgccttcctcaaccgcgaatacggctggaacctgaccgccgacaatatcgcgctgaccaacggttcgcaaaacgcgtttttctatttattcaacctcttcggcggcaaattcaacctttcagacggcacatccgcagaaaaagccattttgttgccgctcgcgcccgaatacatcggctatgccgacgtgcatgtcgaagggcagcacttcgtttccgtcaagcccaaaatcgaaaacgtcgaacacgaaggcgaagcaggcttcttcaaataccgcgtggactttgacgcactggaaaacctgcccgaactcaaagcgggcaaaatcggcgcgatttgctgttcgcgcccgaccaacccgaccggcaacgtgctgaccgacagcgaaatggcgcggctggacgctttggcgcaagaacacggcattccgctgattatcgacaacgcctacggaatgccgttccccaacatcatttacagcgacgtaacgctgaattggcatgaaaacatcatcctctgcttcagcctttccaaagtcggtctgccgggcgtgcgcaccggcatcatcgtcgccgcgcccgaagtcgtcaaagccgtcagcagcctgaacgcgattgtgaaccttgcccccacgcgcttcggcgcggccatcgccgccccgctactggaaagcggcgagatgaaacggcttgccgaccaagtcatccggccgttttaccgcaatcaggcgcaaaccgccgtctcgctgctcaagcgcgagctgggcgcgtacccgatgaaaatccacaaacccgaaggcgcgattttcctgtggctctggtttgaaaacctgcccgtttcttcgcaaaccctgtacgaaatgctcaaagccgaaggtacgctgattattccgggcgaacatttcttcgtcggcatcgacacgcgggattatccgcacgcgggcgagtgcatccgtatgagcatcgcgcaggacgctcaaacgctggaaaaaggcattgccgccatcggtaaaaccgtccgaaaactgtacgacaacgtttaaaccgcaaaaaatgccgtctgaaggcctttcagacggcatttttatccgcattcaatgtcgggaaaaatgcgcccacactggcctgcagttttccggcagttcgggacacgcgccgaggatgccgccgctgaagtcgtttaaacggtggaagtcgctgcccgcactggcgagcatgccgaagcgttctgccaaaaatgcgtagttgaggcggtcgtttttgcagcagttgccgctgtggacttcgatgcccgcgccgccgaggtttttaaattcttcaaacagattgcgcttggcggtagcggacaaatcatagcgcatcggatgggcgatgactgccatgccgcccgcgccgttgacggcggagacgcagtcttccagcgtcgcccattcgtgtcggacggcgcaggatttgccgtcgcccaagtatttggtgaacgcctgctgcttgtttttgacgtgtcccacccgaatgaggaactcggcgacgtgtgtgcggctgaccatttctttgtttgccgccagcgcgagcgcgccgtcgtatgcgcccgaaatgccgcgtttttccagcttggcggcgatggcttcgaggcgtttcagacggccttgccgcacttgcgccaacaggttttgcaggttttcgtcttgttcgtcaaagtctaagccgacaacgtgtatggtacgcccgcgccacgttacggagatttccacgccgttaatcaggcgcaaaccgagcctgtcggcttcggcacgcgcttcggcgatgccgccggtgtggtcgtggtcggtcaacgccagcagcgtgcagccgttttgatgcgcgaggcgcacaacttcggcgggggagagcataccgtcggaaacggtggaatggcagtgcaggtctatcataaggcgttatgtgcgtggtaaatggtgggcagggtgtttcaatattgtcgggcggtgtggcggcggtgatttcaaaaaacaggtgtatggcaaatgcaaaggaaaagccgctatgccgtcattccagcgcaggcgggaatccagactttgatttattggaaatgtttaaggttaaccgctatttcaaacttccggattcctgctttcgagggaatggcgatatgaccgttttcaattttaatctactataaaagactgtctgaaaacgtggttttatagtgaattaaatttaaaccggtacagcgttggctcgccttgccgtactatttgtactgtctgcggctcgccgccttgtcctgatttttgttaattcactatatcaagccgaaccgttttcagacggcatcgtccgaccaacccgcttctttcaatttccgccgttgcgcgtcgtagcgggccttatccgcccaataaatcgtctgaatacacgcctcgccgcagtcgctgccgcagcattcccacgactcgggtcggacgggttcgtctaaaagcggctcgcccaaaagggcttcggctttatgcttcagggtcatatccatcggcgatttccaagcgcgcaccgtcaaactcgatgacttcgccgccgcgtattttggcggttttacgggtttcggtttcgccgttgcgcgacaccaacccttcggcaatcaacgccttcgcctgtccgccgctttcggcaagtccggccaatttcaagaggtcgcacaaggcgatgtattcgttgtcttcgagatagacgatggcttccatgatgtccccttgcagaaagagaccgttattgtagcacctgccgccgccgtacccaaaattaccgcaaaaccagcgatgtatccgcaccgcctgttccgtaaaagtaaaaatgccgtctgaaaccccgtatgccgcaatccgttcaaagaaatcctgcccaacggcagactgcaaatcctgttccccgacgaatccgcattgacgctgatgcacatcctcaaacacgaactgcccgatacaccggcaatcggcatcaaaacgaaatcaaaaacctgtttgaacgtaaaattaatttaactgcttgccatccgtccgaataaggtatatagttccttataactagtttgatagtcctttatatctatcaatactccttgggaagcctccaccacacggtaggaggcatttttttgccgtcgtaaaagctcaaaaacatttgcaggtcatgccgtctgaatctgaaacggcatgacctacaccgccatctaaagacaaccctgctacaatacgccttttattgttcacgccgattttgccatgaccgagccgacctacatccccctgcgcctgcataccgagttctcaattaccgacggtatggtgcggattaaaaaactgattgccaaagcgcaggaatacggtttgcctgctttgggcatcagcgatttgatgaacgaattcggtttggtgaaattctataaagcctgccgcagtgcggggattaagcctgtcggggcggcggacgtgtggataggcaatccgaatgcgcccgacaagccgttccgcgccatgttgattatccgcaacgatgcgggctatcagcgtttgagtgagcttttgacagaggcctatgtcggtaaagaccgcaatgtccatcatgcggaactcaaccccgaatggctggaaaacggcgacaacagcggcttgatttgtttgagcggcgcgcattacggcgaagtgggcatgaatctgttgaacggcaatgaagacgcggcgcgcgcggcggcgttgaaatatgcggcatggtttcccgatgcgttttatttagagctgcaacgcctgcccgaacgccccgaatgggaggcttgcgtttccggcagcgtgaagctggcggaggaactgggtttgccggtggtggcgacgcatccgacgcagtttatgaaccgcgacgatttcaacgcgcacgaggcgcgggtgtgtatcgcgggcggctgggtattgacggacaaaaaacgtccgcgcgatttcacgccggaccagtttttcattccgccggaaacgatgctggagcgtttcgccgacttgcccgaagccttggaaaacacggtggaaatcgccaaacgctgcaacctgcacatcacattgggcaaaaacttcctgccccttttccccacgcccgacggtttatcgcgcgatgactatctcatcaaactctcaaacaagggcttgcaggaacgcatggttcagctttatcccgacgaggcggagcgtgcggcaaaaatgccggaatatcaggaacgtttggattttgagctgaacatcatcatccagatgaaattccccggctatttccttatcgtacaagactttatcaactgggcgaaaacgcacggctgtccggtcgggccgggacgcggttcgggcgcgggttcgctggtggcgtattcgctgaaaattaccgacctcgacccgctcaaatacgcgctgctgttcgaacgtttcttgaaccctgaacgcgtttccatgcccgacttcgacgtggacttctgtcaggcaaaccgcggccgcgtgattgaatatgtacgcgaaaaatacggtgcggaagcagtcagccagattgttaccttcggcacgatgtcgtccaaagcagtgattcgcgacgtggggcgcgtactggaactgccgtttatgctgtgcgacaaactgtccaagctgattccgttggaagccaacaaacctttgggtttggacgacgcgatgaaggcggagccgcagattcaggaattaatcgaagcggaagaagcggacgaactgattacgctggcgaaaaagctggaagatttgacgcgcggtttgggtatgcacgcgggcggcgtgttgattgcgccgggcaagatttccgattacagccccgtgtatcaggcggacgaatccgcctcgcccgtatccatgtacgacaagggcgacgtggaagacgtgggtttggtgaaattcgactttttaggtctgcgcaacctgaccatcatcgaaatggcgcagaacaacatcaaaaacaccaccggcgacatcatcgatgtcggcaaaattccgcttgacgaccaggttgcctaccaaatcttccgcgatgcgaacaccaccgccgtgttccagttcgagtcgacaggcatgaagaaaatgctgaaaacagcgcatacgaccaagtttgaagaacttatcgccttcgtatcgctctaccgacccggcccgatggacaatattcccgacttcgtcgcgcgtatgaaaggtcaggaattccaatacatccacccgctactcgaaggcatcctcgcaccaacctacgggattatggtgtatcaggaacaagtgatgcaggcggcgcagattatcggcggctactcgctcggcggcgcggacctgctgcgccgcgcgatgggtaagaaaaagcccgaagaaatggtgaaacaccgcgaaatcttcgccgaaggcgcggcaaaacaaggcatttcgcgcgaaaaatccgacgaaatcttcaactatatggaaaaattcgccggctacggtttcaacaaatcccacgccgccgcctacgccctgatttcctaccagaccgcatggctcaaggcgcactaccccgccgaatttatggcggcgaccatgtcgtccgaattggacaacaccgaccagctcaagcatttctacgacgactgccgcgccaacggcatcgagttcctgccgcccgacatcaacgaatccgactaccgctttacgccgtatccggacatgaaaatccgctacgcgctcggcgcgattaaaggcacgggcgaagccgccgtcgaatccatcaccgccgcgcggcaaagcggcggcaagtttaccggcctgttggacttctgcgagcgcgtcggcaaagaacacatgaaccgccgcaccctcgaagccctgatacgcggcggcgcgttcgacagtatcgaacccaaccgcgccatgctcttggcgaacatcgacctcgctatggacaacgccgaccaaaaagccgccaacgccaatcagggcgggctgttcgacatgatggaagacgccatcgaaccggtgcggctcatcgacctgccgaggtggagcgaatcggaaaaactcgccgaagaaaaaaccgtcatcggcttttacctgtccggccacccgttcggcccgtatgcccaagaagtctgccaaatcgcaccgaccaaattagaccgtctgaagccgcaagacagcgtgcgcctcgccggattcgttaccgccgtgcgtacgatgatgggcaagcgcggcaaaatcgccttcgtcagccttgaagatttgagcgggcaggttgaaatcatggtcggcagtcagacgctggaaaactgcgccgactgcctcaaagccgaccaagtgctgattatcgaatccaaagtcagccgcgacgactacggcggcggcgacggactgcgcatcatggcaaaccaagtcatgaccctgcaaacggcacgcgaacgctacgcccgcagcctcagcctcgccctcgccccgcatcacgacatcggcggactggtacggctgctctcctcccaccaactgcccgacacgccgcgcatcccgctgcaactgtcgtatgccaacgaaaaagcgtcgggcaggcttcaagtgccgccgaaatggacggttacaccgagctccgcattgttcggcgaactggaaacattgctcggcagccggtcggtgcgcgtcaactggtaacccaaaatataaatgccgtctgaagcccaaaatcggtttcagacggcattttttaaccgaaataaacgatgccccttaaagcagaagctttaaggggcagagcgttgcggcacatcttttcagacggccttattgtagcaacggttctcatttcgcagtgcgacaatatgtttgggattctagccgttgtgagatgataagtcaataatctatttgtatataaataagacaataagatatattatcattatttgcaacgttgtttacggagtaataaatggctgccttcaaacctaatccaatcaactacatcctcggcctcgatatcggcatcgcatccgtcggctgggcgatggtagaaattgacgaagaagaaaaccccatccgcctgattgatttgggcgtgcgcgtatttgagcgtgccgaagtaccgaaaacaggcgactcccttgccatggcaaggcgtttggcgcgcagtgtccgccgcctgacccgccgtcgcgcccatcgcctgcttcgggcccgccgcctattgaaacgcgaaggcgtattacaagccgctgattttgacgaaaacggcttgatcaaatccttaccgaatacaccatggcaacttcgcgcagccgcattagaccgcaaactgacgcctttagagtggtcggcagtcttgttgcatttaatcaaacaccgcggttatttgtcgcaaagaaaaaacgagggcgaaactgccgataaagagcttggcgctttgcttaaaggcgtggccaacaatgcccatgccttacagacaggcgatttccgcacaccggccgaattggctttaaataaatttgagaaagaaagcggccatatccgcaatcagcgcggcgattattcgcatacgttcagccgcaaagatttacaggcggagctgattttgctgtttgaaaaacaaaaagaatttggcaatccgcatgtttcaggcggccttaaagaaggtattgaaaccctactgatgacgcaacgccctgccctgtccggcgatgccgttcaaaaaatgttggggcattgcaccttcgaaccggcagagccgaaagccgctaaaaacacctacacagccgaacgtttcatctggctgaccaagctgaacaacctgcgtattttagagcaaggcagcgagcggccattgaccgataccgaacgcgccacgcttatggacgagccatacagaaaatccaaactgacttacgcacaagcccgtaagctgctgggtttagaagataccgcctttttcaaaggcttgcgctatggtaaagacaatgccgaagcctcaacattgatggaaatgaaggcctaccatgccatcagccgtgcactggaaaaagaaggattgaaagataaaaaatccccattaaacctttcttccgaattacaagatgaaatcggcacggcattctccctgttcaaaaccgatgaagacattacaggccgtctgaaagaccgtgttcagcccgaaatcttagaagcgctgttgaaacacatcagcttcgataagttcgtccaaatttccttgaaagcattgcgccgaattgtgcctctaatggagcaaggcaaacgttacgatgaagcctgcgccgaaatctacggagaccattacggcaagaaaaatacggaagaaaaaatttatctgccgcccatccctgccgacgagatccgcaaccccgtcgtcttgcgcgccttatctcaagcacgtaaggtcattaacggcgtggtacgccgttacggctccccagctcgtatccatattgaaacggcaagggaagtaggtaaatcgtttaaagaccgcaaagaaatcgaaaaacgccaagaagaaaaccgcaaagaccgggaaaaagccgccgccaaattccgagagtatttccccaattttgtcggcgaacccaaatcaaaagatattctgaaactgcgcctgtacgagcaacaacacggcaaatgcctgtattcgggcaaagaaatcaacttagtccgtctgaacgaaaaaggctatgtcgaaatcgaccatgccctgccgttttcgcgcacatgggacgacagtttcaacaataaagtgctggtattgggcagcgaaaaccaaaacaaaggcaatcaaaccccttacgaatacttcaacggcaaagacaacagccgcgaatggcaggaatttaaagcgcgtgtcgaaaccagccgtttcccgcgcagtaaaaaacaacggattctgctgcaaaaattcgatgaagacggctttaaagaatgcaatctgaacgacacgcgctacgtcaaccgtttcctgtgccaatttgttgccgaccatatattgctgacaggtaaagggaaaagacgtgtctttgcctcaaacggacaaattaccaatctgttgcgcggcttttggggattgcgcaaagtgcgtgcggaaaacgaccgccatcacgccttggacgctgtagtcgttgcctgctcgaccgttgccatgcagcagaaaattacccgttttgtacgctataaagagatgaacgcgtttgacggtaaaaccatagacaaagaaacaggaaaagtgctgcatcaaaaaacacacttcccacaaccttgggaatttttcgcacaagaagtcatgattcgcgtcttcggcaaaccggacggcaaacccgaattcgaagaagccgataccccagaaaaactgcgcacgttgcttgccgaaaaattatcatctcgccccgaagccgtacacgaatacgttacgccactgtttgtttcacgcgcgcccaatcggaagatgagcggtgcacataaagatactttgagatctgctaaacgatttgttaaacataatgaaaaaattagtgttaaacgagtatggttaaccgaaatcaagttggccgaccttgaaaatatggttaattataaaaatggtagagagattgaattatatgaggctcttaaggcgcgtttagaggcatatggaggtaatgctaaacaagcatttgaccctaaggacaatccgttttataaaaagggaggacaactggttaaagctgtgagggtcgaaaaaacccaagagagcggagtcttattaaataaaaaaaatgcttataccattgcagataatggagacatggtacgtgttgatgtgttctgtaaagtagataagaaaggaaaaaatcagtattttattgttcccatctatgcttggcaggttgctgaaaacattcttcccgatattgattgtaagggataccggattgatgatagctatacattctgttttagcttgcataagtatgatctgattgcttttcaaaaagatgaaaaatctaaagtagaattcgcctactatatcaactgtgatagctctaatggacgattctatttagcttggcatgataaaggctctaaagaacagcaattccgtattagcacccaaaatcttgtattgatacaaaaataccaagttaacgaactgggcaaagaaatcagaccatgccgtctgaaaaaacgcccacctgtccgttaaattaatctgtccctgcttcagacggcctgaagcagggattttttatatcaaaataaggggaaaacatgacttggcgcagcctacttattcaaaacggcggcaaactatccttgcaacgccggcaactgctgattcaacaaaacggcgagtcccataccgtaccattagaagacatcgccgttatcatcatcgaaaatcgcgaaaccctgattaccgccccgctcctatcagccttagctgaacatggcgcaaccctgctgacctgcgacgagcagttcctgccctgcggacaatggctgccttatgcccaatatcaccgccagcttaaaatcctcaagctgcaactgaacataagcgaacccttaaaaaagcaattctggcaacatatcgtccgccaaaaaatcctgaaccaagcatttatcgcagacgaaacaggcaatgatcttgcagccaaacggctgcgcactttggcatctgaagtccgttcgggcgatacaggaaaccgtgaagcccaagctgccgccctctacttccaagccctctttggcgaaaaatttacccgtaatgacaacaatgccgtcaatgccgcattgaactacacctacgccgtgctacgggccgcagttgcacgcaccctgaccttatacggctggctgcctgcattaggcttgtttcatagaagcgaactcaatccattcaatctcgccgatgactttatcgaacccttacgcccattagccgacctgaccgtgatacatttgtacgaacaaggccgtctgaaagccgaactgacccccggcatcaaacaacaccttatcaaaacccttcactatcaaatcagcatcgaacggcaacatttcagcaccttggctgccatcgacaaaatggtttcgtcatttcaagccggtgtaaccgataaaaacgccaaacaactgaaactgcctgaaatcctaccattgaaagaataccgatatgagtgaggccaaatttatgaggattatcgtcttcttcgacctaccggttatcacggcggcaaagcgcaaagccgccaatcaattccgccagtttttattaaaagacggataccaaatgctccagctttccgtatacagccgtatcgtcaaaggccgcgattcgttgcaaaaacaccacaatagactatgtgcaaaccttccgcaagaaggctcaatccgctgtttggagataacagaaaagcaatatgccgccatgaaactgctgttgggcgagctgaaaacccaagaaaaaaaggtcaattcagaccaattattgttattttaagcccattttttcagactaaataaaacgggaaatccttatagaataaggatttcccgttggggtattgtagcactgcgaaatgagaatgggagctacaacttaaaagaaaatgccaattaaaccttagcaattgtagcactgcgaaatgagaatgggagctacaacccctgattgcaggtgaagatgaactgtatgattgtagcactgcgaaatgagaatgggagctacaacaaaatcgtcggcctgctccagcacgacctgattgtagcactgcgaaatgagaatgggagctacaacctacccgctcggcgtatatgaggcaatctaattgtagcactgcgaaatgagaatgggagctacaacgcgcacgattgacggcagcagacgagccaaattgtagcactgcgaaatgagaatgggagctacaacagcggtggtagaatcggatttttagagtgaattgtagcactgcgaaatgagaatgggagctacaaccgtttttcaggtcgaattatcgaaccttcaattgtagcactgcgaaatgagaatgggagctacaacctcgaatggcgagtacttgacgctcaatacattgtagcactgcgaaatgagaatgggagctacaaccaggtgcttgggcgtaattttatccgttggattgtagcactgcgaaatgagaatgggagctacaacccttttgcaacaatcgtgctttatttgtcaattgtagcactgcgaaatgagaatgggagctacaacttaaaatttacaacaccgcccgacggcatgattgtagcactgcgaaatgagaatgggagctacaacttcctgtcggctttttcggctgctttgcggattgtagcactgcgaaatgagaatgggagctacaacgtcggcattgttcagggtgttcgcttcgcaattgtagcactgcgaaatgagaatgggagctacaacagaacactatggctaaaacatcaagtggcaattgtagcactgcgaaatgagaatgggagctacaactcgcgcaagcattgacgatatttgtgaggcattgtagcactgcgaaatgagaatgggagctacaacaaattttatgaaaaccgtttccaccgccgtattgtagcactgcgaaatgagaatgggagctacaacaaattttatgaaaaccgtttccaccgccgtattgtagcactgcgaaatgagaatgggagctacaactatgcttgggtttgagtgggcgattgatgaattgtagcactgcgaaatgagaatgggagctacaaccttggcacgagatggtcgccgtattaaattaggggcttaggaagcaaaaatattaaattgggttatttcgaagcatcttcattaatattttacctaaatcttcatgccggtggttaaacctaaactccgtttctttgagatgcagataaaacatctctttggaaataccatgaaatttagccaaacgccccttagtataactccaaaaagattcaataccattgatatgttgctttcctcgagcaaactcattggaaccatgatggacacggtaatgcttctcatagcccatatcgacaagaccgtcatatgctttccagccgtcagtattgatttcactgtcagcagatatgtgaccacgtatgaccttgattagttaggctttcgaagcgtcgggaacgatttccgtatagaccacgccattgcgtttcagtatgccaaatacgatggttttacctgacgctccgcgaccgcgcttacccctgatacgtcgcgcaccaaagtaagattcatctaattcgaccacaccggacagtggtgagctttgttcgcacagagcagcaatcctgtgtctgattttcaggaaaataggattgataccgcgtacactaatgccggtcattttagcagtatcggaagcggtcaaatcaagagcgaaacagcggattatttctctaaacttttgctctgaaattttgctgaacttttgatacttattttttagtttcatattaggagcttatcaggttttttgatgattttgcttcctaagcccctaaattattgtagcactgcgaaatgagaatgggagctacaactttatggctattcacctgtcgagcaaatcaattgtagcactgcgaaatgagaatgggagctacaacaagaagattgggaaatgtatctcacggaagattgtagcactgcgaaatgagaatgggagctacaaccggtttgaacagcagtatatgggaagaaacattgtagcactgcgaaatgagaatgggcgctacaaccagccgttgcgataagcgaacgtgcgttaaagtcattgagacacagtgcaattatggcaagaaaggcgacagatattgtgtcacagatttgaaataagaaaaaaccgcccactcacagagtaggcggaaaacttgcgtttttttgattgtggtcgggttagctactgcattgacttaacagcaaagcaaccgctaaaatgaacttgtggttcacttcaacggacagcagcaactttttcccacgcataaggaatttaagcattttagcttctcctagtgaagttaatcacacaggcgagagccgaacaaaaatccccgttgcagcggggatttttgctgttccctgtttgatgattaaactaaaatcttgcaaaatgagacctttgcaaaattccccaaaatcccctaaattcccaccaagacatttaggggatttctcatgagcaccttctttcagcaaaccgcacaagccatgattgccaaacacatcgaccgtttcccgctattgaagttggaccaggtgattgattggcaaccaatcgaacaatacctgaaccgtcaaaaaaaccgttaccttagagaccaccgcggccgtcccgcctacccgctgttgtccatgttcaaagccgtcctgctcggacaatggcacagcctctccgatcccgaactcgaacacagcctcatcacccgcatcgatttcaacctgttttgccgttttgacgaactgagcatccccgattacagcaccttatgccgctaccgcaactggctggcgcaagacgacaccctgtccgaattgctcaaactgattaaccgccaactgaccgaaaaaggcttaaaagtagagaaagcatccgccgccgtcgttgacgccaccattattcagaccgccggcagcaaacagcgtcaggctatagaagtcgataacaaaggacaagtcagcggccaaaccacaccgagtaaggacagcgatgcccgttggatcaagaaaaacggcctctacaaactcggttacaaacaacatacccgtaccgatgaggaaggctatatcgagaaactgcacatcacccccgccaatgcccatgagtgcaaacacctgccgccgttgttggaagggatagctgaaggtacgaccgtctatgccgacaaaggctatgacagtgcggaaaaccggcaacatctggaagaacatcagttgctggacggcattatgcgcaaagcctgccgcaaccgtccgctgtcggaaacgcaaaccaaacgcaaccggtatttatcgaagacccgttatgtggtcgaacaaagcttcggtacgctgcaccgtaaattccgctatgcgcgggcggcctatttcggactgattaaagtgagtgcgcaaagccacctgaaggcgatgtgtttgaaccttttgaaagccgccaacaggctaagtgcgcccgctgccgcctaaaaggcagcccggatgcctgattatcgggtatccggggaggattaagggggcgtttgggtagaattaggaggtatttggggcgaaaacagccgaaaatctgtgtttgggtttcggctgtcgggagggaaaggaattttgcaaaggtctcagcctgcccgaaatcatccgcgacctgctcgaaatgccgtctgaaaccgccattgccgacatcacacgcacttattccgcacattacctcaatcccaacaaccgcaatatgtccttatttcctcaggcactgccctgtctggacaagctcaaagcacaaggatactggcttgccgtcgccacgggcaaagggcgggcgggtttggacaacgccatcagccaaaccgccaccggcggctattggctcgccaccgcctgcgcgggggaatatccctccaaaccctcgcccgaaatggtattcggaatctgcggcaaactgggacttgacccgaaagaggcattggtcgtcggcgatacggcgcacgacctgcatatggcggcgaacgcgggtgcggcggcagtcggcgttgccaccggcgcacattcgcgcgaacagctccttggcgcaccgcatctcgccgtattggacgacttgtccgaactgcccggttttcttgcacagcattacgcctgattggtttccgcatccggcacgcggcaaaaatgccgtctgaagcctgttcagacggcatttgttttgcccaaacattcaacgcttgctcaacgcttgcacaaatcgggtttggtttcgccctcgcggcgcaactctttgggcaggacgaacacgatgctttcttccgcaccctcgccttcgcgcacggtttcatgcccccacccgcgtatggttgccaatacttcctgcaccaacacttcgggcgcggacgcgcctgccgttacgccgactttgtttttgccctcaaaccatgcgcgttgcaggtagcctgcattatccaccatatacgcatcgattccgcgcgatgccgccacttcgcgcaagcggttgctgttagacgaattgggcgaaccgaccacaatcacgatgtcgcactgttctgccaactctttgacggcggtttgccggttggtcgtcgcatagcagatgtcttccttgtgcggattgcggatattggggaaacgcgcgttcagcgcggcgatgatgtctttggtttcatcgaccgagagcgtggtttggctgacataggcgagtttgtcggggtttctgacttcgagttttgccacatctcctaccgtttcgaccaaaagcattttgcccggcgcaagctgccccatcgttccttcgacctcgacatgacccttatgcccgatcatgatgatttcacagtcttgggcatccagtcgggcgacttccttatgcactttcgtcaccagcgggcaagtcgcatcaaatacccggaaaccacgttccgccgcttcttgctgcaccgccttcgatacgccgtgtgccgaataaaccagcgtcgcgcccggcggcacttccgccaagtcttcgataaacaccgcgcctttttcacgcaggttatcgacgacgaatttgttgtggacgacttcgtggcgcacataaatcggcgcgccgaattcttccaaagcacgttcgacaatactgattgcccgatccacaccagcgcagaagccgcgcggattggcaaggatgatggttttctcgttcataagcccggtatttcgttttcagacggcatcaatatttttcttcttgggttttacggtggacgatgttgtccaacaccgccaacaccgcaccgacgcagataaagctgtcggcaatattaaaggcgggataaaaccaattttgccaataaaacaataagaaatcgacgacatgaccgtgtatcaggcggtcgatgacattgcctaacgcaccgccgataatcattgccgcacccgttttgccgagggttgcaaactcatcgcgcaagatggcgcgtaccaaatacgcgctcaccgccaccgccagcaccaaaaaaaagtatttttgccagccgccctgatcggcaaggaagctgaacgccgcacccgggttgtacaccagcgtcagatcgaaaaaggaaggaatgacattgacgcgttcccgatactgaaacgacgacagcaccgcccacttcgaccactggtccagcacgatggcggcaagtgccaatacccaatagcgcgttttacttgaaacagatgaagacatatttttcaacagccggtaaaagagtaccattttacccgaaaaccccctttcctgtacccgaaacggcaaatgccgtaatcttaaaacccgtcattcccgacaacaccgtaatctcgaaacccgtcattcccgcgtaggcgggaatccagacctgtccgcacagaaacttatcggataaaaacagttgctcaaacccctcgttctagattcccactttcgtgggaatgacggttcagttgcgttccaacaacaccgcaatctcgaaatccgtcattcccgcgcaggcgggaatccagacccctgacgcggcgggaatctatcggaaatgactgaaaccccgagattctagattcccactttcgtgggaatgacggttcagttgcgttccgacaacaccgtaatctcgaaatccgtcattcccgcacaggcgggaatccagacccctgacgcggcgggaatctatcggaaatgactgaaacctcgagattctagattcccactttcgtgggaatgacggttcagttgcgttccgacaacaccgtaatctcgaaatccgtcattcccgcacaggcgggaatccagacccctgacgcggcgggaatctatcggaaatgactgaaaccccgagattctagattcccactttcgtgggaatgacggttcagttgcgttccgacaacaccgcaatctcgaaatccgtcattcccgcacaggcgggaatccagacccacgacgcggcgggaatctatcggaaatgactgaaacctcgagattctagattcccactttcgtgggaatgacggttcagttgcattccgacaacaccgcaatcttgaaacccctccgccgttataaagacaaatcgcggcacaaaaaatgccgtctgaaatgctgttcggcggtttcagacggcatttgctcaaactttatcaggcgtaatggcgcgtttcgccttctccgccgacattctctgcacagcgtttgcagacggtttcatagcctgcaaccgcgcccacatcgcgggtgtagtgccagcagcgttcgcatttttcaccatcactggctttagcggcaacggcaagttcgctgcctactttcacttctgctttagacaccagcatggcaaagcgcaattcttcgcccaaggcgttcaggtagccggccatttcttccggcgcggtgatttcggcttcggcttgcaaggacgaaccgacggttttgtcggcgcgcaaaggctcgatggcggcggttaccgcttcgcgggcttcgcggattgccgtccattttttcaccagttcggcttcggttttttcgttgatggtcgggaactcgtgccaagtatggaagaggacgctgtcttcttcgccgccgccgatgatgtcccacgcttcttcgccggtaaagcacaaaatcggtgcaatcaagagaaccaggctgcgcgtgatgtggtacagggcggtttgcgcgctgcggcgggcgcggctgtcggctttggtggtgtagaggcggtctttcaggatatcgaggtagaacgcgcccaagtcttccgagcagaaagaaaccatttctttcacggcaaaatggaaggcataacgcggatagtaatcgcctgccagacgctcttgcagccgacgcgccaacaccagggcatagcggtcgatttccaccatatccgcctgttgcacggcatcttcaatcggattaaagtcgctcaagttggcaaacaaaaagctcaaggtattgcggatacggcggtagctttcggttacgcgcttaaggatttctttagaaatcgccaattcgccgctgtaatcggtagatgccgcccacagacgcaggatgtccgcgccgaattcgttatagacttcttgcggcgcgacgacgttgccgatggatttcgacatttttttgccttcgccgtctacaacaaaaccgtgggtcagcagctgtttatacggtgcgcgtcccattgatgaggcgcagccggtcagcatggacgattgaaaccagccccggtgctggtcgctgccttcgagatacaaatccgccggccattccaattcttcgcgttgtttcacaacggaataatgggtcgaaccggaatcgaaccatacgtccatcgtatcggggagtttgtcgtaatgttcgcaatcttccgcgcttaataattcgcttttatcgagggagaaccaagcctcgatgcctttttcttcgattttcagggcaactttttccaaaagttcggcagagttcggatgcagctcgcccgtttctttgtgaacaaagaaagtcatcggcgtgccccaatagcgttggcgtgaaaccacccagtcaggacgaccttcaatcatggcttccaaacgcgcgcgaccccaagacgggaagaattcggtgtcgtccacggccttgatggctttgtcgcgcagggttttgccgtcggcaccggctttgtccataccgacaaaccattgaccggtcgcgcggtaaatcagcggcgttttgtgccgccagcagtgggcgtagctgtgttcgattttactgcttgccaaaaggttgccggtttcttccaaccattgcaggatgacggggttcgcctcccaaacgcgcataccggcaacgcgcagcgtttcgccgatgtatttgccttcggcgttgacaggattgtaaagctcgatgccgtatttgttgcagacggcgtagtcttccaaa

SEQ ID NO: 3159 - DNA, 23240 bp, synthetic construct
  misc_feature 1..23240: note = Synthetic
  source 1..23240: mol_type = other DNA
tggctttggttgatgaaaacatgccggtggtggtgattgcgccgaaagaccaattgctggataaagtgaaagccaacatgcaggaagtaggcgcgcgcggcggtgaattgtttgtattcaccgatctggacagccacttcgaagaaagcgaaggcgtacacatcatccgcacaccgcgccacgtcggcgccctgtcgcctatcttgcacaccgtaccggtacagctcttgtcttaccacgcggctttggcacgcggcacggatgtggacaaaccgcgcaacttggcaaaatcggtaactgtggagtaatacgaatacaaaagccgcatttcatatgcggcttttttgtttattgtattaaacatcttgcgaacaatgcctgtctgaaaagttttcagacaggcattgttgtaggtaggccttgctttagttaaaccgaagcagccaaagcctgttccaaatcggccagcaaatcgtcgatatgttcgatgccgatggagaggcggaccatgtcttcgctcacgcctgcctgtgccagctcttcggcattgagttggcggtgggtggtgctggcggggtgggtggcgagcgatttggcgtcgccgatgttgaccaaacgggtaaacagttgcaaggcgtcgataaatttgccgcctgcctcaatgccgcctttgatgccgaagctgagcaggccggaggctttgccggcgaagtctcggtcaatcagggttttgtaggggctatcggccaggccggggtagttcacccagttgacttgcgggtgtttttgcaggaactcggccactttgagcgcgttgtcgctgtggcgttccatacgcagggcgagggtttcgaggccttgcaggattaagaatacgttcatcgggctgatggccgcgccggtgttgcgcagcggcacgacgcgtgcgcgggcgatgtaggcggcggagccgaagtgttcgctgtaattaacgccgtggtaagacacgtcgggcgtggtcaacactttgaagcggtcgcctttggtccagtcgaatttgccaccgtcgataatcgcgccgccgatgctggtgccgtggccgccgatgtatttggtgagggattcaaccacaatatcggcaccaagctcaatcgggcgacacaaggcgggcgaggcgacagtgttgtccaccaccagcggcaagccttgtgcgtgtgcggcttcggcaaaggcgcgcaggtcaaccacgttgatggcagggttgccaatgctttcgcagtaaacgagcttggtgcgcgcgtcggtgttggcggcgatttcttcgggtttggccgggtcgataaaacgcacttcgatgccttgcttgggcagggtgtgggcaaacaagttgaaggtgccgccgtagagggttttggtggcgatgatgttgtcgcccgcttcggcgatggtttggatggcgtaggtaatcgccgccatgccgctggccacgcacaatgcggcgatgccgccttcaatggcagccaaacgctcttccaaaacggcggtggtggggttcatgatgcgggtgtagatgttgccggccacattgaggttgaacaaatcggcgccgtgccgggtgttgtcgaatgcgtagctggtggtttggtaaatcggcacggcggcggctttggtggtgggttcgggctcgtagccgacatggatggcttgggtttcgagtttcatatttgctccgttgtattgtgcgagtgcataaagccgttattgtacatgatgaaaaatagttaaggccgtctgaaagcgagcttgcgggttcgctaaaacaatgcggcaaatccgtttcacaatagcatgtgcgtcatgcttgagcgtcacatctgtcacatttgttttgtcacaccggcctgatgttactgtcacatcaggccgtctgaaaaatctaaaaaacaaatctttctataaaaatcatctggttatctttaaattttcagacaggcacatgaattgctttacttattaaaaaaacaagatctgcaaggagaaaaaccatgtctgccaccgttcgcgtcggcattattgccaaccctgtttccgcccgcgatatacgccgcattatttcccatgcgtcggggctgccgctgggcgagcgtgtgaatatgttggtccgcattttgtctgcgctggcggcgtgcggtgtggacgaggtgctgctgatgccggaaatggaaggcctgcgcatgctgctggaacggcggctgccggccgtggtcagcgcgctggaatatccgttgccgcgcctgcgctggctcgatatggcggtgaacaacgacaccggcgattcggtggcagcggccgggatgatgcgtgaagaaggtgtgtcggcgattttggtgtcgggcggcgacggtacgcaccgcgcggtgttgaaaggctgcggcgacattcccatcgcgggcatttccaccggcaccaacaatgcgtttccgccgatgcgcgaagtaaccatcacagcgtgggcggtgggcctgtatgccgttgaaaacgtgccgcgcgaacattcgctgcgtgccaataaattcctgcatatccgcaaatacgacgcggcaggaaaagaaatgttgcatgaaatcgcgctgattgacgcggctgttttgaacgagggcattctcggtgcaaaagccatcagcgaaacggatacgctgcgcacgtttatcactacgcaggcttcggttgaggcggtggggctgtcggctgtggcggcggttttggagccggtaggccgctatgaagccggcggattgctggtggaactggtgccgtcttacggttcgcatgcgccggcgggcaaggcgttttccgttcaagccgtgctcacgccgggcttggtcgaatacatcagcatcggttcttaccgccgctttttcgagggcgacgaataccgcctgagcgggcaaaccggcttggtggcgttggacggcgaacgggaaatcgtgttccgtgaagaagaaagcattgccatcactttacaggaaggcgcgttttacacgctggatgtgcctgcggtattgcaatttgtcaacgcacaaaggcgcggccaacggtaaatgctttcagacaggcatagcaggccgtctgaaacagtatattttgaaacagccaaacggcgggcaaggatgcccgccctacggcacccaaccgcaccccataaaacaaaaccaaaaaggccgtctgaaaaccctttttcagacaggcatcaacgaaaacccgctgaataaggagaaacccaatgagcatcaaactgcctttagaaaaaaaccaactgctcgaagtctaccgtcgcatgaaaacgatacgcgaatttgaagagcggctgcatatcgacttctcgcgcggcgacattcccggcttcgtacatctttacgcaggcgaagaagccaccggcgtgggcgtgattttccacttgaacgacaacgaccacatcgccagcacccaccgcgggcacggccactgcatcgccaaaggcgtggacgtgatcggcatgatgaaagaaatctacggcaagcgcgacggcgtgtgccgcggcaaaggcggctcgatgcacatcgccgatttgtcgaaaggcatgatgggtgcgaacggcattgtcggtgcgggtgcgccgctggcctgcggtgctgcgttggcagccaaatttcaaggcaaaggcggcgtggccattactttctgcggcgacggcgcggccaaccaaggtaccgtgttggaaagcctgaacttggcggccatctggaatctgccggtgatttttgtgattgagaacaacggttacgccgaatccaccgcgcgcgattacggcaccgccgccaacagcttcgccgaccgcggcatcggtttcggcattcccggcgtggtggtggacggcaacgactttttcgccgtgtacgaagctgccggcgaagtgatccggcgcgcccgcaacggcggcggcccggcattgctcgaatgcaaaaccaaccgtttcttcggccactttgaaggcgacgcacaaacctaccgcccgaaaggagaagtcgacaacctgcgcgcccaccacgactgcctgaaaatcttccgccaacgcgttaccgaagccggcgtgatgaccgatgccgaattggacgccatcgacaaagaagtgctcgaattgatcgaacgctcggtgcaggaagccaaagccgcgccggtgccgacgccggaagatttgctgactgatgtttatgtaagctattaaaaaccaaaaaacaggagaaacagatcatgtcccgccaattaaccatgaaattagcacttaacgaagccatcgatcaggaaatgagctgcgatcccaccgtgattatgatgggagaagacattgtcggaggcgcaggtgccggcggcgaacgcgacgcttggggcggcgtactcggcctctccaaagggctgtatgccaaacacggcgaccgcctgatggacacgccgctttccgaagccgcctacataggtgcggccatcggcgccgccacttgcggcatgcgcccgattgccgaattgatgtttatcgattttatgggtgtgtgcttcgaccaaattctcaaccaagccgccaagttccgctatatgttcggcggcaaagcagaaacccccgtcgttatccgcgcgatggtcggcggcggcttcagcgcagcggcgcagcacagccaaatgctcacgcccatgttcacccatgtgccgggcttgaaagtggtgtgcccgtccaacccttatgacgccaaaggcttgctggttcaggccatccgcgacaacgaccccgtgattttctgcgaacacaaaagcctgtacggcgtaaaaggcgacgtgccggaggagctgtataccctccccttcggccaagccaacgtcgtgcgcgagggcaaagatgccaccatcgtcgcctacggcatgatggttcagcgcagcatggatgccgccaaactgttggaaaaagaaggcattgaagtcgaaatcatcgacctgcgtaccctctctccgctcgacatcgacaccgtgttgaattccgtagaaaaaaccggccgcttggtcgtggtggacgaagccagcccgcgctgcaacatcgccaccgacatttccgcccaagtatgccagcacatgttcggcgcgctcaaagcaggcatccgaatggtgtcgccgccgcacacgcccgtgccgttctccaacgtattggaaaaactgtatctgcccggcggcaaacaaatcgccgacgccgtgcgcaaaaccttaggtaaggttgaggccgtctgaaaaccatgatcaaagcaacggcgggcaaacatgcccgccctgccgaagccatacctgaacccgctgaaatcttgttcagacggcatttaccataaacaaaggagaacaccatgagcaacatcaaacccgttatcatccccaaatggggcctgaccatggaagaaggcactatcagcgaatggctggtcgatgtcggcacccccgtaaccgtcggcatggaaatcctcagcatcgacaccgacaaactcaccaacgccgtcgaagccgccgacgcaggcgtattgcgccgcatcctgcacggcgccggcgaaaccctgccggtcaaaaccctgatcggcatcctctccgacgccgacacacccgaagccgacatcgacgcctttatcgccaactgggtgccgccctctgccgacgaagtggacgaataaaccaaattaaaaacgagccataaccatgcctgtctgaaacccaatttaacgtttcagacaggcatccgaaactcattgagctatttttacaatccgcaacaatttcggcacaaataaaaaacaaccttacacaaagcctgtttgctttaacatcaggcttgctacaattttaagcacctgtgtcaattttgatgaagcaggtaaatgggcatatcccgctcataatcaaatcaactcaagaaaggtttccgcatgaaacatcaatctgcacgtttggctgcctttatggtggcagctttgggagcgtcgttttctaccgctgcaatggccgatgaagtaaccggcccctacattcaaggcgatatcggcttggccaatataaaagtagatgatgacgaaaaattcaaagtgcgcgacacattcaaaagcttgaaaaactcttacaaagattcaggctttatgccccgtgtaagcgccggttatgatttcggcgacgtgcgcgtagccggtgattatacccactacaaaaacatgaatgacagcgccaaaaaaggcgatgagcagctggacgttaaagtgaaagcccgaggtatgggcgcatctgtgatttacgatattccgctgcaatccaacttccaaccctacgttggtgcgcgcttatccgccaaccggttgaagtatgaatcgcatggcgtttcagccggcacccgctcccatacttccaaaagcaaaaccaaagtaggctacggcgcaatggccggtgtgggctacaaattcagcaacaatctggccgccgatgtgggctaccgctacaaccgtttggattcagacctgaaagcgcatgaagtatctgccggtgtgcgctatacattcaactgattcaaaatcctttgtggctgacatataaaaagcgtactgcttcggcggtaggctttttttacatcatatagtcaatcaatttaaaaaaagtacacacgtcatactcgggtcaagccagagtatgacggtgctattgctatgtaagtggtttaattatatgcctgtctgaaaacgcgtttttctttttcagacaggcatttcctctttatcatcttctaatcggcatgccaaccaccgcccaacgccttatacaaaccgatcaacatccgcgcgcgcgccagttgcgattgaatcaggttttcctgcatcgcttcttcgttcaggcgtgcggtgagggcgttatcgagcgttttctggccgtatttaaacagtttttcggcatcgcccgcctgttttgccgcctgtttgtgcgcggtaacgagcaaggtgttttggcgggtgagcgcgctgtgtgcctgatatgcgctgtccacttcgccgagggctttgagaatgttttggtcgtattgcaataaggccgtctgaagccgtgcatcggcggcggcgatattggctttgatgcgtccgttggtgaaaatcggcactttgatgcccgctttgattaagctgccccagccttttaaatcgctgtcgctgtcgatactgatggtgcctctacccaaaaattcgatggtaaaccgcggcagcaaatcggctttggcgctggcgagcttggcggcataggcgttcacttgcgcggcatgggcgcggatgtcggggcgacgctcaagcaggccttgcggggtttggccgctcggtgcggcgggttgtgcagtcaaaatgttgacgctgctttcaggcaaggcaaatgtttgcggggtttggccggtaagcacggcgatgctgcgtacatgggcggcgtattccgattcgatggtgctttgtttggcgcgcaaggcggtgagcttgctggcgacttcgtccacttcataagcggtaacgtggcctgctttgaaacggccttgcacatatttcgccagccgctcgacggtggcgatattgcggttgaccgatttcaaacgcgcttgggcggcacgggcttgcaggtaatgctcggcaatttcgccgccgatcagcacttgcgtgccgtacacttcttcctgcctgccgagcgcggcataagcggcggcatcggcatcgctgcgtttctgcccgaaaatatccggttcccacgacgcggaaaaaccacccgtgaggctgttgcctttcaacgtgaaacgctcgcccgccaaatcggcagcctgcggaatccttccgagcacggcgcgggcttcgtcgctcagcgggttgctgatgcgggcgttgaggcgcgatgcttccgcgcccgcaccgaccgtcgggcctttgtcagtatcggccaagcgctcaatggcgcgcgcttcgttcaaacggctgcgggcgatttggatatcgtggttttgctgcaaaccttgttcgattaagcggctgagtacggggtcgttccaatgctgccaccagcggccgatttccgcgctgccgcgcgccgcttccgcttggctgaaggcttgcggaatatcgattttgctttcgagcggcacaacggtgtttttgcaggcggcgagcatcaacgccaacatcaggctgcttgcaacagggttcaaacggggtttcatggcttttccttatctttattttcagacaggcatggaggccgtctgaaagcgagctgtgcgagcttcgctaaaacccgctagcgggtttcgctaaagcaaactttgcgagtttcgctaaaacgtttgtgcagattgcttcggtcatacggcttacacatatttctccgcctcgcggatactgagtttcgccatacggctgcggtaacgttcgataaatgcccgcacccattcggggttggttttactgtaatcgcgcaaagcccagccgatggctttgttgatgaaaaattctttttgttccagattgttgcagataatttgctccagcagcgcggtgtcggttttgtctttgcgcaaaagttggtggtcgatggcgacgcgccgcagccagatattgccgctgttgctccaatccagcagcacggcattggtttcggggtaaaccaaagcgatgccgccgacaatgcggtcgagcacgtccgccgtatcccaccacgatttttcggtaatcagctttttcaggtgcggaatgtcttgtagcgtgagctttttctgcatggttttcagatactcaagcgcacagtattgcagctcgcggtgcggattagcccaacattgttcgacaaaccgccagtcaacttcttctgccgccgcatttttaaacaacggcttgcagattttagccaaacgcggcttgctgatgccgagatagtcgaaacggtgtttcatataggctttcatcggcacggcgcgttcggggtcggcttcacgggtaaggatagcgagcagttcttcgtaattcatcgtatgcacctttttcagacggccaacaatgccattcgagcctgcaagttattctttaagctgcacaaaagaaatgccgttgccttcgggatcggccacatcgtaagccagcaccacttcccaatcgacaatttcccccgcctcaatgcctgctcgaataagcgcttcgcggcaagcggccacgtcgtccacaccgataaccaccgccgctttaccgcccgcctccgcaccggtaagttgcagccaagcatggtcggcaatacgccattccgccatgccttccatcggcacctcgtccggctcactcagccatgtttgataccacgccagcgcggtttcataatccgccacattgataacggaaaccaaatcgttggttttaaacagtttcatgcttttctcctgcgtgtagaagattgtgattgtttttcagacaggcattgcgccttgccgttccaacaatgttttttactccgccactgccacatcaagctccacagtttggtatttcggatattttaggcttagggagtttggttatctaagaataccgcacctttgatatcaattggaaggttcctgactttggaacagttgattgttttcagacggcctgctcgggcttgccccgagtatgacgagcgtactatttttatctttaagttgattcaccataacaggctttttcagatattaataaagacgatgcccctgtttaagcggacttaaacaggggctcaactcatttctgaatctttacgtcgcggcacgtcttttcagacggccttattgtagcaacggctctcatctcgtagtgcaacaataaatttgattctaatgatgatgaaaacacttgtcaaatatttatttctttactataaataagcgtatgtatttttttgtaaatcaagatgaaaagaggaagaaatgaaaaaacagccgcaacgctatattttgggtttggatttgggtattgcttcagtaggctgggccttgatcttagtggatggagcggaaaatcccgtcggcctgctggattgcggggtacgcacgtttgaacgggcggaagtgccgaaaacaggcgattctttagccttggcccgcaggcaggcgcgcagtgtgcgccgcttaatccgccgccgcgcccaccgtttactgcggttgcgccgcctgctcaagcgcgaaggtattttgagtgctgccgactttaattcagacggcctgcctaatctgccgattgatgcttggcagttgcgtgtggcgggcttggagcgaaaactgacaaatcaagagtgggcggcggtattgctgcatttggtcaaacaccgcggttatctgtcgcaacgaaaaagcgaaacccaaacggaaaacaaagaattaggacgtctccttgccggcgtggccgaaaacagcaaactgctgtcagaaagctccgaacaataccgcacgcctgccgaattggcggttaaattatttgcggaacaatcggggcgtttgcgcaataaaggcggtgattacacccacactttcaaccgcttggatttacagaaagagctgcatttgctgttcgagcggcaatgtgcgctcggaaacccgtttgcttcggcagagttgcaaagcaaagttgacgaattactgatgacgcaacgcagtgccttacagggtgaagcagtgttgaaaatgctcggtaaatgcacatttgagccttccgaatacaaagcggctaaaaatacttattctgccgagcggtttatttggctgaccaaactaaacaacctgcggattctgtacaacggcgaagatcgggctttggatgaaggagagcgcaaacaactgttggacgagccgtataaaaaagccaaactaacgtataaacaggtgcgttcaatattgaatctgcctgaaagcgcagtattcaaagggctgcgttacggaaaagattcagacggcctcaaggcggaaaacggcacattaatggaaatgaaggcctaccacaaaatccgcacggtattggacaaagcaggtttgaaaggcgaatgggaaaaccgcatccgcaatcccgaaatactggataaaatcggcacggcattttcactgtataaaaccgatgaagatattcaagcaaccttggccgatttaaggctacctgaaaatgtgttggacgcgctgctggcaggtttgaactttgataagtttatccaactttcgctgaaagccttaaggaatattctgcctttaatggaacgcggcatacgctatgacgaagcctgcaaagaagtttacggcgatcaccgtgccttggcagaatcgaaaaaccaagtgctgctgccacccattcctgccggcgaaatccgcaatcctgtggtactgcgcacactcacgcaagcacgcaaagtgattaacgcgattatccgccgctacggttcgccgcagcgggtgcatatcgaaaccgcacgcgagttgggcaaatcgtttaaagatcgaaaggaaatcgaaaaacgtcaggaagaaaaccgcaaagaacgcgagcgggcggcggaacattttaaagaattgttcccacattttgcgggagaacccaaaggcggagatattctgaaactgcgcctgtatgaacagcaacaaggtaaatgcctgtattccggcataccgatagatttaggccgtctgaacgaaaaaggctacgtggaaatcgaccacgccctgccgttttcccgcacttgggacgacagctttaaaaacaaagtgctggtattgggcagcgaaaaccagaaaaagcgcaatcaaacgccttatgaatatcttgatggtgccggtaatagccaacgctggcgcgaatttcaggcgcgggtacaaggctgccgttttccctatcctaaaaaacagcatattcagacggccaagttggacgacaaagccgaacaaggctttttggaacgcaatctgaacgatacccgttatattgcccgctttttatgcggctttattgaaaaaaacctgcatctgcaaggcaccggcaaacggcgcgtattcgcatcaaacggccaaatcactgccctgctgcgcggtttgtggggcttgaaaaaagtaagggaagacaacgaccgccaccacgcactcgatgccattgtagtcgcctgctctaccgtttccatgcagcagaaaatcaccaaagccatgcagcggcgtgaaactttggaaaccgtggatagcgaaaccggcgaagtcaaaacccgcattccgcagccgtgggatttcttccgccaagaagtgatgatacgggtattcagcgactttccccgtgaagagctggctgagaaattaaacagccggcctgaagcattgcatgattttgtatcgcctttatttgtctcacgcgcccccaaccgcaagatgacaggacaagggcatcttgaaaccgtcaaatccgccaaacgcctgtctgaaaacatcagcgtggtgagaaagccattgacagcgttaaaactgaaagacattgaaaacatcgtcggctatcccgaccgcgagcctgctttatatcaagctttgcaggaacggttgcaggcgtataaagacgatcccgttaaagcgtttgccgatcaaccgttttacaagcctgcgaaagatggcgggcaagggtcattggtcaaagcggtgcgggtggaggatgtacagaaaaccggtgtgatggttcgaaaagaccgtagcggtacggcacgcggtattgccgacaacgctaccatggtgcgagtagatgtattcggcaaaaacggtaaaaattatctggtgccggtttatgcttggcaagtagcaaaaggtattttgccgaatagagcggtagtggcaaataaagatgaaagctgttgggatttaattgatgaaaattttgatttccaattcactctgtatcctaacgatttgattaaagttgtaactaaaaaagataagttttttggttattacgttggtttggatagggcaacaggtgctattactcttaaagaacatgatttagagaaaagaaaaggtaaagatggaatacaccgcagtattggcgtaaaagccgtttctattttccaaaaataccaagtggatcttttgggtaaagaaatccgcctttgcaaagtagaaaaacgcactggattgaatggcaaaaagaaaaaataacccttagcggctgcaccttcaatggtgtagccgttttactatataacccattcaaaaaagctacttacggagaaaataaaatgacttggcgcagcattttaatcagccgccctgcacgcctatcgctgcaacaaagccacctgctgattcaacaggacgaagccatacctataccgctggaagacatcgccgttattgtagtcgaagcacgggaagtggtactaaccgcacccttgctgtctgcactggcacaatacggcatcaccctgcttacctgcgacgaacaatttttgccctgcggccaatggctgccgtttgcacaataccaccgcagcctgaaagtgctcaaacaacaaatcaatatgacagaaccgcaaaaaaagcagctgtggcaacagattgtgaaacagaaaatccgcaatcaggcttggctgctcgattacagcggccacgatattgccgcaagccgtctgaatgccttggccgacagcgtaaaatccggcgataaaaacttcgccgaaagccaagctgccgctttgtatttccgcgtactgttcggagaacaatttgcccgcagtcatgaaaacagcgtaaatgcccatttgaattacggttacagcattctgcgttcggccgttgcccgtgcacttgtgcaatacggctttctacctgcgctcggactgcaccaccgcagcgaactcaatcctttcaatttggccgacgactttatcgaaccatatcgtcccattgcggatttatgggtttacgacaagatgctttccaacagtctgccagaggagctggtacccgcaagcaaacaacaactaatctctttgttatgctgccaagcagctttggagggaaacaaatatagtgtattggctgccatagaccgcaccatacaatcttttcagacggccatcagccaaaacaaacccaaacttttaaaactgccacaaatgctgcgcttaaaggtacatgattatgagtgaggccaaatttatgcgcttaatcgttttctttgacttgcctgtaaccaccgctgccaaaagaaaagcagccaaccaattccgtaaatttctacagaaagacggttatcacatgctgcaattatcggtttattcacgcattgtaaaaggacgcgactcgttgcagaaacaccacaaaagactgttagtacatttgcccgaagaaggccaagtccgctatttagaggtaacagaaaaacaatatgcaagcatggttatgcttattggagagccaaaaccccgcgaaaaaaaggtcaatgccgaccaacttttacttttttaaagtcgttttttttaaccaaaataaaacagggaaaccttattttataaggcttccctattgaaggattgtagcactacgagatgagagaggaagctacaaccttctttaaaagaactacaacgcaaaaccgcattgtagcactacgagatgagagaggaagctacaactagagtaccatcggtagtgatgtgtggtttattgtagcactacgagatgagagaggaagctacaactcacaacaacagcttgggacgaaaacggaaaattgtagcactacgagatgagagaggaagctacaacattagaatcatcccaacgtatattaaatttattgtagcactacgagatgagagaggaagctacaacaatggcaacaacgtcaatatcgcccttttcattgtagcactacgagatgagagaggaagctacaacgccggcacggcgtgccgattcgctacgcgtattgtagcactacgagatgagagaggaagctacaacaatgaatcttgacgatttaaccatgcaaaaattgtagcactacgagatgagagaggaagctacaacgctgatgcggtcgcgctccgcgatattggcattgtagcactacgagatgagagaggaagctacaacggctgtctgaaaatgaataagctggattttattgtagcactacgagatgagagaggaagctacaacaatggacaaggttaaagctatcagtatgttattgtagcactacgagatgagagaggaagctacaactgtcgtaaccaatcaaaataccggtcgtatattgtagcactacgagatgagagaggaagctacaacgttgtaacaccattatcttctacatcataaattgtagcactacgagatgagagaggaagctacaaccaatttaagtcgcaaccggttgattcttgtattgtagcactacgagatgagagaggaagctacaacaacagacatcactatcggcatcgcgaaagcattgtagcactacgagatgagagaggaagctacaacagagctttacaacatgaaccgtgaacatgtattgtagcactacgagatgagagaggaagctacaacaagcgaacaggcacatgattatgtgctgtcattgtagcactacgagatgagagaggaagctacaacccaacggcagtggttcgggtagtggctcggattgtagcactacgagatgagagaggaagctacaacgcttttttctttgccctgtttggcttttatattgtagcactacgagatgagagaggaagctacaaccaccaccgcagtatcgttatcggcgagcttattgtagcactacgagatgagagaggaagctacaacttttgtccgtaagctagttcaacggcatatattgtagcactacgagatgagagaggaagctacaacattcgcttgcatcaagattcagctccttaaattgtagcactacgagatgagagaggaagctacaacggtttaccatcttagggtttctgatgggcaattgtagcactacgagatgagagaggaagctacaaccgaactaacgggcactgctgatcgtatattattgtagcactacgagatgagagaggaagctacaacgttaatcaagctggagcaggcggaaattatattgtagcactacgagatgagagaggaagctacaacccgcagcaatccaatatggtattgggttctattgtagcactacgagatgagagaggaagctacaaccaataaagtcgttgatactgcgatgctgcaattgtagcactacaagatgagagaggaagctacgaccacgcttgaagttttattttcttctttttcaccgtcacgaccatatcaatttccatcttatcttttttcagacaggcattgcgccttccaattccaacaatgcctttttccgcgcaaggccgccgccgtagccggttaaatcgccgttactgccgatcacgcggtggcacggtatcaggatggaaattttgttctgcccgttggcagaagctacggcgcgcacggcctgcggtttgccgatgcgttccgcctgctgcttgtagctgcgggtttcgccgtaaggaatgctttgcaatgcgcgccaaacttgctgctgaaacggtgtgccgaccgggtcgagcggcgtggcgaagtttttcagacggccttcaaaatacagattcaactcttgctgtaaagtttggctgtacgccgtgtcgcgccacacaaaatccgcttgaaatgctttttgcaccgccaagagttcgctctccaaccttttgcactcgggaaactccagcaagcataagccttgtgtgccgaatacggccaacatctgccccaacggggtggcgtgcacagaaaccgtcagcccgttgtcgtgtttgctgttgcgttgtgccagcaggtgtgtgatgcgtttcaggcggatgtactgcccgagcgacatgccgacgtgccgctcgaaatcttttttcaacgcaaccggttcgtgtgccgattcgagcgggtgatcgcggtaggattcgggcggattttcccgtgcggccagccatgcggcataagcctgccaccgtgcgggaagcaaggtttgcggatcgggcagccggcggatatccatggagtttccttgcagtgttcagacaggcactctaataataatcaaaataacaaatctttgatatcaatgtgttatccgagttcaatattatatctgtgccattaattttcagacggcctgcataggctttagaagcctgtcagcctattgctttcaatctatctttgctaaaattatattcttttgaaatagtaaccaacccatccaataaagcacctgtcatgattatcaaacaagcacacaaccgggaacgtgatatcgaggagctaaacacattattggcattgccctatatcgattccgatactaaagataaaatcagccgtgaaatcagaaacatccaatccggcatgaaaggcgaaaaagaagcggcctaccacatgaatttccaatggacggaatctaaaaattggatggtcatccatgatttaaggctggaatacaacggccatgtagcccaaatagaccatttgctgcttaaccgctttatggaaatttatgtgtgcgaaagcaaacgcttcggcgaaggcattgccattaatgaacacggcgaattttcagcattttacaaggggaaatcttatggcataccctccccgatagagcaaaacaaccatcatatcaaactgcttcaaagacttttcgacagcgacagcatcgagctgcccatcaggctgggggttaagatgaaacccaagctcatcagcctgattttaatcgccaattcagcgcgtatttcacgccctaaaaatgaaaaaagcgttgagggcttagacagaatcattaaaaacgagcaaatcgttaaaagaatcaacagagatattgataatgaaaacatctttagcatggtaaagtcggtatctaaaatcatctctccggaaactttgcagtcgttcgccgaatctttagccgccttgcacaagccattggaaatgaattggcgggcaaggttcggtatcaatgagccgattgaacccgctccggttaaagcggaacatgttaatcctgttcaatctcaagatgagattcagccccaagccgatgtgcaagataacgctccgaatgctgcgccagcccgcttgttttgcgccagctgcaaaaaaacggttagccccaaagtggcacatttttgctggagcaacaaagcccgctttcaaggcagggtgtattgttacaactgccaaagaagtgtcaaaaaaccggcagattagccggtacacatgccctttacacagcaggcatgacggataaaaatgcacaatctaccacgcacctgaggtattaagacttaatgaacacggccactttattctactttttcctctccagcatcctgattgccgccttgcccgggccggcgatgatgttggtgattcaaggtgcggtaaaaggtggttggcgcgcaggcttggcggttactttgggcattttggcggctgatgcggtgttgctggcagcggtttgcgtgggtttgggcgggctgatggcggcttcgcccaaaattttgtttgccatgaacacagcggcggctttatatctgcttcatctgggtgcgcgctctttgtatgaaatccgcagtatccgcggcggtttggttgagagcggcggcaacacgggctggaaaaccggctttttcgttaccatcatcaacccaaaaaccattatttttctgttggcttattttccccaattcatcgaaccctccgtgccgctttccgaaacggcgcagcttttggtgctttccgctttgtttctactggccgttgccgcggtgatgctggtgtacacgcaggcggctcatgtggcgcggaattatctggccaggccgattgcccgccgcgtgatggctttggtgtttggtctgctgctgatttatatcggggcggaaggcttgatcagcctttttgtgtaaggttttcagacaggcattgtgcaaagctatgcctgtctgaaaacgacgctttcttcatcaacttgaaaactacatttatcacgcaccaaacaacgcggccttaccttccgcgccggaaatatccagcacttcaatattttccccatccaacaccgcctgcgtgagcatggccacgccgccggaggggccgatttccaaaatgcggcggacgcccaaatctgccatgcggcggcattcttctacccaatcgaccggatcgaccaacacattttgcgcaatgccgcgcgcctgttctgcgtccaaaccgcaggccgccgcccattcggccacttgcgccacggcgggtgccagcgcgggatggtggaagccgacttccacctcaagcggcacaagcagtgattcgggggtgaggccgtctgaatcttttattgtggccgaaagctcatcacacacgcgctgcaccgattccggctgcccgctgaccacaaaggcttcttggctgttgcgcaggccgatgcacgggcgggcggctgggtcggttgaatcggcggggaataggctgtccaccatgtcggcaagctgctcccggctcacgccctgcaccatcaccatcgcatggccgccgtcgtgcatgtacatgccggtttttctgccttgcagggtggcggctgcgccaatcagttcggccaatgccagaatttcggcggcgcgctgcggttcgctaaccagataacggccgagtatgccttgcgaatgcccgatcacgcccgcagctttgccaatgtccaacccgcgtgcttgcaaggtgtgcagattggcgatttgcgaaaggaaaatgccgggcacgctcacggcagcgcgcaccaagtcgatttcgctgttgctgtctgcccacgcaatcggcacgaaaccctgcggccgtgcggcggcgagcagctccgccacgggtgcaaccattttggcggcggcatcggcaatcttgccggtttcctcccgcgcgccttcggccaaagcctcgcgcaacatgctgatccaatcaaacccttgcccagaaaaacacagcgcaaacggttcggcatgtacgcgctcaagcaggcgtttttgttcggtttcgttcatttctcgctcctttgtatgatgattttcagacggcctcagcggcctttatcctcctcaacactcagccctgctgctccagcatctttctaaaccgcatcagcgcaaatgccaaaaacagcaggccggtcaaagccattgccaaaagctgcggccacacgatgctcaagccggcattgcggaacagcacgctttgggcaaactgaataaactgcgtgctcggccaatattcgctgatccattgcgccgcggcgggcatattgttgcgcggcgaggccacgccggaaaacagcagcagcaccatgtacagcggaatcatcaagaggccgaactgcgccatgctcggcgcaatcgtggcaagcatcaccgccagtgcggcaatcgaaaacagatacacggccacgccgaagccgtagagcatgatggagccgtaaatcggcacgccgagtatgcctttcaccaccacccacatcgccaatatcgacaccagcaaaatcatcgcgctgttggccagcactttggcgagcatgatttcggcggcgttcaccggcatcaccagcagatgttcaatggtgccgtgttcgcgctcgcggataactgccgcgcccaccaaaatcagcgccaacaccatcaccatattgcccaactccatcggcgacccgtaatagctgccttcggcattggcgttgaaatgcgaacggatcaccggcttcacgggcagccatttttccgccgactgctgccgcgcaaactccgccgtttcgcgctccagaatgcgggtcagataagccgcgcccaaaccggcctgcgacatcgcggtggcatccacttgcagcagcaattctgggctgcgccccatcagcacatcgcgctcgaagttcggcggaatttccaaagtaaaaatgtactcgcccttatccatcgcctcatttaccgcttccgccgccacttcctgcggcggctggaaaaacggctcgcgcacagcatcacgcaggcggtaggaaagcgccgaacggtcgccgtccaccaccgccacggcagcgtttttcacccccgggtcgatttgggcggcggaaaaaatcgtaaccgtaaacataaacacaatcaacaccatcagcaccaagtcggaaaacaggctgcggagttctttttgtgctaagtagaagatgtttttaatgctgcgcatgggcttgccttggggtttcagacaggcatttcacaccgattcggcggttgcatcggtaaattcggccagtgtctgcaaaaatcgttcggggctttctttttgcggccagtgcttgtgctcttcaaacacttccagccgcgcctgcggcatgatggtggcggccgcttcggcatcggccagcggcacggccgggtctttgctgccgtgaaccagcagcacggggcagtcgattttcggcagctccggcagcaggcggcctgtgggtttgccgccgtaggtttcgctgagctggaaagattggaacgctttgccggcatcttctgccaaggcggcagtgcgcacttcgtccaccagttcggtgctgattttgccggcatcgccgaatagtgtggcggcaatcaggcggcgggtcagcaggcggctggcgcataggcggtaggccggcaggttccagcgcgagcgggcataccagccgcccaaccgcggccacggtagctcggtgctgatgccccacggtgccaccaacaccagccgcttgagcaggtgggggtagcgcaaagcaaactgcaaagccacgctgccgccgagcgacaggccgcataagttgatacgctgcaggcccagcgttttccaaagcgtgtagagaagctcggtgtaaaaatccagcgtgtagtcaatatcgggtttgctgctttggccgtagccgggcaggtcgggggcaaccaggtattcgttgcccggccactgcgttatgatttcgcgccacgacaacatagccgaatccaaaccgccgccgtgcagaaataaccaggcttcttcttggggccggcctgcggtgtggcaggtgaccgaaaggtcgtcagacagggttaaagtatgtgtttcgatagtgttcatcatgcatcttttccaaaatatgaagcgcgtttatattttcagccaacccgtttggattcagtatctcaatattcgggccggcttaatagaatggttgtatagccttttcagacaggcattccctcaaacccaacgccgaaccctacggcaataagccaaataaggcgcaccgaatttttgcgccagcacgcgctcttcgtggcggatttgaaagcggttcataccggcgacaaacaacggcagcccgagccaagacaggccgtgtcccagccacagcgcccaagctgcgagtatcagcaataagcccaaatacatcgggttgcgggtaaaacggtaaacgccgctgctcaccaagcgggaggctttgtcgagatgaaccgggttcatcgtggtttgtgcctgtctgaacgccgccacgcccgccgcgccgacggccaaacctaccgctgcgggcagcaaggcccaaactccggcagacggccattgcaaagccgcgaccggcgcgcccgccagcagccgcatcaatacagcgcaggcaatcaattgcaacaccggcgggattttcaggttttccatatcgcctccttttgcccgatacgttcagacaggcattatttttcctgcttcttcaaaatccagcaggccgaggtgaaatacaccacgtaaaacgccagcagcaccagcatttcgcggctcaggtcgtgcccgcccaagcctttggtaaagctgccgatactgatattgagataccacgacgcgggcatcagcttgcccatccagtacgccccgccttccatcgacgagagcggatgcagaaagccggaatagttgaaggtcgggatcataatcacaatcgcggtgaggctgatggccgccacttgcgagcgcacgatggtggaagccagcaagcccagcgcggtggacacgaacagcagaatca

SEQ ID NO: 3160 - DNA, 23234 bp, synthetic construct
  misc_feature 1..23234: note = Synthetic
  source 1..23234: mol_type = other DNA
cgcctgggcgcacgacctcgacaaggacatgccgcgctattgaatgcaaggacaaaaggccgtctgaaaagttttcagacggcctttaaacgacagggaatgcgtgcgtggcttgcgccacacaccctacaagggcagcacaaccgttttcagccgggtaggtcgggcattcatgcccgacatttccccaatccgccagtatttgtcgggcatgaatgcccaacctacgctatttccaacgtctgaaaaacagtttttggttgcgccgacgccgcgctttcagacggccttttaatatcaggcagcggtcagcgggcgtatcttgccgtaaggcgggcggtggcaaggattttgccgttgagcgtgaatccgagtacggcagggctggcggcgggaggcaggtcgagacggctgtcgagcgcgtagagggtaaagatgtagcggtgcgctttttcccctttgggcggacatgcgccgatatagcccgcctgccccgcatcattgttcagggcaaccgcacccgcaggcagcccgccgcctgcgggaaggccggaggcatcggcggggaggttgtacactgcccagtgccagaaaccgctgccggtaggtgcgtcggggtcgtaggcggtcagcaccagcgatttggcgtttgcaggcacgcccgaccatttgagcacggggctggtgttgccgccattgcagccgaagccgttggcaacttgcgcatcggccagccgtccggcgcggatgtcggggctggaaagctgcattttgcgggcgggtttttcaggctgccggacggcaagggtgtcggcatgggcaaaagaagcggccagcagcgcggaggcaagaaaagggatggttttcatgggaaactcctgtttggtgaaagcgtgcattaaagcacacggatgggtgttttgctaacatggaacacacacaacgacggcggtttccgcacattttccaagtggttttttgttttaataacgcccacacaaacgccaccccaaaaaccgcgtgcgtggcgcaagccacgcaccctacctgaacggcagaggccgtctgaaaaacgtttttcagacggcctttcgggtttccagccgctacatccgccgcatcataaacatgaaatacgcgccgccgagcagggtggcggtcatgccggcggggacttcgtaggggaacatgatttggcggccgagccagtcggcggcgggcatgacggcggcgccgatgagggcggcggagacgagctggtgtccggcgcggcgcgcgccgagcatggcggccaggtggggggcgagcaggccgacgaagctgagcgggccgatgagcagggtggccagcgcggtgaggatggcggagagcagcaccagcaccagccgtgcggcgggcacgttcacgcctgcggcggcggcgacgacggcgtcgaggctgagcagggcgagccagcgttgcagcggcaggacggcggccaggagcgcgagggcggcgagggcgacggtgatggcggcggcgggggtggcgtggtaggtggagccgctcatccaaatcaggagctgctgcacgcggaagtcgccgcctgccgtccagatgcggatggcggcgtcgctgagggcggccagtgccatgccggtgagcaggactttttcgggggcgaggccgtttttgcggttgaacagcagcaaaaggccgagagtggcgagggcggaggcgaggccggcgagccaaaaccagaggctgccggaggtgatgccgaacagcatgacggaggccatcgcgccgaaggcggtgcctgcgctgacgccgagcagttcgggaccggccatggggtttttggttacacgttgcaggatgacgccggtgatggcgagcatggtgccggtggcggcggccagcaggatgcgcgggtagcggaaggcgaagtaggcgggatcgacggtaagccgccagctttcgtcatagcgtccggccaagagggagaaggcgaggacggcggcggtgatggcgggcagcaggcgcagtacgggcgagggtttgagggggagggcgggggcgtcggaggcagcctgaaaggcggggcgcggcggggatttcatcagcagccacagcagcagcggcgcgccggccagcgcgctgaccgcgccggcgggcaggtcggtgccgtggtagtgtttgagcagcatcaggctgttgtcggtgagcatcagcagcatcgcgccgacggcgaaggagacggccagccgtgcggcgagggtgcgcacgccgctctggcgcaccagtgtggcggcagccagtccgacaaagcccatcatgccgacgtagccgaccacgctcgcgctgaggaaggcggcggccaggagtgcaatcaggcggatttttttgacgggaatgccgagcgactgcgcctgggtgtcgctcaaacccatgatggtgaggggtttgatgaggacggcgcacaccagcgcgaaggcggcggcgcgccacagcagttgcaggctgtcgtgccagctatcctgcaccagcgagccgctgccccactgcatcacaccgcgcgtttcttcgctgaagaacagcatgatgatgccggtgaacgagccgaggtagaggctgaccaccagtccggccaacacgacggtgagcggttgcagttcgcgccgcgccgagagggcgagcacgccgcccagcgcggcggcggcaccggcaaaggctacggccgagccgccgtcatccaagagcgcgggggcggccacggtggcggccaccagcgcggtttgcgcgccgctgctcaccgccagcgtgctgtcggaggccagcgggttgcgcatcagctgctgcatcagcatggtggccgccgccgtcgcgccgcctgagagcagcgccatcgccatgcgcggcagggtgttgttctgcacggtgagcgcggctatcggcaggctgtcgggcgcgtcgaacagacgggcaagcggcagcgtccattccagccgcagcacctgcgcggcggtgagggcgcacagcgcggccaaagcgaggcagagccatacggcaggcagcctgaaaaaacggtttaccacgggatttccttttcagagggcagtttttcgccgagctggttggcaaactgctgcatggcgggcaggccgccgtagctccacgagggggcgaagatgcggcggttggcgccgcgggaaaacggcagccgccgccacagggtgctgttttccagaatgcggcgggtgttcggcgggtgcggtttgaccacaatcagcagcgtgtccggcggcagcttggccagatccggcagggtgatgttggcaaagccccattcgttgctcgcgcccgtccaggcgttttgcaggccgagcttgtcgaacacggcctgaaacagcgaggttttgccgtaaatgcgcaggtggcggccgtcggcaaactgcaccaccgccagcgggcggctgcggtaggcggccagcgcggcgcagtgtctggcgaacagggtttcggtgtcggccaccagcttttcggcggcgggcgcgtcgccgatgattttgcccagcttgcgcgtcgttgccactgtgtgcgcgtagtctatgcctttgtccgtgccgaaggcgacttcgtacaccggcgcgattttttcaaactgcggcttggccgaggcgtaccacggcgactgcacgaaaaaatcgggcttgatctgatagagccgctccaaattgggctggaagcgcaaaccggcttccagcgtgcttttgggcagcggcgggtagtttacccaggtgtcgtacacgcggcggtcagccacgccgacgggcggatgccccatcgcggtaagggtttcggccaccgtccagtcggaagtggccacgcgcggcgcggcggcggcggtggcggcggcgcacaggcaaagcagcagggcggtgaggccgtctgaaaagcgggaaagcatgggaaaatcctatggcagggcgatggggcggccgttttcggggtgggcgatgatgttcatgtccacgctgtaaatgtctttgagcaccggcgcggtcatgatttcagacggcctgccggttttcagcagcctcccctgtttgagggcgaccagctcgtcgcagtattgggcggcgaggttgatgtcgtggatgacgatgaccacgcccagcccgagggtttgcgacaggtttttcaccaaggccatcacttcgatctggtgggcgatatccagcgcggccagcggctcgtccagcagcaggaagcggctctgctgcgccaggcacatcgccagccagatgcgcgagcgttcgccgccggagagggtgtcgacgatttggccggtgaagttttcggtgtgggtgaggcgcagggcttcggcgacggcttggcggtcggcttcgctggcgcgcccgagcaggccgctccatgcgtagcgtcccatcgccaccagttcttcggctttgagggcggtggccgagggcaggtattgcggcaggtaggcggtttggcgggcgtagctgcgggcggagtagctttggatgtccctgccgtcgaacaggatgcggccggatgcggggcggtgctggcgggtgagcagtttgagcagggtggatttgcccgagccgttgtggccgattaatccgtaaaccttgttggcttcaaaggagacggtgatgccgtgcagcagggtgcgctcgggcacggcgaaggtggcgttttcgatttggaacacggggcggatctttcgcaaaggggaaaaggcagtctgcgcagggcaacagcaaagctgaaatagggttgcgggttttcaggctgctttcggatggcttggcagcgggataataggccgtctgaaaaaacgaacaggatggtttcaggctgcaaaccgtgccgcgcaggaggaaatcttggcgggtcttatccgccggtttgtttttccaaccgtttcccaacagcaaacaagattcccgcttgcgcgggaatgacggtacgcggggcaggttcttcctgatttttcaggctgctttcggactgactgataagaggccgtctgaaaaacagtttttcagacggcctctttcacgcttagaagtccacgctggccgagagggtgaagctgcgcggtgcgccggcgttcaggtagccgctgccgggatagccgcccaccgatgcccagtattttttgttggttacgttgtcgaggcgggcgcggaaggtggcttcgtggccgccgatctgggtgcggtagcgcgcgccgaggtcgaagcgcgtccagcctttcacccttaacgtgttggcggcgtcggcgtaggatgagccggtgtaaaccatgcggccgtcaaaggccagcccctgcacctgcggcacttcccattccatgccgatgttggcctgggctttgggcacgccgatggtgcgtttgccttcggtggcggcgttgccggtggttttctgtttggcatcaaggaaagttacgccgcccaagactttcacgcctttggccgcttcgccgtacacgctgatttccgcgccgcgatggcggtctttgccgccggaagtgagttcggcgcggccgtcgccggtggtttggtagagcgaacgcggtttggcggtgtcgaacagggccaagcccgcgccgaagccgccgccttcaaacttcacgccgatttctttctgtttggaaacatagggtttgagtgattcgttggcattgcgcacggcgtaggtggtgccgttgatggtggcggatgcggcggcggtgtcgcctttggcgaggctttcgatgtagttgccgtacaccgacacattgggtgtgatgcggtacaccgcgccgaaggcggggctgacgcgcgattttttgtagtccgaggttttcgcgccggtgttgtaggcgaagtcctcattgtgaagctgctgccagcgtgcgccgagggtgaattgcaggcgtttgtcgagcaggctcacggtgtcgcccagcgcgaagctggtgagtttcagacggcctgtaaccgccggactgcccatgtcgttgccgacaaagggcgtgccccatgcgggttgcgggtagtaggacggctggtacagattggtggcgaactggttgccgaagtccatcacataggcgtttttgcgcgaggactggaagcggttgagtgccgccgcccattcgtgctgcaccgcgccggtggcgaatttgccgcgcaggccgacttcgccggtgtcgattttgtcgcggcgggcattgtcgaagcggtagaacgtgccgttgccgttaatattgttgaccgtgaggttggccagagagttggcctctttgctgcggcggaagccgtaggcggcgtaggcggtgagcttgtcgccgaaatcgtattcgccgcgcagcgtgccgaaccagtcgcgctcgttggaatagctccacggctgcgcccagttggtcgaggctttcggggcggacggcacttcggtaaggccggagagggtaacgttggggcgcgtggctttgagcttgttgtcctgccagcccaaatctgccgacagacgggcgttttcgccgcgccagtcgaggccgacgttcaacagcgaaagtttggatttttcgtggtcaacggtggttttgccgttgtggtgcgccgcgttcacacgcacgccgaaggcatcgtttgcgccgaaacggcgggcaacgtcggcagacaaaccgccgcgcgcgcccgcgccgtagttggcggaaacgcgggtcaggctttcattgggcgcgcgtttgggcagcaccgaaaccgtgccgcccgcgttgttgccgcccggcgccatgccgttgaggaaggccgacgcgcctttttgcacttccacgcgctcgaacagctcggtggcgatgtactggcgcggcagaatgccgtagaggccgttgtacatggtgtcgtcggattcgctggcgaaaccgcgaataaagtaggattcttggaaattgccgaagccgcgcgcgatgcgcacggtggggtcgttttgcagcacgtcgcccacgctgcgggcgtgtttgtcctgaatcaggcggttggtgtaggcggtgttggaaaacggcgattcgaggttgtttttgttgccgagaatgccgacgcggctgccccgcgccacctgcccgccgcgaaacgcgggcacaaggccgcctttggacgcgtccgcgctggcggttacggttacggtttgcagctcgccgccctcatcggcgtcgggcgtgtcggccaaagcggcggaagcggccagcagcgacaggctgatggcggtgagtttgaatgcgtgtttggacatgaggttttccgtgttgtcgtgaaaaaaagccgcgcattgtaacaaagaatgcttgcatttgtagtaaatatgaaaaatcatttcaactttgcgccgttttgatgtaggaaacatacgctttgcccgtccgggcgcgaaaaggccgtctgaaaagggggtttgcgctttttcagacggcctctttgccggatggggctgtgtttaaaagaaccagtgcatcagccacaccaccagatgtaccatcgaggggccgagcagcaccataaacagcccggccagtatcatggtgaggctggccatcacgccttcggtttcgtgccgctgccctgcccgcgaggtgccgaagccgtgggcggcgttgccgaacgccacgccgtgggcggtatggaaacggatgcgggtgagcgcgagaaacaggtcgccgaaaatcatgccgacaaagccggtgatgatggtgaacagcgacaccagcgaggccgagccgtgtatctcgcccgccagcaccacggcaaacggggtggaaaccgaacgcgccatcaggctgttggttacttcgctgctgaaatggaacatcctgcccatcacaaacgcgctggctacgccgacaaacatccccacgccgatggccaccgccaaaatcggcagctggcgcagaatcaccgcgcggttttcgtaaatcggcacggcaaaggccacggtaaccggcgtgagcagaaacacaatgccctgcgtgtatttgtggtaggtgtcgtaggaaatgcccaaccacaccatcaaaataatcgtgcccaccgacaccgttaccaccggtgaaagaatcatcagcggcttgatgcggtagattttcttggcggcggcataagccagacaggtccaaacaaaacaggccaaagcggtatagtccacaatcttccccttttcagtggtggtattttttatacagacggcgtttgaagcggtagcacacattcagcgtaaccgccgtgctcaccatcaccaaagccgtgcccaccgcaatcgtcagcaccagctgccaaccctccgagagcagcagatccttatattgcaacaccgacaccataatcgggataaagaaaaacaccaactcgcccagcacccacttcgccccgcgcgccaccatgcccaccttcaccaccccgccgcccagcagcgcgagcatcacaaacagccccagcacccccgaagacactggcaggtgcagcagccgcaccgccaaatccgacaccgcccacaccgcgccaatcagcgcgagctgcaaaccgttacgcaaaaaaccttccacggccaaccccgtatccgaatcaatgaaaggcttgattataggcaggcagcatcggcacaatatgaatgattcagacaaaaaccatgccccgaaagaataatatggacttcaaaagcctgcactgcttcgccgaactcgtgcgcctgcaaagtttttccgccgccgcccaagccctcagcctcacccagcccaccgtcagcaaaaccatacaggcattggaggccgaattgggcgtgccgctgctgcacaaagaaaacgggcgcaaaaaacgccaagtctcccccacccccatcggcgaagaagtgtaccgccacgccctcagcctgctgcacgagcgcgacctgctgctcgcccgcatcgacgactaccgccacatcaaaagcggcacgctgcgcttgggcatcgccctgctcggcagcgacctgctgagcaacgccatcttcgccttccaccgccgccaccccgccatcgaattgagtttttttgaagaaggctcgctggccatcgaacaatcgctgcgcaacaacgaactcgacgccggccagctgctcgcccccgcgcacgacgatttcgacagcatccccctgtgcgactacccgctggtcgtactcatgcccaaagaaaaagcccgccgcgccacactcagcctgaaaagcctgcaacacgagccgttcatcctctacggcgcgggcttctcgctcaaccgcatcattcagacggcctgccgcgaacagggcttcacgcccaacgtcgtctgccgcaccggccaatgggagctgctcgcccaaatggtcgcccgcaacatgggcatcgccctgctgcccgaatactacgcccgcaaaatccgccccgacaccttcgctgccgtccccctcgccgaccccgaaatccgctggccgctggtcatagcctggaaaaaacaccaacaccccactcccgcgctgagggcgtggctggatgtcgtgcgcgaagagttcggcagagggggataaacgtaaaggccgtctgaaaagttttcagacggcctttgggcagatattcaggcagggcgtgcacacgtttgcggaacaacagccatccggccgataagaaacaagaggccgtctgaaaaaccgcaaggcagtgtggaaatgccattgcggccgcttaggtaaggccaaaaagacgatgcccctgcttggtttgcaccaaacaggggctcatacataaatgtactttacgtcgcggtccatcttttcagacgaccttattgtagcaacggctcttatctcgtagtgttacacacttgggctacaacagtgtgcaatataccggtatgttttcggcttgtcaagcagcgtgtaattgcgttaaatttcgtttctcagattgttttaaaatttatttttcataaaggggaagaaaatgcagcaaaaaccgcaacgctatattttgggcttggatttgggcatcgcctcggtcggctgggcttgtgtttgggcggatgagaacgagcatccgacagggctgttggactgcggggtgcggacgtttgagcgggcggaagtgccgaaaacgggggattcgctggcgttggcgcgacggcaggcgcggagtgtgcggcggctgattcggcggcgtgcgcaccgtctgctgcgcttacgtcgtttgttgaaacgcgagggcgtgttgttgtcggcggatttcaatgagaacggtttggtgcgcggtttgccgattgacgcatgggcgttgcgcgtggcgggtttggacaggaagttaagcaataaagaatgggcggcggtgctgctgcatttggtgaagcatcgcggttatttgtcgcagcgcaaaaacgaaacgcagagcaaggataaagaattgggcaggctgctggcaggcgtgaacggcaaccgcgaggctttgcagaaccggtcggacgaataccgcacggcggcggagttggcggtgaaaaaatttgccgctgaaaacaatggttcgctgcgcaataaaggcggcgattattcgcatacgtttgatcgcaaagatttgcagcgcgagctgcatttgttgtttgagcggcagcgggcgttggacaatccgtttacgtcgtctgaaatggaggcagcggttgacgagctgctgatgaaacagcgttctgccttgcagggtgaggcggtgttgaaaatgctggggcgttgcacgtttgaaccatccgaatacaaggcggcgaaaaatacatacagcgcggagcgttttgtgtggctgaccaagctgaacaatctgcgtattcaatataacggcgaggagcgggcattaagcgaggcggagagaaggctgttgttggacgagccgtatcaaaaagccaagctgacctacaaacaggtgcggacgattttggaactgcccgaaagcgcggtattcaaaggtttgcgctacgggcatggcgaagacggtttgaaagcggaaagcggcacgctgatggagatgaaagcctatcacgcggtgcgtaaagccttgaaagatgcgggcttggaaggcgagtgggaaaaccgcatccgcaatcccgaattgttggacgcaatcggcacggcattttcgctgtataaaaccgatgaggacattcgcgccaatctggcggctttcaggctgtctgaaaatgtgttggaagccttgctcgcaggtttgaattttgacaaattcgttcatttatctttgaaagcattggcaaaaatcctgccgctgatggagcagggcatgcgctatgacgaagcctgcaaggaggcatacggcgaccattacggcgcaaaagagcaggaagaccaccgtctgctgccgccttttgttgcagacgacatccgcaatcccgtggtgttccgcacgctgacgcaggcgcggaaaatcgtgaacgaaatcgtgcgccgctacggctcgcccttgcgtgtgcacattgaaacggggcgcgaggtgggcaagtcgttcagcgaccgcaaggaaattgaaaaacggcaggaggaaaaccgcaaagagcgcgaacgggcagcggcgcattttaaagagctgttccccaattttgcgggcgagccgaaagcgcaggatattttgaaactgcggctgtatgaacagcagcacggcaagtgtctgtattcgggaaaggaaattgatttgcgcaggctgcctgaaaaaggctatgtggaaatcgaccacgcgctgccgttttcgcgcacctgggacgacagtttcaacaataaagtgctggtgttgggaaaagaaaaccaagataaacgcaaccgcacaccgtacgagtatttggacggcaagggcaacagcggggcttggcgggcgtttgccgagcgcgtttcaggctgccgttttccgtatgccaagaagcagcggctgctgacgcagaaattggacgaaaaaaccgagcagggatttttggagcggaatctgaacgatacgcgctatgttgcccgtttcttgtgccagtttattgaagaaaaaatgcacttggaaggcgcgggcaaaaagcgcgtgtttgcttccaacgggcagattaccgctctgctgcgcggcttttggggtttgaaaaaagtgcgtgaggaaaatgaccgccatcacgcgctggacgcggtggtggtggcgtgttccagtgtatcaatgcagcagaaaatcacgcgccatttccgctatcgggaagagttggagcacatcgatcgggaaacgggcgaagtgatacacggttttccgcagccgtgggaatttttccgccaagaagtgatgacgcgggtgttttcagacgaccctgtgagcgaactggcggaaaagctggacagccgccccgaagcggtgcatgagtttgttacgccgctgtttgtgtcgcgtgcgccgcatcgtaaggtaacggggcaggggcatttggaaaccatccgttccgccaaacgcttggacgagaaaatcagcgtggtcaaactaccgctgacgcagttgaaaaccaaagatattgagcggattgtcggctaccctaaccgcgagcctgcgctgtatgacgctttggcggcgcggttggcggcatttaaagatgacccagccaaagcgttttccgaaccgttttacaaaacaggcaaagacggcaagtgcggggtgttggtgaaagcagttcgtgtggaaaacgtgcagaaatcggggctgctggtgcgcaaagacgaaagcggcaaaatgcagggcgttgccgataatgcaacgatggttcgggtggatgtgtttggcaaaaacggcaaaaactatcttgtgcctgtttatgcttggcaggtggagaagggagagttgccgaatcgggcggttgtggcttatgcggatgaggaagattgggacgaaatggacgatagttttgagttcaaatttagcctatatccaaatgacttggtggaagttgttaccaagaaagataaattttttggttattacagcggatttaatcgcgcaacaggggcaatcaatattaaagagcatgacctttctaaatctaaggtaaaaaatggtgtttatgaggggattggtgtcaaaaccgctcaatctttccaaaaatatcaagtcgatactctcggcaaaaccatccgcctgtgcaaacccgaaaaacgcatgggttttaaaaagaaatagtttttcaggctgcctgcaccattttggtgcggcagctttttgtttgggaaagtctatgacttggagaagcattcttatcagcaaacccgcacgcttgtcgctgcaacaacggcatttgctgattgagcaggacgaggcgatacctgtgccgttggaagacatcgccgtgattgtggtggaggcgcgtgaagtggtgctgaccgcgccgctgctgtcggctttggcgcaatacggcgtaaccctgctgacctgcgacgagcagtttttgccgtgcgggcaatggctgccgtttgcccaataccaccgcagcctgaaaatcctgcgcctgcaaatcgatatgagcctgccgcagaaaaaacagctttggcagcagattgtgaaacagaaaatccgcaatcaggcatgggtgttgaacgaaagcggcaacgacatcgccgcaggacgtctgaacgccatggcagagggtgtgaaatcgggcgacaaaggctatgccgaaagccatgctgccgcgctgtatttttccgtgctgtttggcgacgagtttacgcgcggcagcgataatatgataaacgcctgtttaaattacggttacagcgtcatccgttccgccgtggcgcgttcgctgaccgcatacggtttccaccccgctttgggtttgcagcaccgcagcgagttgaatccgtttaatctggcggacgattttatcgagccgtatcggcagattgttgattggctggtgtgtggtatgtggacggaaggccgtctgaaagagaccgaattgacaaccaccatgaagcaacagcttatttccttgctgcatcatcagattttgcttgatgacaagatttatgccgttcttgctgccatcgatagaaccgtgcagtcttttcaggctgccttatcagaaagcggcagcaaaatcttaaaattaccgcaaatgcaagaattgaaagtacattattatgagtgaggcaaaatttatgcgactaatcgtattgtttgatttacccgttaccaccgaagcgaaacgacgggcagcgaaccaattcagacattttttaaaacaagatggttacctaatgttgcaattgtctgtttacacccgcatcgtgcgtggtagagattcgttgcaaaaacactacaaccgattgtgtgcagcactgccaacggagggctcaatacgctgtttgacgataacggagaagcaatatgcgagcatggacgtgttggtgggcacgcggcaaattcgtgaaaaaaaggtaaatgcagaccagcttttgctgttttgaatgtgttttttagataaagaaaacaggataaaccattttttaacaatgatttatcctgtttggattgtaacactacgagataagagaggaagctacaacagtccccgcaggtcgtcgttcaggaaaaacattgtaacactacgagataagagaggaagctacaacctggtggggctgcgcgggatcgattattcgattgtaacactacgagataagagaggaagctacaacagtgtcgtggcggaacagctctgcgcccctattgtaacactacgagataagagaggaagctacaacagtctggtttcttaaacgccactcaaattgattgtaacactacgagataagagaggaagctacaactcgatttgtttcggggctgttgtttctaaaattgtaacactacgagataagagaggaagctacaacttgtgcaaatctgcacagtgctttttcccaattgtaacactacgagataagagaggaagctacaaccgtattgatattcaccgcagccgccacccaattgtaacactacgagataagagaggaagctacaacgcaagtcatccgcacttttcttgccgtgcaattgtaacactacgagataagagaggaagctacaactcgatttgtttcggtgctgtggtttctaaaattgtaacactacgagataagagaggaagctacaacaaggttcggttctgatagtcgatgaggcgaattgtaacactacgagataagagaggaagctacaacatgtcttatttgcaaaacggacaatgctttattgtaacactacgagataagagaggaagctacaacgattttctttatcaaaagtccattaattatattgtaacactacgagataagagaggaagctacaactgacggccgtctgatagcgcagccgcagaaattgtaacactacgagataagagaggaagctacaacctcgctggccttttacttgttcatgcccaaattgtaacactacgagataagagaggaagctacaacatgtcctcgtcagtccaacccaattctttcattgtaacactacgagataagagaggaagctacaacttgaaactgccgcataatgagttgacggatattgtaacactacgagataagagaggaagctacaacccgaaactaaaactgattttagtgatagctattgtaacactacgagataagagaggaagctacaactattacccttttttaaaagttatcgcatttattgtaacactacgagataagagaggaagctacaaccaaagtcagcggcgtcatccccgccttcctattgtaacactacgagataagagaggaagctacaaccaaaaagggcttatgtatgctgtaaacttcattgtaacactacgagataagagaggaagctacaacatggctgcccgtcggacgcctgctgtcctgattgtaacactacgagataagagaggaagctacaaccgtgaaagcgcgtcggttacggttttgcggattgtaacactacgagataagagaggaagctacaacgtcctccgtgttgtattcctgcatattccgattgtaacactacgagataagagaggaagctacaacgtcttttgcgggcgggtagcacggggggtgattgtaacactacgagataagagaggaagctacaacgcccatttagtttgtacttctcgcccagccattgtaacactacgagataagagaggaagctacaactgcgtgtgcgggggatgtttccaagtatgaattgtaacactacgagataagagaggaagctacaacaccatcggtctgctccttgatttcgtgaacattgtaacactacgagataagagaggaagctacaacgcggcgtgctgcagatgggcgttggggagtattgtaacactacgagataagagaggaagctacaactggcggtagtgatggccgcctgttttttttattgtaacactacgagataagagaggaagctacaaccgtagactttgcgtagaggccgtgatctgtattgtaacactacgagataagagaggaagctacaactgggaagtgctcatgggttttccttctcggattgtaacactacgagataagagaggaagctacaacaagctgcccgaacgtgaaagacaagggggaattgtaacactacgagataagagaggaagctacaaccgtaaaagtttttgagttcacgaacacgggattgtaacactacgagataagagaggaagctacaactagcgttcgatttcctgttggcaggcggtgcattgtaacactacgagataagagaggaagctacaacggaataaacgcgcttttaatcgcctatatgattgtaacactacgagataagagaggaagctacaaccatccagcaatgcagcaattcggaagcttcattgtaacactacgagataagagaggaagctacaacaaggctcggtcttgatagtcgacgaagcaaattgtaacactacgagataagagaggaagctacaactgagtgttttcgcggtatttggaattttcgattgtaacactacgagataagagaggaagctacaactgttgggtggttgtggcgaagcctttttcaattgtaacactacgagataagagaggaagctacaacatagaaaacgcccacaccaatggctttttcattgaaacactacgagataagagaggaagctacaactgctggatcaccaggccgcccgacaaggtgattgtaacactacgagataagagaggaagctacaacgggcaagggtagaaagggggcaaggtctttattgtaacactacgagataagagaggaagctacaacctgaacgaaccgcctgagtttctccgcgatattgtaacactacgagataagagaggaagctacaacccgtctgaatgtccagcggcacgatgtccaattgtaacactacgagataagagaggaagctacaacggcctccgtgttgtattcctgcatattccgattgtaacactacgagataagagaggaagctacaacaaacgctggaagcactggacaaacaaagccattgtaacactacgagataagagaggaagctacaacagagccgcccgacggccttttcgagaggaaattgtaacactacgagataagagaggaagctacaacttgctcaaagccgcaatggccttgctgatgattgtaacactacgagataagagaggaagctacaacagagccgcccgacggccttttcgagaggaaattgtaacactacgagataagagaggaagctacaacttgctcaaagccgcaatggccttgctgatgattgtaacactacgagataagagaggaagctacaaccggcctgaatgcgcttagctgaacttcattattataacactacgagataagagaggaagctacaactcatcagaccaaatccctcaacggcttttgaattgtaacactacgagataagagaggaagctacaactggagtacgttcgcgacggcctgccttttaattgtaacactacgagataagagagaaagctacaactccaactgccgccggtcaaacagcgtgcagattgtaacactacgagataagagaggaagctacaacgcgaaagccatgacgggcatggcggccataattgtaacactacgagataagagaggaagctacaactcggcagataaaattccgctctgtgatagaattgtaacactacgagataagagaggaagctacaaccatccagttcatcaagggcaaagaccgcacattgtaacactacgagataagagaggaagctacaacgtaacgctcggaacgttggaattgttcaaaattgtaacactacgagataagagaggaagctacaacacaacggttttctcaacgctactgcaatcgattgtaacactacgagataagagaggaagctacaaccatttgattgatatggcgaccaaagatgcaattgtaacactacgagataagagaggaagctacaaccgggggcgttacacaggaaggattaccagaattgtaacactacgagataagagaggaagctacaaccggtttttgtttgcctagtgcttgataccgattgtaacaccacgagataaaatgtagaaaaagctagcgttgtttacagtattctaaggacaataccgtaaatgaagatccacaaaaacacacgccttaccccgcaccaccgccaagtcatctggctggcctacacacagaacaaagaaagcgttacctcactcgcccgccgttacatggttagccgtcagaccatctaccgcgtgctcaaagccgcacgcggcaggttgctcgcaccgcaaaacagcaccaacaaccgctgtaagcaagcgtattacggaatgcgccgtttgaccaaagtggaacgcgccattcaatagaagctcaaaaagcaagccaaacgctacaacaagttcatgtggataccaccgaatggctgccgctgctcaaagggcggagagccaccgataaactcgattatctgtttgttgccatttgcaacttctcgcgcgaactgtacgtcgccattctgccggacagaactgcacaaaagtgcggccgagtttttcgaatggcaggtcatcaaaccttgctcgcaccaaatcgactgcatctattcggacaacagcagcgaatacaaaggcgcagccaatcatgcgtttggagtggcctgttttgaaaacggtatcaaccaaaaattcacccgtcccgcccgcagaccaacggcaaagccgaacggataattcggagaattatgtaaatttatcgaaaacaacaggttgatagcactgaacatcgtcagaaagagctgtgccgttttgtgaatttctacaataccgtgaagccgcacggcagcctgaaaggagatactccgtttaaggtgctaggcatgctttcccaacctgtggtgtaaacaacgaggtggttttctataccttaaggtaaggggggctcgttactccgtttgcggaggcgggcatgattgagagtcaagacccaccttgtcgcatatatttactgcattgggcaggtgcggtacagtccgcacgcgtttcctgctgcaaaacattcctcgaaaacattgccgccgacctgccgcgcggcgcgtccgatacgagcatacatcgtccatgaacccgaacaggccgtctgaaaaccgcaaaaaccgcccgcgcgacgccgccttcgcgcttaccctgtccgcccttttcgccctgctgttcgcggcggtttacggcggcgcgaacctgctggctgaggctgtgccctggcgcgtgcgccccgcgctggcgtttgaagccgcgattcccttcctgcctgccgccgccacggtttatctgagcctgccgctgctgcttgtttgctgcgccctgcgtgccgaccggcgcggcgcgtggacgctgtttgccgtgctgtgcgccgaactcttggccgccgcgccgtttttcgtgctgctgccggtggaaaccgcctggccgccgcgcgaagttcacggcgtttggcggccgtttttcctgctggccgacgcgctgagcctgccgcgcaaccatttcccttcgctgcacaccgccttcgcctgcactgccgcatggttcgcatggcggcagaaatttccccgccgcgcatggcttggcgcgtgggcggcggcggtggtcgtgtccacattgctgatacgcgaacaccacctcgccgatttggccggcggcctgctgctcaccctcgctgcctgccgctgggtgccgccgcgcgccgccgccgggttccgccgcgccgaaaccgaatatctgctgtggcgcgaacaggctgccttcgcccgccgccaccgccgctacgccctgatcagcctcgtcctcgccctctaccgcctgcgccgccccaagcgcggcggcttgatggcggcgggctactgcttcttgcaggcgttcgacgacttgatggacggcgacaggccgtctgaaaaaccgcccgccgccgaagccgcccgcctgattggcgaatggcagcgcagcgcgttctgcccgcgcgaccggtacagccgcctcgccgcgcatttccgaggccgtctgaacgccgttttgccgcccgagaccgccgccgaagccgtttttcagacggcctcactgctacacaccatgcgccgcgaccgcctccgcgccgaacgcgccgaattgtggacggccgccgaaatcgccgcccagcaccgcgccaccttttccctgtcgctcgatctgctgtttgccgccgccggtgcgtccgcccgcagccgcgacctgcccgagctggccgacgcgctgggctggtgctccaccatgcgcgatttgcgcgaagacctcgcggcgggcatcgtcaacattcccatggaaatctggcaggcggcgggctggccgtgcgccgccgtgcatacggaggcggacggcggttttcagacggcctcaatcaaaccgaacggcgtgcagacccaagacggccgccgccccgcctttcagacggcctccgccgccgctgccgccctgtccgccagccccgtgatgcgccgctggatacgcgccgaacgccgccgcgccctcgctctgctcgacgcgctcgaccaacgcgccgccgcgctgcccgacccagccgcccgccgcatcgcccgcctgttcgcccgctccgtgcgcggcttcgccgacaaaaggatgcggcggctgtatccgtggctgtgaaggccgtccgcgttcgggcgcaaaccggcggcacacgcgttctgcggaggcagggcgggtctcgacccgccgtttgcgggagtcggcatggttgtggtgggtcaggacccgccctactgtatggatttgccgccgaggcagggtgtgtggcgcagccacgcatgcggtttgcaccgtttgaggccgtctgaaaaagtccgtaggtcgggcatttatgcccgacattattcgatttgcccgtgtccgccagtcgggcataaatgcccgacctgcccgctgtttttcagacggcctgttccattccgacctatgtcgaacctgccgtagggtgtgtcgccccaaggcgacgcacgcgttccctgccgcccgacgaatctgtgctttccccaacatcccaaaccgctgaacggcaaaggccgtccccgtctgcgcggggatgacgtttctgaaaacgccgcgcaagcccgccgccgccgttttcagacggcctctgtgctacaatccgcgccctttacaaccgcctgaacacattacggatatgacagacaatatacaggccggcatacaggccgcgctcgcccagctcaaccaactgattctgggcaaagaacccgtgctcaaacaactgcttgcctgcattctcgccgacggccacgtgctgctggaagacgtgccgggcgtgggcaaaaccacgctggcgcacgggctggcggcggtgctggggctggactatcgccgcgtgcagttcaccaacgacatgatgcccgccgacctgttgggcgtaagcgtctaccgtcccaacgagggtaaattcgagttccaccccgggccggtgttccattccttcctgctggccgacgaaatcaaccgcgcctcgcccaagctgcaatccgcgctgttggaggcgatggaggaaaaacaggtgtcggcagacggcaaaacctaccgcctgccgcagcccttttttgtggtggcgacgcaaaaccccaccgaccaaatcggcactttcccgctgcccgagtcgcagctcgaccgctttatgatgcgcctgagcatgggctatcccgcgcccgaggcggaaaaaatgctgtatttccacggcgaccgccgccgcgccctgccgcaggtgaaaccggtgtgcaacgccgaaacattgcgcggttggcagcagcaggccgcgcaggtgcgtttcgcgcaggcggcggccgattatgtgtaccggctggtggaggcaacgcgccgcccgggacagtttgttaccggcctttcgccgcgcgcggggctggcggtggtgaacgcggccaaagcctgggcgtttatgcacgcgcgcggccatgtgctgcccgacgatgtgaaggcggtgtgggtgtccgtggccaaccaccgcctgcaaccggtgcagcagggcgcgacggcggcgcagattctctcgggcatcctcagccatgttcccgtccagtaagcccgctccggcatccggccgctcgcccaccctcgccgccatccgctgccgcccgacgcggctgggcgcggggctgctggtggtggttttcctgctgtggctggtgggcgtgaactatcaggtcaacctcgcctacgtcgccgccttctggctgctgggctttctcgccgtgggcgtgctgctcaacctgcgccagctgctcgcgctgaaaatcgacgtggccatgccgcaggaggtgttcgcggggcaggacgcggtgttgcagctgacggcgcagagcccgcagcgcacccgtttcctctggctgtgcagcgaagacgactatctggccgcgcagaggccgtctgaaaacatctggcagccctggcgcgcggaagagggcagcgcggctttcgactggcgcgtgcccgccctgctgcgcggccatttgcgcgtgccgccgctgcgcac

SEQ ID NO: 3161 - DNA, 23225 bp, synthetic construct
  misc_feature 1..23225: note = Synthetic
  source 1..23225: mol_type = other DNA
aacacgccgccggccacgatggccaccatctgtttggcgctgtggctcacgccgagcaagtcccaaaaccacaaaggtgtgagcaggccgaccaaatggccgccgaaaatcgccagaatgccggtgtgaaacaggatattgcccaaacgcagttggccgcggtagatcagctggctggaatcgctcttccacgaatactgctcgcgctcgaagcgcacgaggctgccgaacaggaaaaccgaaaggcagatataggggtagatgccgaaaaagaattggttgaaggtgttcataatactgctcctttttgcgccgtataagcgttcttaggataaaactgtacggtttcgacggccggcttcagcagcggctcggtgccggcaatatcggggccgaaggtttccatcgcttcgtccatatcgcgcaccggcggctcgaccaagggctgcggcggcacggggctgagcgcggcaatgccttgcagcagcacggcgtagggcgagccgcttttttcgagtttgccgccgatgtgggcaatcacgtgcacggcatcgcccagcagtttttgcgcgtggtcggcgggtacttgggcaaaatattccagcaacaccggcagatagtcgggcagctcttcatcgcccagctcgaagccgcggctgcggtattcttcgagcagatccaccatcgcgctgccgcggtcgcggtcttcgccgtaaacgtgctcgaaaagatacagcgcatggttgcggttgcggtcgaacgtggccacatattgttcctgcaattcgcgcaggctgtggctttgcagataatcgagaaaacttttcagacaggcctgttgcgcgtttaactcgggccattcgtttaaggccgtctgaaactcgggcaaagcttcgattaagtcggcttcggggtagcacagcaacgccgaaaaccattggtaaacggggttggcatccatcagcgcaccccttcttcgcggtttttctcggcgtctttgcgcaggccgtggaacacaatcggcgtgcctttgcgtttgccgaacaggctctcgctgctttcgccgcccgagcagccgttgccgaaagtgaagccgcagcttgatttgtcgtcgaagctgttttccaccatttctttgtgcgaggtggggattacgaagcggtcttcataattggcaatcgccatgatttgatacatttcctccaccatcgccggggtgaggccggtgccttgcagcgtttgctccaaggtttcgccgtgcaccacctggccgcgtttgaagcggcgcatggcaatcatgcgctccaatgcaaacttaatcggctccaccttgccggcggtgagcaggttggccagatagcgcagcggaatgcgcatttcgtccacgctcgggataatgccgttttcgcccaccaggccgttttcgatggccgactgaatcggcgacaagggcgggatataccacaccatcggcagcgtgcggtattcggggtgcagcggaaaggccactttccattccatcgccattttgtaaaccggcgattttttggccgcatcaatccagctttggctgatgccctgcttcagggcttcgcgttccacttccgggtcgttggggttgaggaacagccccagttgctgttcgtataaatcctgcgggttttccaccgatgccgcctgctcgattttgtcggcgtcatacagcagcacgcccaaatagcggatgcgaccgacgcaggtttccgaacacaccgtcggctggccgccctcgatgcgcgggtagcagaaggtgcatttttcggctttgccgctcgtccagttgtaatagatttttttatacgggcagcccgaaacgcacatccgccagccgcggcatttgtcttgatcgatcaacacgatgccgtcgtcttcgcgcttgtagatgctgccggaggggcaggaagcgatgcaggtggggtttaagcagtgctcgcacaggcgcggcagatacatcatgaacgtctgctcaaacgccgcgtgcatttctttctgaatgccttcaaacaaaacgtctttgccgcgcttttcaaattctccggccaaatcgtcttcccagttcggcccccattcgactttgtccattttcttgccggtgagcaccgaaaccggccgcgccgtcggcggcgtaggcatctgcggcgcgttttgcagatgctcgtagtcgtaggtgaacggctcgtaataatcgtcaatctgcggcatgttcgggttggcaaaaatattcgccagaatcttcagcttgccgccctgcttgggcacgagcttgccgtcgggcttgcgcacccagccgccgttccatttttcctggttttcccagtttttcggaaaaccgatgcccggcttggtttccacattgttaaaccacgcatattccaccccgtcgcgcgaagtccacacgtttttgcaggtaacggagcaggtgtggcagccgatgcatttgtccaagttcagaaccatgccgacttgtgccctgattttcatgatggtgttccttttggtttaccggtttcagacggcctgttttcgaatgagcggaaaaacttagttttgtcgcaaggcgcaacaacaccgtggcggaaataacgtttttctgcgataaggccgtctgaaagcagtttgttcagcggtagcggtagctttatttcaaacttttttacagataaaagcttagtggagggcgggcaagaaaaatatgcgccgaaagcgcaaaacccgggggaaaagtgaggggatgcggctagctgaaaagacggggcgggatagttctttgggagtatgacgcgcctgcccggtcgtaacaaaacatgatcagcttgaaacacccagcatgaaaatatatactgtttatatatattttttaagaaggagtggtgccatgaccaccgcaaaattattttggaacggcaattcgcaagcggtccgtcttcccaaagaattccgctttgaaggcaaagaagtcaaaatcagtaagcaaggaaatcaagtgattatcgaacctttagttaccgattgggattggctcgacagcttgggtgagccggatgccagttttgaaaccgccgttaatgagatacgggtagaagcagcacaagagcgtgattggagtgtttttgaatgaaatacctgctcgacaccaacgctgtaattgccatcttgaaccgcaacactgatttcatccaacgcttaaaacaacacacccctgccgatttcgccctttccgcgattacttggtttgaactgcactacggtgcgcacaaaagtcaaaaagcggcagaaaatctggccaagctggaaaaacttgctttcaatatcctgccgttttcacagcaggacgcacaaacagccggaaaaatccgcagcgatttagccaaacaaggcactcccatcggcagttacgacatcttgattgccgcccaagccttatcaaatcaactggttttgattacccataatgtgcgcgagtttgagcgggtggaagggttatgggtggaggattgggagtgaaggcaaatgttactgaacataaaatgcaaattgagaaagaggttggttgtttatgaataaccagaatattactgaatttttggaatattatttaaatttgcctcaatcacccgaatatgcagtgatgattgatgcgccgtggggagctggcaagacttattttataaggaattttttggaaaaatattacgaaaataaagattctaaaaaggaaagatttctctgggtcagcctttacagattgtcctctattgaagagattgaagccgctatttttgctcaattacatcctatgttatcccataaaggtatggcattaacaggtaagttattgagagaaggtttaaaagcagctattaatcttgatttatcgactatcaagattccagactatttgaaagatatagacaatactgtattgatttttgatgatgtagaacgctgttcaatagagatgaacaagctgctcggctatctgaatcattttgttgaaaaccaaaatcataaaatgattttaatcgccaatgaacaagaaatagaaactcattcagagcaatataaaaaaattaaagaaaaattgataggaaaagtttttaaatacgaagcttcttctgttgaaaagattctatcagatttcataaaaaattattttaatgataaatcaccaatcactctgttctatattaatcatattaagcttatcgttagaatatttaacttggccgattattctaatatacgcgttttgaaacaggctttacaggatttcgagaggctttataaaactcttgatcaagaaatattggatcaacctgaattaatgagtagcctgctaagggttttcttaattttattttttgaagaaaaaagctccggttactcgattgaaaagattttttttgatcgatcgcgattcgtgaaagagtatagcaaaaatgggaaagaaagcctttcagaagaagagaataagctgaagaaaatccatgataaatatcaagatattgtaaatttcagttggtcggatatcctgttgggtaacgatatatggttggctattgtccaatcgaatatcatcaaccaaaaagccattaacttatccttaaaaaacagccgttatttccagtatgaaaaccgttccggctggtatcgtttgtgggattatcagttattagcagaggatgaatttaatcaaacatttaataattgtttgcaagagatcgaacagaataaaatttccgagttgggagagttgcaacattattttggactattcttatttttttcagagaataatattagaaaagctgaagctgaagaagcgatggagcaaatccagcattggattggagaattggcagaagataagaaattaccggatacatcggagtatccctcttggtggggagaaagttgggataatcgtagagtaacatctagtgaacaggatagatataaggagtttttagattttgtgaaaaataaaattcaagaacaggaaaaatcgatgtatccggataaggtagccggccttttaaaagatatggtcgatgatgttcatgctttttcagaaaaattaattgcagataccaaagggacatcaatttatcggaaaaacccgatcttggcgcatatcgatattgaagagttttttgataagttttaccttgcgattcctgaaaaccgctatcggattatttctgctcttgaacgtcgttatgaatattggggtcgaaacaaagagcttgaacccgaaaagaaatggcttcaaaatttattgaaaaagataaacgggcaaaagctaaaatttcaagatcatcagcacctgatttttctgaatagattggagttagtggttgaagaaatcgtaaaaaattgggaatcttgatgctttataacaaggccgtctgaaaatagtgggccgcacaaaagcaggacaaattccagctcaactaaggttcggttttcttaatgaatcaatacaatctacacacactctccctatttacaagatttacaaatctaccccgttacccaatgcagcaggcgtggatttgtaacccgaaatattgcttttgcattaaatcccttctaacgcaagcgccgccccgtttcggcatcgataatccggctcggcgctttctcgccgccgatgcgcccgccgaccacccgcacgcggcggccgaacaaccgccgcacctcgtgttcggtcttacacggcctgccgcccgagcggttgcaggatgtggaaaccagcggcgtgcccaacgccctgcacaactgctgcgcgcccgtatgcgcgggtacccgcaccgccagtttgctgcgcctgcggccgcgcaacagcggcggcaggcggcggcaaggcagcagaaacgtggtgggcgcaggccattcgttttccagcatggccatggtgctttcagacggcctgtccaacagattgcgcaactgcgccaaactgctgccaatcacaatcatgcctttgctttgcgggcgttttttcaaacggaccaatttatccaacgcccggatatggcgcggcaggcaaccgataccgtagcaggattcggtgggatacgccaccaaaccaccctttttaagatgggcagacaatcccgcgcgggcagccgccgggagggtgcgggcagttttcataacaggcggcgtggttttgtttttcatttattatcaaattgttgcatgaaaataatcttaaaatgattgttttgtcatgctcaggcttggcttgagtatcttgagtttcagcaatatgagatacccgggtcaagcccgagtatgacgcatgggctttttattaagcttatttgctaaaaaggccgtctgaaaccgtttcagacggcctgaagccgcataaggcaacacttaacggttaaccgccttatcggcaatatccgttcggtattgcataccgttaaagcggattttctccaaagcctgataggcccgggctttggctgcggccacaccgtcgcccaagccgaccacgcacaatacgcggccgccgttggtgaggatttcgcccgctccgccggcggcggtgccggcatgaaatactttgccgatccggtctgcttcttgcaagccgttgataacgtcgccttttttcggtgtttcgggatagttttccgccgccagcaccacgccgactgaggtttgcgggttccattcggcagatacggtatccagcctgccgtcgatggcggcggccaccaaatccgacaaatcgctgtcgaggcggctcataatcggctgggtttcggggtcgccgaagcggcagttgaattcgatggtgtagggcgcaccgtcggcagcaatcatcaggccggcgtataaaaaccctgtaaattcatggccttctgccttcatgccccgcacggtgggcagaatgatttcgttcatggcgcgctcgtacacggcgggcgtaaccaccggcgcggggctgtatgcgcccataccgccggtgttggggccgttatcgccgtcgagcaggcgtttgtggtcttggctggtggccatcggcagcacgtgttcgccgtccaccatcacgataaagctggcctcttcaccctgtaaaaagtcttcaatcaccacgcgtgcgccggcattgcctattttgttgcccagcagcatatcgtcgacggcggcatgcgcttcatcagcagtcatcgccacaatcacgcctttacccgccgccaggccgtcggccttaatcacaatcggcgcgccttttcgcttgagatattcgtgggcttgttccgcgttatcaaaggtttggtattgcgcggtgggaataccgtattttttcataaaggctttggcgaaatctttcgagctttccagttgcgcggcatagcggctggggccgaagattttcaaaccggcggcgcggaaatcgtccacgataccggcggccagcggcgcttcagggccgaccagcgtgaaggcgatgttttcgcgccggcagaaatcaatcaaatcggcatggtcggtaagggcgagattgcgcagcttaggttcggttgccgtgcccgcgttgccgggggcgacgaaaacggttgccactttgggcgattgcgccaatttccaagccagggcgtgttcgcgcccgccgctgccgataacgagtaatttcatgattattccttgattaaaaacagaattttaaataggtttgagcatcggattataaccgatttgaggccgctgccgcagcataaaagccggaatctttaccgccaaagacctttgaaaatatcttacaggccgagacctttgcaaaaatacgttttaatcctgaatttatttatgtttcgtcatacccgggcttgacccgggtatctgttattatttcttttgaaacaaaaagatgctcgggccaaacccgagcatgacgcagaagttttaagataccgaaaggaattttgcaaaagtctccgtccgccaatattttcagacggcctcttcaagccgcacctcaatcgcgcgcgtctgctcccaagcagccagacaggcggtgtaatttgccagcggtatgctcactgttaagcggcagtcgagctgcaaatcctgcgccaccacttccgcctgatgctgccgggcgatgcggatggcgtcgttcagatgcgggtagccgcaacgcagccaaaccgttttttcaatgtttttttctaatttttcagccagttgcaacgcttcggcggcggaggttttgtaggcatgaatcaagcccggcacgcccagcagcgtgccgccgaaatagcgcaccaccacaaccaacacatcggttaaccccgccgaatcaatctgccccaaaatcgggcgaccggcgctgccggaaggttcgccgtcgtcgttggcgcggaaagtgttgccgtcggtgcccaaccggtaggcatagcaccaatggcgcgccttgtggtgtgcctcgcgcagggcatcgacatgttttttgacggcctcggcggttttcacggggtaagcgaaggcgataaagcggctgcctttgtctttgaattcggcctgcacaggcgccgcgatggtgtggtaaaccgtggcgttcatgcttataccgcctccgccgcctgccgcaccgctgccaacagcgcatcaacgtcttcttcgcgcgtgtcgaaactgcacacgaagcgcgatgtgccttgtgcgtcccaatcataaaaataagtatgctcgcgtaccttgtctgccgcgccttgcggcagtttcacaaacacggcattcgcttcggtggggtaaaccaattccacgccgccaatggtttgcagaccgtctgaaagccttttcgccatctcgttggcctgctgcgccgtttcacgccacaaatcccctgccaacagcgcaataaactgtgccgaaataaaacgcattttggaagccagttgcagattgagtttgcgcagatatttaaggccgtctgaaaccctgtcgggattcaacaccaccacgcattcaccaaacagcaggccgtttttggtgccgccgaacgagagaatatccacccccgcatccgtggtgatttcgcgcagcggcgcgcccagcgcggcggcggcattggccaggcgcgcgccatccatatgcagcgccatgccgtgttcgcggcagaacgcgccgatagcgcggatttcctgcggcgtatagaccgtgcccaactcggtgctttgcgtgatgctggccgccaacggctgggcgcggtgctcgaaaccgtagccgtatgcctcacgagcaataagctcgggcgtgagcttgccgttttccgccgcaaccgtccacagcttaaagccgcccaccgcttgcggcgccgtgctttcgtctgcattgatgtgcgccgtttccgcacacaccaccgcgccccagcgcggcaggcaggcctgcaaagccaacacgttcgcgcccgtgccgttaaacaccggaaacgcctcgacccgttcgccgaaatgccgctttaccagcgtttgcagatgtgcggtataaggatcgttgccatacgcgcccacatggccgccgttggccgccgcaagcgcagcaagaatttcgggatgcgccccggaataattgtcggaagcgaaagtatgcgagcggggattgtgcagtggaatcatgattgtgccttcatggaacatagagattaaaggccgtctgaaaccttttcagacggcctgtttcgttggggtggattttaacagattatctaagacgatgcccctgaccggaaatccggccaggggctcatacatttctgtattttacgtcgcggcacgtcttttagacggccttattgtagcaacggctctcatctcgtaatgcgacaatggtttgaattataaattcgacccacatgactgtcaaatatttatttgttatgttaattagtgttattattttgcttgtttgttaacagctttatttacaaagggaaaaaatgaaagcaactactcacagatatattcttggtttggatctaggcattgcttcggttggttgggcgttggtgtgggtggatgaaaatgagtaccccatcggcctgctggattgcggagtgcggacgtttgagcgcgcagaagtgccgaaaaccggcgaatcgttggcattggcccggcgtaccgcgcgcagtatccgccgtttaatccgccgccgggcacaccgcctgttgcgcctgcgccgtctgttaaaacgcgaagggctgctgacggcggcagattttgctgccgacggcctgcccgttgccatgccggtagatacttggcagctgcgcgtacaagggttagacagaaagctggcagaaaaagaatgggcggcagtattactgcatttggtcaaacatcgcggttatctgtcgcagcgtaaaagcgagatgcaaacggaagataaggagctgggcaggctgctggcaggagtggcagagaatcacaaactgctggcagataatcccgggcaataccgaacgccggcagagttggcagtaaaactgtttgccgagaagagtggccacctgcgcaataaaggcggcaactattcccacaccttcaaccgcctggatttgcaaaaagaactgcatttattgtttgctaagcagcgcgaattggggaatccgtttacttcagtagaattggaggcgaaagtagacaatttgctgatgacgcagcgcagtgccctacagggtgaggcggtgttgaaaatgctgggtaaatgtacgtttgagccgtctgaatacaaagccgcgaaaaatacctacagtgcggagcgttttatctggctgaccaagctgaataatttgcgcattctgcacaacggcgaggaacgggcgctaaacgaacatgagcggaaactgctattggacgagccttataagaaagccaaactaacttacgcacaagtacgcaaaatattggggctacctgaaagcgcagtattcaaagggctgcgctacggtaaagattcagacggcctgaaaaccgaaagtggtgcgctgatggaaatgaaggcctatcataaaatccgcacggttttagaaaaagcgggcttgaaaggcgaatgggaaaaccgtatccgcaatccagaagtgattgatgcgattggtacggcgttttcactttataaaaccgacaacgacattcagacagccttggccggctgggcgctgcctgagcaggtgttggaggctttattaaaaggtttgagctttgataaatttatcgaattatctttaccggcattggccaaaattctgccgttaatggaacaggggttgcgctatgacgaagcctgcgcgcagatttacggcaaccactatggcgcaaaaacacagcaagataatttgctgctgccggtgattcatgccgacgatatccgcaatcccgtggtattccgtacgctcacacaggcacgcaaagtagttaacgccattatccgccgctacggttcgccgctgcgtgtgcatattgaaacggcacgcgaattgggcaaatcgtataaggaccgcaaagaaattgaaaaacggcaggaggaaaaccgtaaagaacgcgagcgcgcagtggccgaattcaaagaatatttccctcactttacaggcgaaccgaaagggcaagacattctgaaaatgcggctctataagcaacagcaaggcaaatgcctgtattcgggcgtgccgttggatttaggccgtctgaacgaaaaaggttatgtggaaatcgatcacgcgctgcctttttcccgcacttgggacgacagttttaataacaaagtgctggtgctcggcagcgaaaaccagaaaaaacgcaaccaaacgccttatgaataccttgacggagcagaaaatagtgagcgctggcgtgaatttcaggcacgggtagcaggctgccattttccgtatgcaaaaaaacagcggattcagacggccaaactcaacgaacaggattttattgaacgtaatctgaatgatacgcgctatatcgcccgttttttgtgcacctttatcgaacacaacctgcatttggagggtaaaggcaaacggcgggtatttgcttcaaacggacagattaccagcttgctgcgcggtttatggggcttgtgcaaagtgcgtgaagaaaacgaccgccatcacgccttagacgctgttgtagtggcatgctccaccgtatcaatgcaacaaaaaatcacccaagccatgcaacggcgtgaatcgctggaaatagtggatacggaaaccggcgaggtcaaacagcgtattccgcaaccgtgggattttttccggcaggaagtgatgattcgtgtattcagcgacaatccgcgtgaagaactggcggcaaagctcgatgcccgtccgcagacgttacacgaatacgttactccgctgtttgtttcacgcgcgccgaaccgcaagatgaccggacaaggacacttggaaaccattaaatctgccaaacgcctgtctgaaaatatcagcgtggttaaaaaaccgcttacttctttgaaaaccaaagatattgaaaaaatcgtcggctatccgaaccgtgaaccagccctgtatgccgcattgcaagaacggctggccgcatacaatgacgatcccgccaaagctttttccgagccgttttacaaaccggcaaaagacgggcaacaaggctcgttggtaaaagcggtgcgggtggaagatgtacagaaaaccggcgtgatggtacgcaaagacagcaacggtattccccaaggtattgccgataatgccacaatggtgcgggtggatgtgttcggtaaaggcgggaaaaattatttggtgccggtatatgcttggcaggtggctaagggtattttaccgaatcgggcaataatagcatttaaagatgaaattgattgggaacttattgatgaaagttttacattcagattttctttatattcaaatgatttggtagaggttatcactaaaaaaggtcgaatttttggatattttgctggttgtcatcgtggtacgggcaatatcaatattcgtattcatgatctagataataaatttggcaaaaatggcgttttggaaggtattggtgtcaaaactgcccagtctttccaaaaataccaaaccgaccctttaggcaaagaaatccgcctatgtaaacccgaacaacgccctgttttaaaaatcaaaaaataaagcaatctccagactatctgaactgtttcaggtagtctgttttttatcaaggagaataatccgatgacttggcgcagtattttaatcagcaaacctgcccgcctgtcgttacaacaaaatcatttgctgattcaacaagacgacattattcccgtgccattggaagatattgccgtgattgtggtcgaagcacgcgaagtagtgcttacagccccgcttttatcagcactggcgcaatacggtgtaaccctactcacctgcgatgaacagtttctaccctgcgggcaatggctgccgttcgcccaatatcaccgcagcctgaaaatcctgaaataccagatggaaatgtctctgccgcataaaaaacaactttggcagcagattgtcaaacagaaaatccgcaatcaggcttggctgctggattatagcggacacgatatcgccgcaggccgtctgaacgcattggccgacggcgttaaatccggtgataaagactttgccgaaagtcaggccgccgcactgtatttccgcgtactcttcggcgaccagttcgcccgcagccacgacaatgccgtcaatgcctgtctgaattacggttacagtatcgtgcgttccgccgtttcccgatctttggttcaatatggctttttacccgcactcgggcttcaacaccgcagcgaattgaatgccttcaatctggcctatgactttatcgaaccttaccgcccgctagtggatttactggtatgggaaagccggcttgcagacgaactgccaggcatacttacgccgaaaatcaaacaaaagttagtgtcgctgctgcattgtcaaatcaaactagatggtcgcagttactctctcttggcagcaatcgatcgtaccgttcaatcttttcaggcagccctaaccggcaactcaaaaaacttgaaactccccgagatgcttcctttaaaggtacaagattatgagtgaggccaaatttatgcgcttaatcgtatttttcgacctacctgtaaccactgcggaaaaacgcaaagccgccaaccaattccgtcaatttctgcaaaaagacggttatcaaatgctgcaattatccgtttactcccgcatcgtacgcggccgtgatgcgttgcagaaacaccacaatcgattgaaagcacacctacccgaagaaggccaagtacgctatttagaggtaactgaaaagcaatttgcaggcatgattatgctgattggcgagcccaaaccccgtgaaaaaaaggtcaatgccgaccaattattactattttagcgtggttttaaaaacgataaaaaagcctgaaatccttatcaaataaggatttcaggcttgagtattgtagcactacgagatgagagaggaagctacaacgaaatgtgcaaagactacgttaaaaacggcattgtagcactacgagatgagagaggaagctacaacgtagcagcagtagcaggagtagcggtaataattgtagcactacgagatgagagaggaagctacaactagcggttaagttatctaccgtatcggcggattgtagcactacgagatgagagaggaagctacaactcgcacgaaacagcctgaaaaatacgcaaaattgtagcactacgagatgagagaggaagctacaacgcctattacaccgtaacgcccgaacccgaaattgtagcactacgagatgagagaggaagctacaactcaccacgccgcatatcatagcgtcatctgattgtagcactacgagatgagagaggaagctacaacgaccgataaaggctgggttgaaagcaggtaattgtagcactacgagatgagagaggaagctacaactccacgtctgcggggtcggtaaacatatcgattgtagcactacgagatgagagaggaagctacaaccgtaatcgagcgcaatggcatatcacgcagattgtagcactacgagatgagagaggaagctacaacgcatgaccggcgccaccctgaaaattctggattgtagcactacgagatgagagaggaagctacaactgataaccatcagccacccggaaaaagatgattgtagcactacgagatgagagaggaagctacaacccgaaaggcatcagcatggaaaccaaaaaaattgtagcactacgagatgagagaggaagctacaacgtagtagtagtagtagcggtagtagtagtaattgtagcactacgagatgagagaggaagctacaaccagattgaagcgcgtattggcactatacgaattgtagcactacgagatgagagaggaagctacaacttgaaacgcttgcgagccgccgaacaaaacattgtagcactacgagatgagagaggaagctacaacgctggacgcagccgcaaaccaatgaaaggaattgtagcactacgagatgagagaggaagctacaacaccatacgccagatggcaactgctgccgtcattgtagcactacgagatgagagaggaagctacaacgccagcttgatatttacaacgtggataaaaattgtagcactacgagatgagagaggaagctacaacggccaacgcaacgatttggccgagtggcagattgtagcactacgagatgagagaggaagctacaacgtggccgttggggtgcagccagcccttgttattgtagcactacgagatgagagaggaagctacaacttactcagcggcagattgcccttgccctcgattgtagcactacgagatgagagaggaagctacaacacctgctatgcaaggcagctgtgtccttgcattgtagcactacgagatgagagaggaggctacggccagtcgctgttgcgccatctgaaactcatagttgcagcactaccagatgaaaattttgtataccaacttgatttcaataaaagccgagcatctattaacaactgatgctcggcttttacaataacatctggaatatattgtttcacgtgaaacgttcaactttttagggctgtggttaattgcggcacgatgtcgaacaggtcgccgacaataccgtaatcggacacgctgaaaataggagcatccgggtctttgtttatcgctacgattactttgctgtcctgcatgccggcggtgtgctggatggcgccggaaataccgatggcaaaatagagttgcggggcgaccactttgccggtttggcccacttgggcgtcgttcggggcatattcggcatcgacggcggcgcgggatgcaccgatagcagcgccgaaaatatcggccaacggcataaggagggcattgaactgttcggcgctgcccagcgcccgcccgccggccactaccactttggcttgggtgagttcggggcggtcagattgggtgagttcgcgtttcacaaaacggctcaggttttgtgcaggcgcggcttctactgtttgtatttgggcattgccgccgttttctgccgcatcaaatgaggtggcgcggaaagtgagcaccagtttcggcgcatcgctctgcacggtttcaaaagcattacctgcataaataggccggataaatgttttattatcaacaacttcggttaaatcagaaatctgcggcgcatcgagcagggcggcaatgcggggaagcaggtttttaccgaaagcggtggcggtggcgccgatataccggtaatctccggccagctttaccaccaacggggtaatttcttcggcaagcgcttcgccgtaataaggggcatctgccagcaaaactttagttacgccgttgatttgcctggcagattcggctattgcggcagcattgctgccggccaccagaatatgcacttcaccgagtttggcggcagcggtaacggcgtgcagggtggcggggtttaactgttggttattgtgttctgcaataattaaaacgctcatgtctcaccccttctcaaataactttggcttcgtttttcaatttttcaaccagttcggcaacgctgcctactttgatgccggcttggcgcggcttaggctcggcaactttcacaacgttggttttcgggctgatgtccacacccaaatcggccagcgtggttttttcgagcggctttttcttggctgccatgatattgggcagttttacgaaacgcggctcgttcaaacgcaaatcggcgctgattacggcaggcagtttcaaagccagcgtttcttctccgccgtccacttcgcgggtaaccagcacttcatcgttttccagcaccactttgcaggcaaacgtgccttgcgcggcgccgagcagggcggccagcatttgcgcggtttggttggcatcgtcgtcaatggcctgtttgcccagcaataaaagctgcggcacttctttgtcggcaacggctttcagcagtttggctaccgccagcggctccagtttggcatcggtttccacatgaacggcacggtcggcacccattgccaaagcggtgcgcagggtttcttcgctttttttgccgcccaacgacacggccacgatttcgctgatcttgcctgcttctttcaggcgcacggcttcttctacggccacttcgtcaaacgggttcatcgacattttgacattgtcgatatccacatccgaaccgtcggcttttacgcggactttaacgttgtaatccaccactcgttttacggcaaccagtgctttcataaactctccttgagccgggcttccggcagtaatcggttaaacggtttttgcagaaaaaacaaaacgtccgttctgcaaaaacggctcgcaccgccaaacagaatagggattatacccgaattaaagtaattgctctcaagcatttatatgatgtatggcaaatatcgggaaactacacaggccgtctgaaaacggcatgatggcagccctgctttcatttttcagacggcctcggatttggcccgaatacatgataacaagctctgatacacatcttccgcatcaggaatctgcgccacattgccgagattcaccgcccacggcgaaacctgtacgccggtttttgccgggtcggtatcggtatagatgccgacaacaggcgtatccagcgcattggcaaggtgcagcaggccggtatccacgccgatcacgccggcggcattatcaagcaggaaggcggcctgcaacaggttcagtttgtcgcacacgcgggcaaacggcagtttggcagcgatgttttccgcccgcagtttttccgcttcgttaccccacggcaggtaaacggggctgccgctgccatcatacagcttttgcaataagttgagccaacaatcctgcggccacagtttgctgtcgcggctggtggcgtgcagggcaacgtaataatgttcgggcagattgttcagacggccttccggcggcactaccaaaccgaaacgctgctcggcgggcatttcgtagccgaatgcctgtgcaaacaaagcgcggttgcgccaaacggcatctctgcccttgggcacggcataagtttggttataggttagcgccgcccaacgttcgcgcgcgctgttgaaatccaagcctttcacaggcgcattggcagttttcgcaaacagcgcgctcttcatcaatccttggctgtctaacacaaaatcgaattgctgccgttgcaaaacgtttttcagacggcctatttcgcaccatgtttccgcccggttcaattgtttgcgccattgccgccagcgcatcgcgtgcacttctttcacaaacggatgcagacgggcgatgtcggcaaaacccgcttcgctcaaccaatgcagttccacatcggggcgcatacgcgataaatcgctcaccgcaggcagtgtgtggattaaatcgcccatgctcgagagccttaccaacagtattttcattgcgccaaatccgtcaataaccgtcatgtttcacgtggaacacaatcaaactattgatttttaatataatctgaaatcgcatcggcgttttccaacaccaccgcgccggcatctatcatttcgttccatgccgtttccacggtttcaggcgcgatgccccggcatgctgccgcattcacgaccactttccagccgccgccttttaaaagctgcaaaaccgttgtttttacacaataatccgtggccaatccgcccacaataatgatttctgcccctttgctgcgcaaccattcgagcaaccccgtgctgagcttttcgccgatatcgtgaaaacaggcgccgtaagggtggaactcggggtcgacgcctttccatacgcaataatcgtattctttggccgagggcaggccgtcgagcagctcgtagcccctgctgcccacaatcgcgtgggaaacccaggtaacatcggcttcgggcaggccggtgggcttgagcatatcggccgcatccgccaccagccatttggcagcggggctatgcgcgtctttcgtcatcacccgcaaatccgccaatgcagcctgcgcattcagctccgccacaatcgtatcgccttcaaccaccggcagctcattcgggcacaacggcgaaaaggttttctgggcatcaacgtctatcgacactatcatataaacaggctctcggttttcagcagccgccattatagcaaaggccgtctgaaaccgataacggtgttatgatgcgcctttccaacggcttttcagacggccttatgcaacacaccatcacccccatcgccaccgtgcattccccctacaagcagaaattcggcgttgcccgccagcccggcctcgtgcctgccgccgaagtgtgcatcgagcttgagccggctttttccgccgacagcgtgcgcggtttggaaaatttcgattatgtgtggatcagctttattttccacgacgttttaaacgaaggctggtcgccgctggtgcggccgccgcgcttgggcggcaaacagaaaatgggcgtgtttgccacccgcagcccgcaccggcccaaccatctcggcctgtcgctgctgaagctcgaacgcatcgaaaccgcccgccccgttcgcctgtattgcagcggcgccgacctgctcgacggcacgcccgtcgtcgatatcaagccctatattccgtttgtggaagccaaacccgatgccgcaggcggtttcgccgccgccaagccaaacgaattgtcggtaagctggctgcccggctgtggcgcggagcatctcacccaggccgagcgcgacttaatcggtcaaagcatcgcccaagacccgcgccccgcctatcaggatattcccgagcgggtgtatgcaatggatatttcggcctacggtgtaaagtttcaaatcaacggcaacaacgccgtggtgctggcggtagaaaagcgcggtgcggaataaatctacaacaaattgattcgtttgaactttaacctaatcaggccgtctgaatacaattaaggcggaacacctgccaaacaccgctccccgcagccggtttaaaaaacaacaccggcccggtcaaaaaaccgagccgtaagttttaccgctgccgcccgtctaaaccgatgtcttacacaacagttcgtgccgggttcacaccgatccgtttttatgaaaccggcccgctaccccaaaccgataaggagaatcccatgaaaaaactgctcgccgctttactttgcgccgcttctttcggcgcctacgcccaaaccgacatcatcgtgcctgtgtcgcggctcgacatcgaaaaaggcaacgccccgatcggtgaaatccgcatcagccaaagcaaatacggcgcggtattcacccccaaactgcaaggcttgaaagccggaatctacggttttcacgttcacgaaaaacccagttgcgccccagccgaaagcaacggcaaactaacggccggcatggccgccggcggacactgggacccgaaaaaaaccggcgcccacaaaggcccgtgggatgacggcggacatttaggcgacctgcctgcattggccgtggccgaaaacggccatatccaacccgtggttgccccgcgcatcaaaaacatcaacagcctgcgcgggcactcgctgatgattcacgccggcggcgataattacagtgaccaacccgccgccttgggcggcggcggcgcacgcatggcctgcggggtgatcaaataaaccgcacaaggcaaaaccatttgtttggcaaccttttcgtcatactcgggcttagggtatttttattccttgatacctttgcgaaaccatcttgaggccgtctgaaatacccaaccgtcgtcatactcgggcttgatccgagtatgacatgtgtactttttattcagttggttcgtatggcttaggcataatttttacaaatatttcaggccgtctgaaaaatattcagacggcctgaaatatttgataaagcccttactgcaaaataacttaaaccctcacgacaccctggcttaccgccgttttcccatttattccggcaaacgctccacaatgcccacacccacggcgtttaggcccaaataagcgccgaccacgggcgaaacgggtatgccgtgttccaaatgcaggccggttttggcgtgcagcttgcgggcgaaacgctgatagagttggtaatcgccgcagtagccgcccgacatcaccagatgtgcggggtttttgtcgaccgtcatcacgataatggcttcaatcaggcgctctatcaattgttcgtcgtcctgcacgctggccagatgcgacgtgcctttgtggttgaaacgcaaaacggttttcaaacccagccaatcgttaaacgccgcgcccatacgcagcaggccgccggttttgatgagttgtgtcagcgaatgcacaccgaacaggatttcacagcgcggtttcagcctttcgagataatccaccacttcttcggccgtttttcccgctttgagcaggcgcacggcttcaagggcgaagaagccttcgggcatacaagtggtgccggtgtcgaccacatgaatcttcagcgtgccttccattacttctgccgcccggcggataacggcggcgctttcgcttagtttgccgctgatggtggtaacaatggcttcttcataaccctgcgatttcagatattggaaagtatcgagcaggctttgcatatcgggcggcgaagtggcgattttttcttcggggtaggcgcgcatccgatcgtaaaacgcttcggctttcaagtccaagccttcggcataagtttgcccgcctatctgtacggtcaggcgcagcatatggatcgggctgttgcggtcgagtatgctgtcgagcatgctgctggaagtggctaaaatggcgcagcggtagagtgaatatgaaccggccacggtatctccctttattatcgttgtcaaataatcaaaaatgaatataagcggtttcaaataatgataaacggtatattttattctgtctatgacaataaacaaattgtttatttcaaatctgattatttggcggccggccgtatggattttatgtttttcagacggcctgatgctttgcaaaactgttttgatgccctgcaaacacttatttgccgtcatactcgggcttgatccgggcatgacgggataatagccgaacagcagcgttcaaactagattctgcggcctgcccgctgcaaaacggttgatgttttccaccaacatatcaaacaggcggtggcgggcttcggtgctgccccaagccatatgcggcgtaacaatcaggttgggcaggcgcgctttgagcagcgggttgccgttgcgcggcggctcttcggtgagcacgtcgaagcccgccccgcccagcgtgccgtatttcaacgcagccatcaacgcgtgttcgtccaccaagccgccgcgcgcgcagttcaccaaaaccgcgccgggcttcatctgttgcagctcggcttcgcctatcatgcctgcggtttgctccgtgagcgggcagtgcagcgaaataacgtcggcacggcggatggcttcgtcaaacgccacatatcctt

SEQ ID NO: 3162 - DNA, 23225 bp, synthetic construct
  source 1..23225: mol_type = other DNA
  misc_feature 1..23225: note = Synthetic
aggcttacgggataaaaaaggccgtctgcaaaatgatggtttgttttgcagacggcctttttattctgtatgaaagaacagtatctatggaatttatagtcgaataaaatgagaatgagacaaggcagcgaagccgcagacagtacagatagtacgacaaggcaaagcaacgcagtatcattcttattttaaaaggctataaaatattgtcataaaatttcttgggtggtagtaatgttttgcgaacatgcttcaggaatgggcttggtcgatgatgttgcgctcaggtttttgatgcctgatagtgcaatataatcgccgatcagaatctttctttggctgtttttgttcactaaaccaatgagttgtcgattatcatcaaataataaatcattatgcttcggaatggctaatgtgccaatgttttccgggtggtgcggattgccctcggacaagcagccgttataaacaattaatctcgtactaaccaagggttcaatcatcaagccgttatccagaatatcatcgccggtcagataaaatattgcttcggcttgcgcttttgctgttggcggggttttatctgatgtatcgggtgtgctgccgggattgttgtgattgggaaaggttgctgctgcgggcgtattggttaaacttgtcggattgcaggcggtgaggcataaggctgataacactccgataatatcgtgtaatgtcatgtattaagctccaaacagcgaaataattcaaattattctgctgtttgtaccatttattgggctatttgagaataggcttggcagatggcgcgaggcggcggactggccggcgcggctgagggctgcttgctttgcggtgtatgccgtctgcgtttttcatggtgttgtgagcggttttgtccgtgcgcggcggacgttcggcaatgcacgttgaaacagccgtcgcggtaatcatgctgccttggacggctgaatccgggtgcggtgtgccttaatctttctgcaaatgtgccagcggcagggcggtggtgtttttgatttctttcaacacaaaacttgattgcgcgtcttgtacgccgtggtgggataagagcgtatcgagtacgaaatgggaaaaggcgttcatatcggtaaaaaacgcgtgcagcagataatcggtttctccggtcagggcaaagcagctcaatacttccggccaagtctgcacggcgttggagaagtcttcgcgcgcatctttggccttgctgatggcaacgcggataaatgcctgcaagcccagctcgacttctacgggcgaaagcagtgcggcatatttgcggataatgcccgcgtcttcaagctgtttcaggcggcgcaggcagggcgagggggagagtgccacccgttcggacagctcgacgttggtcagacggccgttttcctgtaaaacctgcaaaattttcaaatcggttttatccaaagtaatctgtggcatgcaattctcctttgtcggtgcttcaagcccgcggtagcatggttaatcaaatttaacttattataagccagtaaaattaaaaattgtagaataatctgtgttaaataaaagtgtacgaaaaataatcgttttgcagacggcattttttcatattgcgcggaaaagaggggcggacaatgccgtctgcaaaaaaattctgcggcgcaacgcttgccgaaaagacagtttcaagccataatccgaaacatgtgcaggagagtgttacaccttgctacacggtgtggccaccgaaggcgcagatgcccttaaatcgctcaggtaaaaggactgcacattgaaagaaaacatctggagagcggcttgtgccaccataagcccaccgaaggggaaaaggcagtttgaaccaccattcaaatacaggccgcgccgcaatgagcagattgcggataatgtgcggtttgccgaaaatctcaggttcaaggacagatagggtcgccgcgcagtcaaagtgcggaacggcctataaataccaagtatccgccgccatcggatttgcagacggcattgcctgcccgacagcggataccccaccggagaacttcccatgtctgctctgaaaaccaccccgtttcaccaagcccatctcgatgccggcggcaagctggtcgattttgccggatgggaattgcccgtcaactacggatcgcaaattaccgaacacgaagccgtgcgtaccgatgccggcatgttcgacgtttcacacatgctggttaccgatgtaaccggcgatcaggcaaaagcctttttccgcaaactcttggccaatgatgtcagcaaactgccgtttgtcggcaaggccctgtattccgccatgttgaacgacaacggcggcgtcatcgacgacctcattgtctaccgcaccaacgaagccgaaacccaataccgtatcgtatccaacggagccacccgtgaaaaagactccgcccagtttgccaaagtcggtgcagacttcggcattgcgctgaacccgcgctatgatttgggcatgctggccgtgcaaggcccgaaagcggttgaaaaactgctggcggtcaagcctgagtgggcggataccgtgaatgcgctgaaacccttccaaggcgcggatttgggcggcgattggtttgtcgcccgcaccggctacacaggcgaagacggcgtggaagtgattctgccggccgccgaagccgaagccttcttcaaagccctgcaaacagcaggcgtacagccttgcggcctcggcgcgcgcgataccctgcgtatggaggcgggcatgaacctctacggcaacgacatggacgacgataccagcccgctcgaagccggtatgggctggacggtcgatctgaaagacgaaacccgcgattttgtcggcaaagccgcattattggccttgaaagaaaaaggcgtggccgtcaagcaggtcggcctcttgctcgacaaaggcggcattctgcgttcgcatatggaagtgcttaccgacaaaggccggggcatcaccaccagtggcgtgttctcgcccagcctcaaacaatccatcgccatcgcccgcgtgccgaaagattttgacggcgatgtggccaaagtattgattcgcggcaaagaagtcggcgtgcgcgtgttgaaactgccgtttgtgagaaacgggcagaaacagtttgattaaaatgtttttgcagacggcctgatgccgaaaggccgtctgcaaaataaaatttgacccgagctacgacaagctaaacccctatttatccgtttaacaggagaacactatgagcaatatcccagccgaactgaaatacgtcgccagccacgaatggctgcgccccgaagccgacggcagcgttaccgtaggcatcacccaccacgcgcaggaattattgggcgacatcgtttttgtcgagctgcccgaagtcggcgcgaatctggctgccgaagagcaggccggcgtggtggaatcggtgaaagccgcttccgatgtgtacgcaccgattgcaggcgaagtgcttgccgtcaacgaagaactgccgagcgcaccggaaaccgccaacagcgatccttacggcgcaggctggttcttcaaaatcaaaccggccaatccggctgatttggacggcttgttaaccgccgaacaatacgcggaagaagtgaaataacatcagtgcaggccgcctgctgtgtggcggcctgtaactgttttaaacaaacaatccggcgcagtctgaacggtttgcgttgcttccgtgctgtttggtactcggacgggtaaggctgttgcggcaggtgatgtgccgtctgaaaacgaaccgaccgtaaaccatgttcggcaaatccgtttcgggcggtttttttgtttggaatacacagaaacctttaccaaaccgcaagcagagtgtgttgaagaaaaaagagggcggacgcttgcataaccgctccacttggagattggaaagaggcggaacagcatgaaaaccatcggcatcatcggcggcatgagccccgaaagcaccgttttgtattatcagaccatcaaccgtgaggtcaatgcgcgtttgggcggaaaccgcagcgcggacatcttcatgcacagcattgactttgaaacggttgcggccatgcagcgtgcgggagactgggcggcggcagggagattgttggcggagagcgggcgcaagttggaaaaaatgggcgcgcaggctttggtgctggcaaccaataccatgcacaaagtcgcttccgatattgaatcggcagtcggtattccgctgattcatgtggtggacagcaccgcagttgccgttaagcagcaaggtttggcaaaagtcggactgctgggtacaaaatttaccatgagcgacggcttttatagcgaacgcatggctcaggcaggtatcggcactttaatgccgtctgcaaaagagcaaaacgaaatccaccgtattatttttgaagaactctgccgcaaccgcatcgaacacgcctcacgcgattactattaccgcgcgattgaagcgttaaaacaggcgggcgcggaaggtgtggttctcggctgtaccgaaatcggactgcttgttaaggcagaggagtgtccgctgccggtgtttgacagtgccgaaattcatgcgatggcagccgttgagtttattttatcctaagcaaaaatgaccacttactgccgatttgccgccgcgctgcccgacgacaccgacaaccccaacaaacattaccacgataatgtatacgggttccccgtgtacgacgacaacgaattattcgggcggctggtgttggaaatcaatcaggcgggtttgagttggacgattattttaaaaaagcagacggcctttcagacggcatacaagggtttcgacattgccgccgttgccgcttttgacggtgaagaccgtgcgcgtttgctggcggatgccggcattgtacggaaccgcttgaaaatcaacgccgcgattcacaatgcacagcagattttagcaattcaaaaagaatacggttcgtttaaaaactggctcgacagccaccacccgcaagacaaggcctcgtgggtgaagctgtttaaaaagcggtttaaatttgtcggcggcgagattgtcggcgaatttctgatgagtaccggctacctgcccggtgcgcatgatgaagattgtccggtgcgggcgcggattgcggaggccgtctgaaaacaaggcagattggggttgttttactatttgtgttgtagaaggacaaatgcgccggggtacgtcttatgcggggtgtgttgaatttcataaaatggggattgtgccatcattccggctttgaattgaaaaatatgcagacggcctgaacctgaaaaatccttccaaaggccgtctgcaaattaaaaacaaaaactgcaaaacgagaaaccatgaaacccagcagccttttgaaagcggcggtttttatcatcggcatgtccgcctttatccaagtgtattccgtgcaggcggtgctgcctgtgctgatggctgacttgcgggcgacggaagtgcaggcgggattggcggtcggtgccgcggtattgggcgtggccttgatgtcgccgtttatgggtatgctttcggacgctttcggacgcaaaatctttattaccgcttcgctgctttatctgtcgctgccgacggcgcttctggctttttcggccgacatccaccaaatgattgcgctgcgttttctgcagggattggcggtgccgggcattaccgtggtgctgattgcctatatcggtgaggaatttgaaaccggagatgtggcgcggctgatggcggtgtatgtttccggtacggtattcggcggttttatgggacgtttcctgctcggctatttgagcgagtgggcgggttggcgcggcgcattcggtgttatggcggcagtcagtctggcgtgcgcgctgtttgtctggcagcagttgccgaaatcgcaacacttcaccgccaagcccgattttcagacggcctttgccacgctgaaatctcatgtacgcaaccgctatgtcgtatcggcatcgcttttgggaatgtgcgtattgtgttcgctggtcggctgctttacctacatcaacctgcatttggccgggccgccttatcggttgaacagcagcgaactggccgatattttcacggtgtaccttatcggtatggtgattacccctctgtcggcgcggctgatggcgcgtttcggcagcgtaaaaaccattgtcttggcggtgtgtctgtcgatggcgggtgtggcgataaccttgtccgcaccgctcgcagcggttgtagtagggctggtgttgatgtcgtcgggcgtgtttgtgactcaggcggccacaatcaactacatcgccgcccacgtcaaacaaggccgttcgctcgcttcgggtttgtattacatggcctattacagcggcggcacgataggcgcattgttgtgcgggctggcttatacaggcggacaatggtcgggcgtggtttatacgctgctggcggttcaagcggcggcattgctggttgccgtcaaaggcatgaaggccgtctgaaaatggcataagtattgcttgtcgggtgagatgacaatacagatttcaggaacgggtcgtatgtttcagacggcccgactcttcaaaaggaaagaaaatgaaactacatgatttgttagactccaactcattcgcgccgcgccatatttcgtttggcgacgaagccgcactgctgaaggctttgggcgaaaaaaacatggaggaatttatcagtaataccgtgccgcagagcatccgtatgccgtctgaactcgacctgcctaaagcattgagcgaaacggaagcgttggcaaaattgaaagaaaccgcctcaaaaaacctgattgccaaatcctatatcggcttgggttactatccgacccgtatgccgaacgtgattttacgcaacgtactggaaaatccgggttggtacaccgcttataccccgtatcaggcggaaatcgcgcaaggccgtttggaagcgttgttgaatttccaacaaatgaccatcgacctgaccggactgccggtagcgggcgcatccctgctcgacgaagccacagccgctgccgaagcgatggcgatggccaaacgcgtcggtaaagtcaaatccgataaattcttcgtggacgaccgcgtactgccgcaaacattggacgtgatgaaaacccgcgccaaatatttcggtttcgagctggtggtcggcgatgcgaaaaaagccggtaacggcaaaaccgaatacttcggcgcactgctgcaatatgtcggcaaagacggcgatgtattcgacctgaaaacacgcattgccaaattgaaagacaaaggtacggtggtagccgtagcggccgacatcatgagcttggtactgctgaaatcgccgggtgaaatcggtgcggacatcgccttgggcagcacccagcgtttcggtattccgatgggcttcggcggcccgcacgcagcgtattttgcgtttaaagacgaatacaaacgctccgcgcccggccgcattatcggcgtgtcgaaagacacttcgggcaaacccgcgctgcgtatggcactttccacccgcgagcagcacattcgccgcgaaaaagccacttccaacatttgtaccgcccaagccttgttggcgaatcttgccggtatgtacgccgtttaccacggaccacaaggtctgaaacgtatcgccgaacgcattcacgttttagcgtccgcattcggcaacctgctggcagacgccggtttggagttggtatacgatacctattttgataccgttgccgttgatttgaaagacaaaacgcgtgccgacgaagtgttctataccgcacaaaaatggggctacaacctgcgccgtgtcagcgataccgtcatcgccgttgccttccacgaagagtccgagcgcggcgagttggctgttctgtacgcgctgtttaccggcaaagaacaagtattgctggaaaacgacgtaacaggccgtctgaaaaaatccctgttgcgtaaagacgatatcctgacccacgaagtgttcaaccgctaccacaccgaacacgaaatgttgcgttatctgaaaaaactggaagaccgcgatttggcgatgaaccgcagcatgatttcgctcggctcctgcaccatgaagctgaacgccaccagcgaaatgctgccggttacctggcccgaatttgccaatatccacccgtttgcccctttgaatcaggtgcagggctatatggaaatgctcggcggcctcaaagcccagctcaaagccatcaccggctttgacgaaatctccatccagcccaactccggcgcgcaaggcgaatacaccggcctgctctccatccgccgctaccacgaagccgacggcgcggcagggcgcgacgtatgcctgattccgcagtccgcccacggtaccaaccccgctaccgccgccatgctcggcatgaaagtcgtcgtcgtcaaaacagacgaacgcggcaatgtcgatgtcgcagacctcaaagccaaagccgaacaataccgggacacgctgggcgcactgatgattacctatccgtctacccacggcgtgtacgaagaaggcatccgcgacatctgcaaaatcattcacgacaacggcggccaagtttacatggacggtgccaacatgaacgcccaagtcggcatcatgcagccggccgaagtcggcgcagacgtactgcacatgaacctgcacaaaaccttctgcattccgcacggtggcggcggtccgggcatgggctgtatcggcctcaaagcacaccttgccccgtttgccccgagccacaccgtaacccccgttgccggtgctaccgaaggcatgggcgcagtggccgccgcaccttacggttccgcctccattctgccgattacttggatgtacatcaccatgatgggcaaacaaggcatgaagcaggcaaccgaatgggcattgctcaacgccaactacgtggccaagcagctcggcgaagactacccgattctctacaccggcaaaaacggccgcgtcgcccacgaatgtatcgtggatttgcgcccgctcaaagccgaaagcggcatcaccgaaaccgacatcgccaaacgcctgatggactacggtttccacgcgcccaccgtctccttccctgtggcgggcacactgatgatcgagccgaccgaatcggaaagcaaagccgaactcgaccgcttcatcgccgcgctgaaatccatccgccgcgaagtgcaaaaagtgcaggacggcgtatggccgaaagacgacaacccgctggtcaacgcgccgcataccgccgccgacctcaccaaagaatggatgcacccgtacagccgcgaagaagcagtgttcccgctgccgtatgtacgcgaacacaaattctggccgagcgtcaaccgcgtggacgatgtgtatggcgaccgcaaccttatttgtacctgccctccggtagaagcatatgaggattgattaaacaaattcggcaataaatatagtcgaataaaataagaatgagacaaggcagcgaagccgcagacagtacacatagtacggcaaggcaaagcaacgctgtatcattcttattttaaatgactataataaaaaggccgtctgcaaatatgcagacggccttttttgttttttcatgcaaaaataagacgatgcccctgtttaagaaactcaaacaggggctcatacataaagtattttacgtcgcggcacgtctttgcagacggccttattgtagcaacggctctcatctcgtagtgcaacaatatttgcgtattctaatttgttttttatcggcgtgcaagatgatggccgctgcggtaaatatgccgaccatttttttcttgtatcaaacatttgttccgttacggctctgttgacgtaaaaatgtggtataagatgatattttttctgcataaaacggagaaatcatgggtgcgtatccgcagaaatacatattgggattggatttgggcattgcttcggtgggctgggctttggtatcggttgatgaaaatgaaaatccgaacggcctgcttgattgcggcgtgcgcacgtttgaacgggcggaagtgccgaaaacaggggattctttagccaaagcgcggcgcgaggcgcgtagcgtgcgccgcttaatccgccgcagggcgcaccgtttgctgcgtttgcgccgcttgttgaaacgcgagggcgtgttggccgcagcggattttgattcaaacggtttggttcgggatttgcccgttgatgcatggccgctgcgcgtggcgggtttggacagaaagctggaagccaaagaatgggcggcggtgttgctgcatttggtgaaacaccgcggttatctgtcgcagcgcaaaagcgaaatgcagacggaagataaagagctcggccgcctgttggccggtgtggcggaaaacagcaaattattgcagcaagatgcttaccgcacgcctgcggaattggcggtaaagcattttgctgtgcaaaacggtcatatgcgcaacaaaggcggcgattattcgcatacgttcaaccgccaagatctgcaaagagaactgcatcttttgtttgaaaaacagcgcggtttcggcaatccgtttgctgcggctgagttggaaaacagagtagatacgctgctgatgacccagcgcagtgctttgcagggcgaggcggtgctgaaaatgttgggcaaatgtacgtttgagcctgccgaatacaaagcggcgaaacacacctattccgcagagcggtttgtgtggctgaccaagctgaacaatctgcgggttttgcacaacggcgaagagcgggctttagaggaagctgagcgcaaaatgctgttggacgagccgtataaaaaagctaaattcacttacacgcaggcgcggaaattattggatatgcctgccgatgcggcattcaaaggcttgcgttacggcaaggattcagacggcctcaaggctgaaaacggtacgctgatggagatgaaggcttaccataaaatccgccaagttttggaaaaggcgggcttgaaaaccgaatggcagggcttggcgtgcaaacccgatttgctggacgaaatcggtacggtcttttcgctgtataaaaccgatgaggatatttcgagctgcctgaaagacaagctgcctgaaaacgtattgcaagctttgttggcaggcttgaatttcgacaaattcattcagctttcactcaaagccttgtctcaaattatgccgctgatggaaaacggtatgcgctacgacaaggcttgcgaggcggtgtatggcgaccattacggtttgaaaaagaaagaagaaaacctgctgctgccccggattgctgccgatgatatccgcaaccctgttgtattccgtaccttaacccaaactcggaaagtggttaatgccattatccgccgctacggttcgccgcagcgcgtgcacatcgaaacggcgcgtgagttgggcaagtcttataaagaccgcaaggaaatcgaaaaacggcaggaagaaaaccgtaaagaacgtgagcgggcggcagcggattttaaagaattgttcccgaattttgtcggcgaacccaaagggcaggatattttgaagttgcggctttacaaacagcagcaatgcaaatgcctgtactcgggtgcggaaattgatttgcgccgcttgaacgaaaaaggttatgtcgaaatcgaccacgcgttgccgttttcgcgcacttgggacgacagtttcaacaataaagtgctggtgctgggcagcgaaaaccagaaaaagcgcaaccaaacgccgtatgagtatttggacggtgcaagcaacagccagcgttggcgcgaatttcaggcgcgtgtggccggctgcggtttcccgtatgccaagaaacagcggattcagacggccaaactcgacagcaaagccgagcagggctttttggagcgtaatctgaacgatacgcgctatatcgcccgctttttgtgcaacttcatcgaagaaaacctgcatttggaaggcagcggcaaacggcgcgtgtttgcttcaaatggccaaatcacatcgctcttgcgcggcttatggggcttgcggaaagtgcgggaagacaacgaccgccaccatgcactggatgctgtggtggtggcgtgttccaccgtatccatgcagcagaaaatcaccaaagctatgcagcggcgcgaaacattggaaacggtggacaccgaaaccggcgaagtgaagcagcgcattccgcagccgtgggattttttccggcaggaagtgatgatacgcgtgtttagcgatcagccgcacgaagagctggccgagaaactcgattcgcgcccgcaggctctgcatgagcatgttacgccgctgtttgtttcccgcgcaccgaaccgcaagatgacggggcaggggcatttggaaaccattaaatcggcgaaaaggctttctgaaaaaatcagcgtggtgaaaaagccgctgacgcagttgaaaagcaaagatattgaaaacattgtcggttatcccaatcgcgaacctgcgctttatgcggctttgcgggaacgattggccgcgcataaagacgacccggttaaggcattcgctgagccgttttacaaaccggcgaaagacggagggaaaggggctttggtcaaagccgtgcgggtggaagacgtgcagaaaaccggtgtgatggtgcgtaaagaccgacaaggaattgcgcgcggcattgccgataatgccaccatgatacgcgtggatgtattcggaaagaacggcaaaaactatctggtaccgatttatgcgtggcagattgccaaaggtattttgccgaataaggcggtggtacagggtaaggatgaggccgactgggatgtaatggatgaaagctatgcgtttaaattcacgctatatccgaatgatttggtagaagttattagtaagaaaggtaggatttttggctattttggcggcttggatagagccaccggcaatattaatgttaaagaacatgatatggcaaaaaataaagggaaagaaggagttcaccgtagtttaggtgtaaaaacggttttatccttccaaaaatatcaaatcgaccctttgggaaaagaaatccgcctgtgcaaagcggagaggcgccttgagttgaaaaacaaaaaataaacccgtatgccgtctgaaatctttttgcagacggcatattacgttacaacacacggagaaaccgatgacttggcgcagcatactgatcagcaaacccgcccgtttgtcgttgcagcaaaaccacctgctgatccggcaagacgaagccattcccgtgccgctcgaagacattgccgtgattgtggttgaatcgcgcgaagtggtgctgaccgcgccgctgttgtccgcgctggcgcaatacggcgttaccctgctgacctgcgacgagcagtttttgccctgcggccaatggctgccctttgcccaataccaccgcagcctgaaaatcctcaagctgcaaatccatatgacgcagccgcagaaaaagcagctttggcagcggattgtgcagcaaaaaatccgcaatcaggcatggttgctggattacagcggccacgacatcggcgcaggccgtctgaatgctttggcggatgaagtaaaatcgggcgacaaaggttatgccgaaggacaggccgccgcgctgtattttccgctgctgtttggcgatgcgtttacccgcagtcaggaaaacgccgtcaatgcctgcttgaattacggttacagcatcgtgcgctctgccgttgcccgcgcgctggtgcaatatggttttctgcccgcgctgggtttgcagcacaagagcgagctgaatgcatttaatctggccgatgattttatcgagccttaccggcagattgtagatttgctggtgtacgatgccgtatgcgcgcaaagcctgcctgaaacgcttacgcccgaaaccaaactcaggctggtagggctgctttgctgtcagattatgctcgacaaacgccgttacagcctgctggccgcgatcgaccgcaccatacagtctttgcagacggcattaaccgaaaacaatcccaaactgctgaagctgccgcaaatgctgcctctgaaagagcatgattatgagtgaggcccaatttatgcgcttaatcgtctttttcgacctgcccgttaccaccgctgccaagcgcaaggcagccaaccggttccgcaaatttttgcagaaagacggctaccagatgctgcaactttcggtatattcgcgcatcgttcgcgggcgcgatgcgttgcaaaaacaccacaaaaggctgctgcaacaactgcccgaagaagggcaggtgcgttatttggaggtaacggaaaagcaatatgcgggtatggtgatgctgattggcgagccgaaaacgcgtgaaaaaaaggtgaatgccgaccagcttttgctgttttaaaacggaattttaggcagaaataaagcggagaacccttgtttttcaaggattccccgcttggctattgtaacactacgagatgagagagggagctacaacattacatcagcccgcgccttcgttaaccatattgtaacactacgagatgagagagggagctacaactgtacattttcgctcctaagccgagcgttaattgtaacactacgagatgagagagggagctacaacgctaaccctacttcttatataaagcttataattgtaacactacgagatgagagagggagctacaactgagctgctggatgcgctgcgccgtatgaaattgtaacactacgagatgagagagggagctacaactggagacctctcctacagcaaccaaaaaatattgtaacactacgagatgagagagggagctacaactcctgccgacttctccttgggcattactgaattgtaacactacgagatgagagagggagctacaactagatgttttgccggtgccgggtgtggcggattgtaacactacgagatgagagagggagctacaacaagtcatatattgctgaaaactactatgtaattgtaacactacgagatgagagagggagctacaacgtaccccagcacggcagaggaggcgtttcaattgtaacactacgagatgagagagggagctacaaccaagaaaacaacataccgacaggcatactgattgtaacactacgagataagagcgttgtaacgtaaattggcaaggttaagtaacaccatatcattatgattttaaaaataatatattgttgaaaaagcagcaatgaaaaggccgtctgcaaatatacagacggccttagttttgattaaattttattcccactcaatcgtggcgggcggtttgccgcttacatcgtacaccacgcggttgatgcctttgacttcgttgatgatgcggttggacacgcggccgagcagggaatacggcagctccgcccagtgtgcggtcatgaagtcgctggttacgacggcgcgcagtgccaccacataatcgtaggtgcggccatcgcccatcacgcccacggatttcaccggcaggaatacggcgaatgcttggctggtcaggtcgtaccatgaagtgccgttttcatcggtggtgttgcgcaattcttggataaagatgtcgtcggcttgacgcagcaggtcggcgtattcttttttcacttcgcccaaaatgcgtacgcccaagcccgggccggggaaggggtggcggtacaccatttcgcgcggcaggccgagggcgacgccgagttcgcgcacttcgtctttaaacagatcgcgcagcggttccaacaatttcagcttcatgttttcaggcaggccgccgacgttgtggtgcgacttgatggcgtgggcttttttggttttcgcgcccgcactttcgatgacatcggggtaaatcgtgccttgggccagccatttggcgttggtgagttttttctcttcggcatcaaatacttcgataaattccgcgccgatgattttgcgctttttctcggggtcggtaacgccggcgagtttgttcataaactgcgcttcggcatcaacgtgaatcacgcgcacgcccaagttgcgggcaaacatgtccatcaccattttgccttcgttcaggcgcagcaggccgtggtcgacgaatacgcaggtgagttggtcgccgatggcgcggtggatcagcgcggcggcaacggaggaatctacgccgccggacaagcctaaaatcacttcgtcgctgccgacttgttcgcggattttggctacggcttcgtcaatgtagttgggcatggtccagctcggtttcgcaccggcgatgtccagcacgaagcggttgatcagggcgcggccttgtttggtgtgggtaacttcggggtggaactggatgccgtagaattgtttttcggcgtgttccatcatggcaatcgggcaggagggggtgtcgccgatgacggcaaagccttcgggcagcttggatactttgtcgccgtggctcatccatacgtcgagcgtgttgggttggccgtctgcaaggccgcgcgtcagttcgcaatcgatggttttcacttgggcatagccgaattcgcgctggttgcccggggagacttcgccgcccaaatggtgcgccataaactgcatgccgtagcagatgccgagtacggggatacccaagtcgaaaatgccggtgtctgcctgataatcggagtcgtaaacggaattggggccgccggaaagaataatagctttgggcttgaaggctttgatttcagccaaaggcatatcgaaagaatgcagttcgcagtaaacatgggcttcgcgcacgcggcgggcaatcagttgggtcacttgcgagccgaagtcgagaatcaggattttgtcttgggtcatgatgtttgctttaataaagaaacggttggggacacggcaatgatgattcatgccgtctgcaaatttggcggattataccatttttcagacggcatttgcattatcagaacggttggagagcgagcgtagggcgtttggcgtacatggaaaaatacgcgccgaatgcgggagaatttgcagacgggcaaaaagaagcaacccgccggattgggcgggttgtttgaaaggataggagcggttttgcgcggcttgttcggctgcaacttcttcggcaaaggcgcggacaccaaccgtcaggcgcggtttcttttttgaaccatgctttgtcaatctatagtcgaataaaataagaatgagacaaggcagcgaagccgcagacagtacacatagtacggcaaggcaaagcaacgctgtatcattcttattttaaatgactatattttggtatgccccaagcaaatccagaaacaacagccaagctgacggcaataacaattcaaaacgaaatcatggcggcaacggcagacatcttttccttttaatattcatcagcaggatatgaatacaagacttctgattcaaaggtatcgatgtcgatacgctcttatcggctgtgcgttgtcaggtttgagcggtgtcggcaaggtcatggcaacattgaaattggcagccgatgcacttcaggcgcaacattgtgagcaaagccgtattttgcagacggcctgatgcggcaagtttaatcgttgatttttctgtattgtttgtgcggcacgatactgctgcgcgagagcagcagcaaaatgcccagcaccatcatgcccaacgcaatcagcggcgaatagccgaaccagtattcggtacgcaggtagatggcggcaccgatatacaccaacatcgggccggatacaatggattgtttgttgatgccgtccatcaccatcactgcgatgccggcaatggcaacgcctgcggcaaccagtgtggcggtggccggcagtacgccggtggttttgagaaaccagactgcgccgaataaaatcagaaataggggaagggcaagggaggcctgcggcatggcggtattccgtgtggtgttcagacggcttgattataaaggaaaagcgttgtggaaattgacggtaaatgcaatcttgcgtgtatttgtgcaaaaaagatgcggcttgtctgtttcggcaaacgggcttatgcttgcggcttgaaccgattgccgaacccatcgccgctgttatgaacataccgcttacccgccgccgttttttcgcccttgctgccgtaaccgcaagtgcggtggccgtgccgttatggttttccggccgcgaaaggccgtctgcaaaacagcaggcagacggcgggcaggattttgtggcttggcaggggattgccttgggttcgggggcgcagataaggttgtaccacgaagaccacgcctttgccgaagctgtaatccgcaaagcattggcggaagtggcgcgcttggaaaagattttcagcctgtatcgggaagatagcgaaatcagccgcttgaaccgtgaaggccgtctgcattatccgagtacggatatgctggcggttttgagtttggcaggcagactgtaccggctgacggacggcgcgttcgatccgagcatacagccgctttggaatgcctatgcggatttcttcagacgaaatcctgacgcggtaacgccgccgcccgaaacggaagttaatcgggcattgcgtttggtcggttttgacaaagtggcgttcgacagtcaagccgtcacttttgccgaacgcggcatgggtttgtcgctcaacggtatcgcgcagggctatattaccgataaaactgttgaattgttgcggaagagcggcattcggcaggcattggtcgatatgggcgaaatccgcggcttggatacgctggggcagcgcacttggcaggtcggtatcaaaaatcctcaagacgaaaccgatgttctgctgaccgtgccgctgcaaaacgaaggatttgccacatcgggcggttacggtacggtatttaatgcggcggaaacgtttactcatttgtttgacccgcgtacaggcggcgcgcaaccgcgttatcggagtatcagcgtcatggcggaaagtgcggcggtggccgatgcgttggccacggcgtttgcgattatggacgaaacggaaatccgccgtgctgccgaagccgagcgggcaaaagtgtggctggtggataagacggggaaactcatgcaggtataggattgttttgccgccgttttccggttggtgtatgggagccgtctgaatatgcagacggcttttgccgtataatgacggcttttctttgatttttgctgtttggatttatgaacattccgtcccgttttgccgcatggttgctgtgtgccgtttctttttccgcgactgctctcgatttgggcaatattcctgccggagaaatttccgtttatgtgaaggaactcgacagcggcaagattgtcgaatcgcaccgtgccgacgcggcagttaatccggcctcagcgatgaagctggttactgcctatgctgcttttcgtgcgctggggcaggattaccgctggcataccgattggttgggcgacggtgaaatcaaagacggtacattgtcgggcaatctgtattgggcgggcagcggcaatccggtgttgcagcaggaagaccttgccgtggtgcagcagcagttgcgtaatgcgggtgtccgtaatattgaaggcgggctggtattggaccgcagcttgtgggggagtgtgccgaacagccccgattttgccgcagacgagggcaaaagctatatgataccgcccgatccgaatatgctggcgtataaggtagtgtggctgatgcccgaacgcgacagcgagggcagggtagtggtgcggaccaagccgcaactgccggaaattccgttggacaaccgcatcagtattgtgccgtatgcggctgccgagtgttcgtcgttgcggcgttatatgaaagcggagtatgcggtcggagtgttgcgtgtcagcggcaggctgcccgaaagctgtttggggcaggaaatgtttgtcaatatgctgggggcggaagagtttgcttaccgcagttttaccaacctttggcggtggtcgggcggccaaattgcagacggcctccaaaccggagatactccgcctgaagcgcgtttgctggtgcgccacttctcgccgccgctgaaagatatgctgacggaaatgaacaagcattccagtaatctgattgcccgttcggtgtatttgaaattgggcggaagtgaagatgtgcagacggccttggcgcaggcagagacagtagtgcggcgggagttggcattgtcgggcgtggacagcagcgaactggttttggaaaacggttcgggtttgtcgcgtaaggagcgcgttaccgccgagatgctgggtcagatgctggaaaaggcttatttcagcccatttaaagaagcctttatccgtacgctgccgattgccggtgcggacggtacgctgaaagaccgcctgagtgcggcaggtccgtctttgcgcttaaaaaccggtacgctgaaaaacgtgcgcgcgctggccggttactggctgggcgaaaagccaatggcggttgtggtcatcatcaacagcccgaacgcagattattatttggaaagtatggataaattgattgagagccttgtgccgaaacaaccgaagccgtctgcaaatccgcctgaacagccggcatccgccgccgtccacaataagccagatatgctataatacacgattaaatttataaattttcaggaaaaaacatgagcttgaaatgcggcatcgtcggcctgcccaacgtcggcaaatccaccctcttcaacgcgctgacccaatcgggcatcgaagcggccaactatccgttttgcaccatcgagccgaacgtcggcatcgtcgaagtgcccgacccgcgcatggcggaattggccaaaatcgtcaacccgcagaaaatgcagcccgccatcgttgaatttgtcgacatcgcaggcttggtggccggtgccagcaaaggcgaaggcttaggcaaccaattcttggcaaatatccgcgaaaccgatgcgattgtaaacgtagtacgctgtttcgacgacgacaacatcgtccacgttgccggcaaagtcgatccgattgccgacatcgaaaccatcggcaccgaactcgcgctggcggacttggcctcggtggaaaaagccatcgtgcgcgaagaaaaacgcgcccgctccggcgacaaagacgcgcagaagctcgttgatttgtgtaaaaaactgctgccgcatctggacgaaggcaaacccgtgcgctcgttcggcctcgatgccgaagagctggccatgctgcgcccgctgttcctgctcaccgccaaacccgccatgtatgtgggcaacgtggcggaagacggctttgaaaacaacccgcatctcgaccgcctgaaagaacttgccgccaaagaaaacgcgcccgttgtcgccgtatgcgccgccatggaaagcgaaatcgccgaattggacgacgacgaaaaagccgaatttcttgccgaaatgggcttggaagagccgggcttaaaccgcctgatccgcgccggttacgacctcctcggcctgcaaacctacttcaccgccggtgtcaaagaagtccgcgcttggaccatccgcaaaggcgacaccgccccgcaagccgcaggcgtgatccataccgacttcgaacgcggctttatccgcgcccaagtgattgcctatgaagattttgtctcactcggcggcgaagccaaagccaaagaagccggcaaaatgcgcgtggaaggcaaggaatatgtcgtgaaagacggcgatgtgatgcatttcctgtttaatgtttgattaaagtataactgtgtttgttttcagacggcatgatgccgtctgaaaagccaaggaatagtgaaaaataatgagcgtaatccaagacctccaagcgcgcggccttatcgcgcaaaccaccgacatcgaagcactcgatgctttgctcaacggacaaaaaatcgcgctttactgcggtttcgaccccaccgccgacagcctgcacatcggccatctgctgccggttttggctttgcgccgtttccaacaggccggccatacgcccgtggctttggtgggcggggcgaccggtatgatcggcgatccgagtttcaaagcggtggaacgcagcttgaatacgccggaaaccgtgcaatcgtgggtggccagcatccgcgcgcaactggagccgtttttgagcttcgagggcgataatgcggccgttatggcgaacaactacgattggttcggcggcatgaactgcttggatttcctgcgcgacatcggcaaacatttctctgtaaacgcgatgttgaacaaggaatcggtcaagcagcgtatcgaccgcgacgatgtgggcatttcgtttaccgagtttgcctataccctcttgcaaagctatgattttgccgaattgaacaaacgccacggcgcgatgctgcaaatcggcggctccgaccaatggggcaacatcaccaacggcatcgacctgacccgccgcctgaaccaaaaacaggtattcggcttaaccctgccgctggtaacgaaatccgacggcaccaagttcggcaaaaccgaaggcggcgcggtgtggctcaatgccaagaaaacctcgccgtaccagttttaccaattctggctgaaagtggccgatgccgacgtgtataaattcttgaaatacttcactttcctgagtgtagaagaaattgacgcgattgaagcgaaagaccaagccagcggcaccaagcccgaagcgcagcgcattctggccgaagaaatgacccgcctgattcacggcgaagcagctttggaagcggcgcaacgcatttccgccagcctgtttgccgaagaccagagcaatctgaccgaagccgacttcgaacagctcgcgctggacggtttgcccgcatttgaagtgtccggcagcgtaaatgttgtggaagccttggtattgagcggcttggcccaatcaaacaaagaagcgcgtggttttgtcaacagcaaagcggtggtgttgaacggcaaagcagccgaagcgaacaatcccgatcatgcgccggaaaaacccgatgatgcgtatttgctggccgatgaacacaaacgcttcggcaaatacaccatcgtgcgccgc

SEQ ID NO: 3163 - DNA, 23222 bp, synthetic construct
  misc_feature 1..23222: note = Synthetic
  source 1..23222: mol_type = other DNA
aaaacattacgcaagtattctggcactaagtgtcgtttaattagtttagcaagaacccatgcaccgacataccctaatacagcagcgatgagtacgagtttagaaaaagttccaaactcattcgcatccccacctgaaataatatactcataaacgaggacgacagcgattgcaccaactggatcaactaaaatcccttcccattttaaaatattagcaatatttgccgttggatgaacactacgtaatagtggggcgataaccgttggacctgttacgcatacgagtgaaccaaataataaagcaatacgccaatctacattaaataaaaaataacaggcgagggaaagtacagagatagtgatcaacatccctaccgaaactagtaagcgaatgattcgaccatgatgggtaatctcatcaaattctaatgtaagcgcaccttcaaataaaattaccgcaacacccaatgagatgaatggaaaaagtaaatcacctaatactttatcgggttggaatatatgcaatacaggtccaactaaaataccaatggcgagtaaaaatagaatcgcaggttgtttggtgtaccaacctagccattgtgcaccaataccaaatgcaattactaatgctagtaaaagggaagtgtccataggaatccttctgataagtcattgtgttagtttgggaaattgtataaaagaacacgtcagaagaaaaggaaaaagaaaggatgtgttaacaagcaaaatcaagttaaaaaataaacgcaaaaagaacaataaataatcttgaatagaattttaaatatactaatatatcagtagagtaactattcatagtttaatagctacttgattctattatttaacttattgaaaaggaaggtaatatatggaaatgccagtcaaaattgaaaaaacaaccggaaatccaggtccacttgggcttttctcttttgcactcagtacatggctccttgctcttattaatgctggtgaatattctatctcaaatatagggcttgtattagcgatggggattgcatttggtgggacagtacagtttattgtaggtcttctttgttattttaaaggtgatacattcggttttaccgcttttggtggttttggtgccttttggtggtcatttgtattatcacaaatgttctttacaaaaggagtaaccgataattttacaggttggtatctgttagtttggggtgcctttacttgcggattatttgcaatgagtctaaataaagaccgcgtactacaagctacattaatctttgtgatccttactttgttctcgcttgcagcaggtaattttggtgccggtacgactttcttacatcttggtggttggctaggccttatttcagggattcttgctttctatcttggtggtgctcaaatgattaatgaaaattacgggcgtaccattttcccaattggagaatataaaccgaaagagtagcgtatattttatggaatattttaaaatgcgtcttatctaagactaagacgcatttttatttcttaaaagcgaatatctaaattagctaaaatactttttcgacgaccgaatcccccttccacaatgagtcctaaattcggattaatttgatattggaaaccaagtaatgtgttccattttgctatcaaatgttgttttacatggaattttccaatagtcggagcaggaatagtcagttgtccgtttttaactaacttcccaatatttaaatgtttggcaacttgattattcttatcatacaaagtcatggacatggtattgggcaagccaagttttgcaagatcacccgagagattttcttctacatcttgatacatcccaccgatccatacacgtagcggaagtgcctgttgaaagtcataaccgatacgtggactcatcacgaatgttttgattgtgccatcaataatggataatttacttttagtatagttaaaatctatcacactaaaaatatgtttatatccccctgcgataatcgcaccgcctccgtacagatttcccttaagattcaatttaaaattatcaaggcgtccttttgcataataacctccaaatttttggctaagaataggaataccttttaaaggaatgggggcagattggaaagttacactggaagaagacattcccgtcatttttccacccatgacatataaatttaaaaacggcagtacccatgcatcggcacggaaaacaaaaacattacttttttgcttaccattttctggaaaaagattgagttgactatcaataattttttgtaaatttgattggagtggtttttgaaaaatagcggggatacccatttgtgtaaattgttgcttggtgagctgtatgccttgaaaaccaatactatcaatagcaataccttgctgcatatgcatgtagctgaaattaaaaccataaggtttaggtaaggtgtaaccaagatcttgggcttctttttttaaaaaaggaagagaaagagtaaatgctgatcctgtgggtataacgcataataatcctgcactgacaaaaagcaatttatagaatgacataagttattgtttattcaaagtatgatcaaggaatagcagtctagtataaaaaataattagagaaaagtgggtacagacataaaaataccgacacaaagatgtcggtattagggagaaactattttcttagaagaaaatcaacaagttgtttttcaataagatcggtaaaaccgccttctctataggcataacgcaacatctgataattttcaggatattgatccattttttctttaacgaggcttggaaattcttgataaatcacagttgtcttttctccaacaagaaatgcactcggaatcgaatgagtttcttcaattactttttgttgttctgatgaatcaaacaattgggctttttctaaatcgtaacgtgggatataacgtagggttaataagggattgttacgagccattttctcgataatagggacgaaaacacgacaatcagggcaaaatggttctgccaagataatccattcttgcggagttttgagtttttctaattccgttagcgtgtcataactaagttggattttttcaaaagcggcgatctgtttttcagcatcctctttggaattgaagttgagatagtcttggtaagtaaacattgccatactcctgtcatttaatgaataatatcttcattttatgcgaaaaatttaaaaataaaagtgatctatgccacgtaattttatataaatttttaggaaaaatggggcgtgatgattgcaaaaaataaatcactagccacaaggcttgcaaaccgctaaaatacctcgcttaaaatttacttaataatgatgaaagaacaatgacacaaaaactccatattaaaacatggggatgccaaatgaatgagtatgatagctcaaaaatggcggatctccttttaaatacgcatggcttagagcttactgaaaatccagaagaagccgatgtattattacttaacacttgctctattcgtgaaaaagcacaagagaaagttttccatcaacttggacgttggaaagaattaaaaaaacaaaatcctaaattagtaattggtgtaggtggttgtgtggcatcacaagaaggtgaacatattcgtcaacgtgcgccttacgttgatgtcatttttggaccacaaactttacatcgtcttccagagatgattaaccaaattcgtggtggatcacgttctgttatcgatatcagtttcccagaaatcgaaaaatttgaccgcttaccagaacctcgtgcagaaggggcgaccgctttcgtttctattatggaaggctgtaacaaatactgtacctactgcatcgtgccttacactcgtggtgaagaagtttctcgtccagtagatgatattttatttgaagtggcacaactagcagcacaaggtgtacgtgaagtaaacttacttggacaaaatgtaaatgcgtatcgtggtgcaacatttgatggtggcatttgctcatttgcagaattattgcgtttagtagcaagtattgatggtattgatcgtttacgctttacaacaagccatccgattgaatttacagatgatattattgatgtatatcgtgataccccagaacttgtgagtttcctacacttaccagtacaagcaggttctgaccgtatcttaaacttaatgaaacgtggtcatactgcacttgaatataaatcgatcattcgtaaattacgcaaagtgcgtccaaatattcaaatcagctctgacttcatcgtaggtttccctggcgaaaccgaacaagattttgaagatacgatgaatcttatcgcacaagtaaactttgatatgagttatagcttcatctattctgcacgtccaggtacgccagcagcggatatgccagatgacgtagatgaagaagtgaaaaaacaacgtttatatcttttacaacaacgcattaataaccaagcagctcaatttagccgtgcaatgttgggaacagaacaacgtgtgttagttgaagggccgtctaaaaaagacatcatggaattaacaggacgtaccgaaaataaccgtatcgtaaacttcgttggtacaccagacatgattggtaaattcgtagatatcaaaatcaccgatgtttataccaactccttacgtggtgacgtagtacgtaccgaagatgaaatgggtttacgtattgcacaaagtccacaggaagtgatggaaagaacgcgaaaagaagacgatttaggtgtcggacaataccgtgttgaataatcaataaaataaacccttttgcgttaagtaaaagggttgtttttttactaagcccccatatattgtgagtacttcccagcaatcctattttgataaaaataataattaaaattaaacacacaaggaattaacagaatgaaaacagtaaaaaaacagaataaaaaaaccgtaagtgcggttaaaaaatttaaggacgctgcacttatagacccaaatcttgcacgtgaacagcaaaaatatgcaaatcccgtgccaagtcgagaatttattttacaaattatgcgtgagtataacgccccgatttcccgtgcagaattattagatattttgcaaatcgatgacgaagatcgtaaagaagggctacgtcgtcgattacgtgcaatggaaaacgaagggcaagttattttcacaaaaggcaaacgttttgcattacctgaaaaattagatcttattaaaggtgaagttatcggtcaccgtgatggttatggctttttacaagtagatggattgaaaaaagatctttttattcctaaccaccaaatgcgtggcgttatccatggcgatatcgtgttagctcagccaaatggttttgatcgacgtggtcgccaagaagtgcgtatcgtccgtgttttagaagaacgtaaacaacaaatcgtaggacgttttttcctagaaaatggcttaggttacgtcgtgccagatgataaccgtattcagcgggatatcctcattcctgataatgcacgccgtcatgctcgcatggggcaagttgttgtcgtacgtttgcaatcacgtaatgcaggttttggacaactcgtgggagaaattaccgaagtgctaggcgataatatggcaaaaggcatggaaactgaaatcgccattcgtcgttatgatattccacacgaatttccaaaagccgtattaaaacaaagccagcaatggggcgaaagtgtccctgatgaggcaaaacaaaaccgtgccgatttacgtaatttaccattagtcaccattgatggtgaagatgcacgcgactttgatgatgccgtatattgccaagctgaaaaaggtggctggcgattatgggtagcgattgcagatgtgagttattatgttcgtccaaattcatctttagataaagaagcacataatcgaggaaattccgtttatttcccaagtcgggtagtgccaatgttgcctgaagtgttatcaaatggcttatgttcactaaacccacaagtcgatcgactttgtatggtttgtgaaatggcgattgataaagaagggcaaattaaagattacaaattctatgaaggcgtaatgaattcgtttgcacgtttaacgtataacaaagtggcaaaaattcttgtcgataaagacgaagaattatgcgaacgctatgcaaacctcgtgccacatttatctgatctttacgatttatataaagcccttttaactgcacgtgaacaacgtggcacaatcgattttgaaactattgaaagtaaatttattttcaatgaaatgggacgtattgagcgtattgagcctgtcgtacgcaatgatgcgcataaaattattgaagaatgtatgatcgctgcgaatatttgtgcagcgaactttgttgaaaaacacaaagaacctgcattattccgtgtgcatgcaaaaccaagtgaagaaaaacttaaagccttccgtgaatttctaggggaattaggtttaggtttacaaggcggtgacgatccaacaacagaagattttgctgaattgctagaagctgcacgcaatcgtccagattacgaattaatccaaacgatgctattacgctctctaagtcaagcgatttactcagcagaaaatgaaggacactttggattggcgttacaagaatatgcacatttcacctcaccaattcgtcgttatccagatttaaccttacaccgtggcattaaatatgtgttagcaaaaggaaaaggattaaaacgtaaaacgaccgacactggcggttatcattacagttttgatgaaatggatgcgctaggcgatcattgttccatgacagaacgtcgtgctgatgacgcaacccgtgatgtagcagattggttaaaatgcgaatttatgcaagatcacgttggtggcgaatatacgggtgtgattgcgtcggtaaccagtttcggattattcgttcgtcttgatgaattgttcattgatgggttagtgcatatctcaagtttacgtaacgaatattaccaatatgatgctgcatctcaacgccttatcggtgaaaattcaggtatggtatatcgccttggtgatcgcgttaaagtcaaagtaattggtgtaaacttagaagcacgtcaaattgactttgaattgttagacagtgcacgtggggtgcgtaattctggaaaaacagcaaaaaaacgttttaaagagttagcaaataaagaaacccaacaagcggcctttaaaaagaatgcgaaagcaaacaagaaaaaaagtacgagtaaagtaagagcaacgaaaaagtcagcatcaaaatctcgtacaaaagtgagtaaaaaaagccgagcgaaaaaagcttagcgataatttaatttgatagaagtgagaaaaaatggcagaacaaatttatggtatccacgctgtacaagcatttttaacccgtgcaccagagcgtttaattgaagtttatgtattaaaagggcgtgatgataaacgccttaatcctatccttcaacaattacgccaacttggcatcgctgtacagttttgtggtcgcgatgccttggataaaaaagcacagggggaaaatcaccaaggggtgattgctaaaatccaagaggcaaaacccctcaatgaaaatgatttggataccttaattacaaataccgcaaatccattattgctagtgctagatggcgtaacagatccgcataatcttggtgcatgcttacgtactgccgatgcagcaggggtaacagccgttatcgtaccaaaagataatgcggcacagctaacctcagtcgctcgcaaggtagcgtgtggtgcagcagaaacgatgccattagtgcgtgtaacaaacctagcacgcacccttcgtgaattacagcaacgccacaacatttgggtagtaggaaccgcaggcgaagcgaccagcacactttatgaaactaaattaacaggcgcaaccgcacttgttatgggggcagaaggtgatggtatgcgtcgcctaacccgagaaacttgcgatgaattaatcagtatcccaatggcaggaagtgtttcctcgttaaacgtttccgtagcaactggtgtatgcttatttgaaatcgtccgccaacgtatggcttaataaagtatttctgtacctcatataaaaaagccctgtttttaaacagggctttttatttagaaaatcacaatctaaaagcaatcacgaactaaaacgtataagttttttgcaaaaaaatcgcaaaatcggaaagaaaatctccaaattttacgattttttatttaatagattaccaataacacattgaaaataatacgttattcgcaagggtattgtaacacagcaaaatgagaaagggagttacaacttgataaatcagatcgttaaagaaatagaaattgtaacacagcaaaatgagaaagggagttacaactcgattgattagatcttgaattatgttgtaattgtaacacagcaaaatgagaaagggagttacaacgttatagctcgtgatttccgtcactcccgcattgtaacacagcaaaatgagaaagggagttacaaccgcacgttgtgcgaccatcttttcaaattcattgtaacacagcaaaatgagaaagggtgtattgcccctttactgcttcaaaaataaaaaagccaccataaaaatggtggcaaatatcataaaattttccgaaaaatagggcgtaataactgattatttatcagtttttacgtttacatcagtgcgtaggtttacgtctaatgtattgtatggaatttcaatattattttgatcaagggttactttgatacgttctaataaatctgcttttactgcaaagtagtcagcagtattcacccaaccacgtacgaataattgtacgctgctgcttgcaagtgcattaacaccgattgatggttctggtgattttaataaacgtgtttctgattcaagtacacctaaaatcacatcgcgtgcttctttgatatttgcgctataagcgatatcaataagtaaatctacacgacgttgaccagtcatagagtagttagtgatattgccgctgaacattgttgagttaggcacgatcacgattttgttatcaggggttttaagtttaagcatgattaaaccgatatcttcaacagtaccagaaacgccagcaccttcaatgaagtgacctttttggaacggtttaaatacaagaatcatgatacctgcagcaaagttttgtaaagagtttttaagtgataaacctactgctaagcccgcagcaccgattaacgcaacgaaagaagaagtatcaacacctaattgtgcaagtgcaataatgataacaaggattaagcctattaagtcaaaaattgacattacaaagctagaaagcattggatcactgccagatttatccatgcctttacgaattaatttgctgattaagcgaattactttacgaccgatatagtaaataatgatcgcaagaataatttttacagaataaggaacaacccagtccatcaaaatgtgatggaaatcggtgtttttaatgttttcaataagattagtcattagatattatctccacaagtaacaaaaagagttaaccaatcataggtattatatttgtaaataaatagttgtgcaatagttaaacttgttaaaaagaagattttactcaggcgggaaagatgatgccccttgtgatccgaaaatctcaaggggcagtgcattgcgattcttttgaatcttattgtaacaacgtttctcattttgcttgtattacaacgaggagcgattatacaacttacgcagtttctgtcaatggaatgttcaaaataattgtatttttaaacgatataaatcgcctataaaatagcttactttttgtaaacgtattataattctaaaaatttatatgaaaaaatttataccaaaaggataagtaaaatggagaacagcactttacaagcacaatcgattcctgcctatgtattaggactagatattgggatcgcctctatcggttgggcatgtgtcgcagtcgatgaaaaagagcaaccttatggtttattggattgtggggtaagaatttttgatgcagcagaaaatccaaaagatgggagcagtttaaatgcgacacgtcgtgaaaaacgcgcattacgtcgctcaattcaccgtcgtgctttgcgtatgcaacgtgggaaagcactctgtaaaaaatttgggttacttgaagcaagcgattttattaataaaaatgaagtaacagggctaccgaatgacacttgggaattacgtgttgcgggcttaactcgtcaattaaatcgtaaagaatgggccgccgtgttacttcatcttttaaaacaccgtggatatttatcacaacgtaaaagtgaggcgacaacaacagataaagagcttggtaaattgctttcaggtgtcgcacaaaaccatcaaatgttagatgaaaaagcttaccaaagctgtgcggaactggcgcttaacgaatttaaaggaaaatggcgtaaccattcaggtgattactctcatacttttaaccgtcttgatctccttgctgaaattcatacgctttttgcaaaacaacgtgcatttggcaattcttttaccgatacagaatttgaagatactttctgcgatttatttatgtggcaaaaacctgctttatcaggtgatgcactacttaatatggttggtaaatgtacctttgaaaaaggggaatatcgagccgctaaacatagctatacggcagagcgttttattatgctgggtaaattattaaatttacgcttttcagacaatggtgggcaacgtggtttaactcaagaagaatgccagcaattactcgaattggcatataaacaaaccaaagtgacttacactcaagtgaaaaaagcgcttaatttacctgaagataccctatttaaaggtttaccatatggacgtgcgaaaaccgcagaagaaattaaaaaagtagaaggacggactttccttgaagccaaagcctatcatcaaattcgtaaagcggtagaaaaagtggataagcaagcgtgggaattgatgaaagcagatgcaaaattgcttgatcatatcggtacgactttctcgctttataaaacagatgaagattttaccaaacaactcgaacacgttgatttagctagcgaaattaaagatagcttaatgatggagttgaattttgataaatttatcaatctttccctcaaagcactctaccaaattttaccatatatggaacaaggcaaacgttacgatgaagcgtgtgcggcaatttatggggatcattatggtaaaaaacttgggcaaatcagtacattattgccgcctctaaatgaagaacaaaaatatcaactcactaaccccgtagtaatccgtgcattatcccaagctcgtaaagtgattaatgcgatcattcgtaaatatggctcgccagcgcgtgtccatatcgaaacaggacgagatgtgggtaaatcttataaagcccgcagggatattgaaaaacaacaagaaaaaaatcgtaaagaacgtgaattagcagtaaaagattttagtgaaaattttcccgaatttgggggcgtcccaaaagggaaagatattttaaaaatgcgcctttacaaggcacaagatggaaaatgtttatactcaggcaaaccattagatctacgccgtctcaatgagaaaggttatgtggaagttgatcatgctttacctttttctcgcacttgggacgacagtatgaacaataaagttcttgtactggctggtgaaaaccaaaataaagggaataaaacaccatacgaatggttaggacatacagatcgttggcaagattttgttgcacgtgttctaaatagtcatttctcgccaatgaaaaaggaacgtattttaacaaaagttcttgatgaaaaaggctttattgaacgtaacttaaatgatacacgctatatcagtaaattcttaagtcaatggattgatgataatttgcaattaacagggcaaggtaaacgccgagttctcatgacgaatgggcaaattacttcattactgcgtgcgcgctggggattacataaagtacgtgaagaaaacgatcgccatcatgcgatggatgcggttgttatcgcctgtacaacgccgagtatgcaaaaacgtattagtgattatagtaaacgccgtgaaatgcaattatttggtgagcgtaaagggaaaatgattgatgaaagtaccggagaaatcagctatatccatttcccaacaccatgggaatatttttatcaagatgtgaatgcgcgtgtattcagtgataatccacaaaatacattacaggaaaacgtaccagatcgtgctgagattttagcagattttgtgacgccactttttgtatcgcggatgccaaatcgcaaagtaacaggacaagggcacttagagacgattcgaggtgctaaaaattatcttactgataaagtcagcactattcgaaaaccattgactagcctaaaattaaaagatctagaaaatatgataaataaagaacgtgagcctgtactttatgaggcattaaaagcacgtttaactgaatttaatgatgatggggcgaaagcctttgcggaacctttctataaaaaaggtggtcagcaagtaaaatcaattaaactgcaagacaagcaaaacacaggcgttttacttaatgacggtaaagcgatcgcagataatggcgatatggtacgtacagatgtctttattaaaaaagggaaatatttcctcgttcctgtttatgcttggcaagttgaaaaaggtattttacctatgaaagcgtgtattgcgaaaaaaacagaggatgaatgggaagatatggatgaaactgcagagtttcagttctcaatgtataaaaatgatttgatagaagttttacgtaagaataagcccaccataataggatattttaataaattaaatcgttcatcaggatgtatcgatcttatcctacatgatagggataccagtcagataaaagatggcataattgaaagccttggaattaaaggcgcgatagctgttaaaaaactggatgtagatattctcggtaaaactatttcgccgtgtaaaaaggaaaaacgtagcgatttccgttaatcatcataacccagccttgtgctgggtttttatttggtaaataaaatcaaaagaataggagggcgcatgacctggcgaaccattattgtggaaaaaggcggtaaactttccttaaagcagcaacaacttttgatcgcacaagaaaggcaacagtttactgtcccgcttgaagatatcgctattatcattattgaaagcccagaaactgtcattaccgcccctttactttcacaacttgccatatatcaaatatctttaattacctgtgatgaacagcatttaccctgtgggcaatggttccctttagggcaatatggcagcccattgcaaacacttaaattacagctcaatgccagtgagccattaaaaaaacaaatttgggcacgtatcgttaagcagaaaattatgaatcaggcttttgtcttaggggaattaaatcttattcctgcacgaaatagattgcttgaattagctaaagatgttcgctcaggggatcgcactgcgtgcgaatcacaggcagcaatgatctattttagccaagcttttggtaaagatttttgtcggcgaacagaaaataacatcaatgcccacctaaactatgcttatagtgtattacgttcagcggttgctcgtgcattagttcaatatggttggttaccttatcttggattacaccattgtaatgagcggaatccctttaatctcgctgatgactttatcgaaccttttcgtccaatagttgatttaaaagtatggcacctttggcaagagaataaattagacagtggtttaactccgaataccaagcaccagctcgcacgattattaaactacgagatgcatttcgaagagcaacattttacggttttagcaagtattgatcgttgcgttggtgcatttaaaagtacgctaagccaacaagatgcaaagctcttaaaactacccgaaatgcaatcactcaaggagcactgttatgagtaaggagataacatttatgcgatttctcgttttcttcgatttacctgtcacaactagagcaaaacgaaaagcagcgaaccgttttcgtatttttcttcaaaaggacgattatcaaatgatgcaattttctgtatatagccgtattctgcgaggccaggatagccaggaaaaacatctaaaacggattcaagagcgattaccgaaagagggttctgtgcgtgttttattgattacggaaaaacaatatacagggatgcaacttttggtcggtgataaacggccaaatgaaaagaaaataactagcgatcaactgctacttttttaatctgaataataaatcaaatgctgattttttatcctttaaaaggcatcaaatagtggtaaaagtatgatttatgaaaggctaaaatatctttagtaatgacgtttttttacaaaaaaaatcgcaaaatcgggaagaaatttccaaaattttgcgattttttatttaataaattgcctataactcattgaaaataatatgttatttgcaagggtattgtaacacagtaaaatgagaaagggagttacaaccaacaatggcaaacactctcccgcttgttaattgtaacacagtaaaatgagaaagggagttacaacccaaaaacagaaacggaatatctattagaaattgtaacacagtaaaatgagaaagggagttacaaccaagcgtgtacacaaaaacaatgccgtgtaattgtaacacagtaaaatgagaaagggagttacaactaatagagctttatcgtgcccgtttatcagattgtaacacagtaaaatgagaaagggagttacaacttcggaaaaggctttatcgcagttttgcctattgtaacacagtaaaatgagaaagggagttacaacgttcgcgtggttaatgttcgtacgattgagattgtaacacagtaaaatgagaaagggagttacaaccaacaaggctaattgcctcatctaaagtttattgtaacacagtaaaatgagaaagggagttacaactaaggtgatagcctcaccctcttttttattattgtaacacagtaaaatgagaaagggagttacaacaaaatcgtacttaagccctttcgttttattattgtaacacagcaaaatgagaaagggagttacaactataagagttttgacggtgaaaatgctcagattgtaacacagcaaaatgagaaagggagttacaacggcgataaagcaacaggtcgcaagcatgacattgtaacacagcaaaatgagaaagagtgttacaattataaagttagggttattttattaatatactaggtcaaaaccagttgtagtaatacacttcattaccattttcaatttgttgttttgcagatttaaaaagaagagtagtaagttcgcgctcagtaagattttggtctccctcatatactttttcatctctacacatcgcaccagttatgcattgatggatgatggtatcacagtcgtttaatgatacttttaaaaaaatacagttattatttctctgggctagatcactatcttcacaagtctctataagctcagaccacttttcttcaaaatattcgctaatatcctcatttccccgcatataagcttcatctatttctcgatctagtgcttccttttgtagtgtgagaggctggagggcatcatataatggactttctattgattcatcctcttcctcataatcatcctcgtcatcttcatttatcgtaaagctaaagcctgttaaattattatcagttgagaggtattccaccccatttgcttgcgtatatcgtgctttttcttcacgaaatttagctttttcaatttgatataaccatatatctagtcccataaattatctcctaattagttgattttattaaattaataagttaattgccataatggtctatatttcgataattatatcattttttataaaaattaaatgggattttattaactattaaattttttttaagtattcgagttaaataaattatttgattttatattgttataaatcataattttatgaaaataatttattttgctaatcttccaaatatttgctattttttgaacgcaaaaaatcaaaataaggggtttattttgttagagaatgtttatttttggatatgcgttggtttaattttgctgatttctgaaattgtagtgtcaggtgtttttctaatgtggtttggtcttgcagctttagcgatgagtgcgagtattgggctttctacattaggttttattaatcatccgctaagtattttagaaatcattctgttatttgtattctattcttttatttttgtatggcttgggcggaagatttatggaactaagccaaataaagaggagcagcctttggattatcttgtcggtaagacgggtgaagtaaaacgcattatcgggctaaatgataaggatggagaagtctttactgatgttgaagccagattgattgatacaatttggattgtccacgttaaaggtaatttaaaagggctagatttagcaagtaaaccgcatattattatcaccaagacttatagaaactgggtggaaggtgaattagtaattacgactgatgagtagaggataagaatgaatttagatgatagtttcgttacactttttttaagtattattattttatgttttgcgattgctattttaaaatcaattgtgaaaattgttccacaatcagaggaatggacagttttacgtttgggaaaatttgaaaaaattctaacgtcaggtattcatgtgattgtgccatttattgagcgtgttgatcgaaaaatttctacaaaggaaacagtagttgaagtatctgatttaactgcattttcaaaagataatgcgagcgtgaaagtcagtgcaaatattttctttaaaattgttgatgcgaaaaaagcgtgttatgacgtacaagatttgcaaaaaacattagaaaccattgtatcaactaacttaagaactcttgttggttcgcttaccgtggaagatttgatgtcaaaacgtgatacgattaatcaaggtgttttaaccattgttaatgaggcatcggaacaatggggtgttaaagtattgcgtgttgaattacagaatatggaattgccacaaaaattgacagaagcgatgcaccgccaaatggaagcagatcgtgaaaaacgtcaagcaattattgaggcagaaggggaacgccaatctacgattgaaaaagccgaagggcaaaaacaagaggcaattttaaaagcgcaagctgaaaaagaacgggttgtgttagaggcagaagcggaaaaacaacaattgattctgaaagcagaagcggaaagacaacaagctttcttgcaagcagaagcaaaagaacgtttagctcaagctgaagcgaaatcagttgaaatgatttcagccgcgattaaacaaggtgaattaagtgcattaaattatgatattgcccaaaaatacactgcagcgttacaggctattggcgaatcagaaaatgcaaaagtcgtattactcccgaatgagttttctaagctaagtggttcaatcgctggaataagtgagatttttcaagaaatgaaaaaataaagatgtaacatgagtaaactgcgactgtaaaaggtcgcagtttttatttatgattaattttcatcttgtaagcctaaataaggcataatgcgagatgaaatttcagtaaaggtggggatattctcagaagtaccatcataacagaaacgtagcgttgggattcctgcatttttaaaaaggagatcacgcttagtgtcattgagaagattgttttcgtgagaaggatcgtccaattcaataataagaaggggattcagagaactgtctgcaagaataaaatcaacacgttgagctgttttcattaatgaattttttaattgtatttcccattgatattcattttcattttctaaggcaatttttttatttaagtggaaaaatttagcgtaatcctctttaggaataaaatgctttggttttatgatttcaataaagggaacttgggcgagtaggaaaaaatcttcctcatagtgatacttaatttctcggcatagacgacatagtgtaatgtaaaagtattgttcattacgtgttaaaattggtttcttttcaaagaaattattgtatgaataaatatctaatttattctcaaatggtcttttttctttcttttcaatataaacaatcttttcttctcgaataatttgaggtttatagataatttctttctgaatttttttaggataaataaaatggaaaaggcattttattaaactataaaaaattaaagacgttatcccgccaatcattaaagcatggattggatgtagatgataaatttctctggttaattctttaaatatatacataggttgtgtttcatacaaaataaatactaacattataaaatatgatcaaaaagttaacaataaatacacaattcgttttataatacctctaaatatgtacactttctgtaagaggtcactaatgagcaaaattacttatcggagaattatttataaccatttatttttaaaggaaaattttgttatggcttttgttgcatttagtgcaacatctgcctttgcgaatgtatcaacatttagacaggaaatgaatatctcagcagataaaaatgttaatgatgtgttaatgcatagagatgaacatttagcaacagtagaaaatgagagtatagggcaagatccgttacaagttttgtggaatgaaataaagaaaaatcattcgacaattactgttgatacagatgatatggaccatggaacacaaagatttgaattacatgatcccgttcgagcggaaacgaataataaaacggggcgttttgatgatgtaaaacttccacaatatcattcagatgatccagatgattcatatgatcctgatgatgaagatgtaagctcttcatcaacggatacgcagagtactggctgtgatccagattgtgcatatgtgaaaaataatgcagatccagataattatccattgaatcatcagccgctaggcatttatggatctgatacgaatattcatacggatattgggactttaccagcgaaagatagtaccaattctaataaaaataagaatccacatttaaaaggcgtggtaataacgttaaaccataatttggacttaggtttcaatggtagcgtagcgataggaaaaagcaaaattcaaaatggtcgtttaactgttggagaaactgagattcaagatggtagtgtaagtgtgagtgtggatggacctaaaatcaccaagcaaggtattgatagcgcaaataaaaaaatcacacatgttgctgatggcatcatttcgccaacttcacaagacgcagtaacagggcgccagctttatcattttcgtcaattaattaatcgtcctgtaatgcctgatttaactcaagtcaatctgcggatagcacacactgattatcaattaggatatttaaatcgtgaaatggtgcatctaaatcaaaggattaaatatttgaatcaaaaagtagatgcttatgacaagcgtgcagaacgaggtattgcaacagcaatggcaatgtcaggactaccacaaccgacgatggctggggattcaatgatggcagttgctggttcggaatatcatggacattctagtattgcgattggctattcagaagtttctgataatgataaagaagtcttgaaatttgataccgccacaaaccttgatgggaaaagtgatatcgctgcaacaattggttacggttaccagtggtaaggcatctaaaataagaaaaccgcaatgaggattgcggttttttattattaaatgttgtaatcccgaaaatgagaaagggagttacaaattggatagtattaattagattttatactatccataggttttaatttctttacttaaaaagcatataaagactacgcataaaattacatgttagaataataacatctaacaataaaatatatctattcatagcttacctccttttagaaaagttaaagaaatcaattatataatattttatattggatataaatattacaaataagatagcgtatatttccttgcaatttattttgattaacgctatatattcaaaataattatcttacgattaaggaattttttatgataaaagcaataacaacaggtgctgtgattgtggtgctttctgggagtgttttagctgagggaatggctattacaaagcaaccgatggcgaaggagatgaatacgcctgcggtgaatcaaaaggtgcgtgcgattttagcgcagaaagaaattgatttacctgcgagtttaagttgtaaaaaggcaatgcaggcgaagatgatttatcgtttgcaaggggataattttgctcaggtagtgcaaatgccatatccgacacagattgtctttgtaaaagctgaggcaccttataatcaagttgcgctagatcttgcgggaatcgatcaaacgaagttactgtatttatcgaaaggtaagaaattcgtcgcctttgctgaacaacaaaagaaaacgccttatgataaaaaagggttagtttttcattatcaagattacttatacacgcttggtgaagtgaaaggcaatggcattaagcttatgttgggcgaatgtacggcgacgttaaaagataaagcggagaaagcctatatggcggatattcaacaaaaaatgcagtacttgtctgatcatcgacaaagcgatgcggcacaggcttttatcaaagctgaacaggaaaaagctgcagcagccagaaaagcattaaaggcagaattagcccaaaagatgaaaggataatataaaaaagctcggtttttgccgagcttttcttttatcacgccccgattttcgaggaaatttatgtgatttatccgttttgtcttacgcagaacgtgaagctggattgtaatccaatggtttttttcttaatacaaattgccatacgtggatatcgcgtgcacggaaagcacccgcacaagaaagtagatagtatttccacatgcgatagaaacgctcatcatatttgttcggatattctttttgaatacgatcccacgctttgtcaaagtttttaaaccatgccattaaagtgtaatcgtagtgcacaccgatattttgtacgtcatctacgatgaagtaaccttcaagggctgaggtcacttgcgccatacttggaatgtaaccatttgggaaaatgtatttcgtaatccaaggatcggcgtcatcggttgtgatgttatgaccgatagtgtggagtaggaaagtgccattatcttttaggaaacctgatgcagctttgaaatagtcttgatagttttttggaccaacgtgttcaaacataccaatactgcaaagtttgtcataaggttgttctggtttataaagacggtaatcttctaagataaagtgaactttatcttgtaaacccgcttctttaatgcgttcttcgccgagtttcatttgttcgcttgaaagggtaagaccatcgcatgacacgccaaaatgttctgctgcgtataagataaaacttgcccaaccgcaaccgatatcaagtacacgttcacctggcttgagatcgagtttacggcaaacgagatctaattttgcatcttgagcgcgttctaaatcttcatgaacttcatcttggaagtaaccgcaagaataagccatgtttttatcaagcattgcggtgaataattcattaccaagattatagtgggcaggcacatctttttttacgcgggcgatactttgaggattgaggagagatttgattttgcttttgccgagttctaatccggcgttgatttttaatttgagattaagtttgctttctaagtctgcttggaggattttacaaattaattcgtcaatagcttcacaattccaccatccatccatgtaggcttcaccgagacctaagtttctatcttctaagactcggttataaaaacgatcgtcaagaacttgaatatcaaaagggcgagaaccattaatttctatatctgctaatgctaataactctttaacaatttctttgcttgaagccataatattctcctattttaagaaaattgtatatctaattaatactattaattcgaacaatatttttagttacgaattatcgtgggaaagtcccacatctaaaaaacggaaaatgagcgcactcatttcgtgctcgcaattctactcctaactaaaaacattgcaacgtgtaacagaattataacgtttaatttatagctaaaaacaatggtttactatgaaaaactagatgaaaagaggataaaatgttaaaatattgaatgtaaaataatcttgtaagtagattggataaaaaaatacttgtttttattaaaaaatatcgttattattcaccacgttttacgaccgtagctcagttggttagagcatcaccttgacatggtgggggtcggtggttcgagtccactcggtcgtaccaatcttatttcttatcatttttcatatctttttttatttccaaatttaaaagaatattcaaaacgccacttttaaaaattatttacattttttaaacaattgtgtaatttatcatactctttttatgtagaatagataagtatatttgctcgaataaaatagcgccccaattttcaaaaaattttatgaaaattgaggcgttagctatttatgtaaatgcatttcttgaggagaaactgctttagctttgatatttagggtttcaccattatcaaagaaaagtgtcactgggaaagttgaacctacagcgattggatgagtcaaatcataaaccatgatatgcataccgccgtattttaattttgtttcgccatgtgcgggaacaggaatttcagaaattggagacatgcgtccgtttttcattccatgaagttctaagcgtgca

SEQ ID NO: 3164 - DNA, 23213 bp, synthetic construct
  source 1..23213: mol_type = other DNA
  misc_feature 1..23213: note = Synthetic
aaggttttggcaacatagccgataatacggctaccgccgggagaacctaccgctaagtaaggttcgccgtttttcatcacgatagtaggtgacattgaagaacgcggacgtttgcccgccgctacgctgttggctacggttttacccttgtcatcagcaggattaaaagcaaaatcagttaattcattgttgagtaaataaccgtttgccatcaatgtcgaaccaaaagcattttcgatcgaagtcgtcatcgataccacattaccttctttatccacaatcactaaatgactagtcgaaggcagctcgacagctttaccgcggttgtatgattgcggttgtgtgaatacgcctgcagatacgctttccaaagctttatctccagcagcgatattttgtgcacgctgtttcaaataagccgaatccagcatagattttaccggtacgctgacaaaatccggatccgccacataataatcgcggtcggcaaatgccacacgggaagcttcgcccaaccaacgccagctttgaatatcggcagcacccgaagccttcatatcataattttgcaaaataccgaaaatctgagccaaagccaggccgcctgaagaaggtgcgcccataccgcaaatttcgtattcacgataaggcttacatactggtttgcgttcgataacacgatactttttaaaatccgccagcgctaattttcccggattatctgttgccgaagttaccgttttaacaatattttttgccaaaacaccattataaaaaggcgcgctgccttctttggccaacaaacgcacgcttttggcaaattcagggtttttcaacaaagcaccagtttccaaaggcttgccttcgggtagaaaataagctgccgtaaccggataacggctcaagtattgttggttttgcttaatcgattcgctcatacggggtgaaacagcaaaaccttcttcggccaattttaccggataatcaaataagtccgcccatgccagtttgccgtaacgcttatgtacgtcttccattaatttcggaataccgggcgtaccaaccgaacgaccgcctaccaccgcatccataaactgcaaaggtttaccttgagcatctaaaaacaattgcggcgtagctgcttgcggcgcagtttcacgcgcatcaaaagtggtcagttttttggtacggttatcccaatacaccaaaaaagccccgccgcccaaaccggatgattgcggttcgaccaaactcaatgtggtttgcatggcaatcattgcatcaatcgcactaccgccacgcttcaatacatcatagcctgcttgcgtagccaagggattggctgaagccgccataaaatctttggctttgaccaaagtctggtcggttaaccccgtactccgctcgggcgcatgatcacctgtgtcagcagtatgttttccaaccggcggttgaggtgcggcacaagctgccagaaataaagataccgataaaaccgataatgcagttaattgttttttcaagacttttctcactttgtattagggtaggcatgcagtcacttaaaacggttaatttcaaatgtcgcacctttgggattaatcaaaaccacaactgtatatagtctcaaaattatacacagttaaaaatattatagttaaatctatccacaatattccacaagtaaaacacacatcctcggatactttttcccatctttttcagatggcccaagataatgaaaaaaatgataaaaaacagattatccacaggcatcggcatctatcataatcatcaaaatccgtttttataaaaaattatatatttaaattgttaatcctctgatccaaaaaaacaggctcaaaaagccttttaagccctaatttgccatctggaaattatgtatttgattttatgctagaatgcgagtttgctttttcaggccctaatttccgtgaataatcccttaaaaatcagggaaccaaaaagccgattgataagtctgccaaatttattctgtttactggatatatttggtaaaacgttgatgtaggtagctgatacatttttatctgcatcttgtaaccacatgccttatcattaaactaagatattgtattaaaacaaattatctgaagacaactcggaaaatatttcatgaatgctactaaaatcatccgtttttcattaccggttttactaaccgccgttttggctgcctgtagcagtcggccgactactccgccagttgtcataccgcctaaagataccgttaccgtacctagcacccctttaccggcaggtacaccttctccgatcggttatagcattagtcctccgggcagtggtactacttatcaggttgtttctcattccgcattacctcagtggcaggttcagcgtttcggtcaaagcctccgtgctttccgcttgggctgcgaacgtttgaaaaaccaagccgattggcaaaacgtatgtgcccaagcaacacaaacacctattgatgatgtttcagctaaaacatttttcgaacaatactttaccccttggcaagtgagcagtaacggcaagcttggcggtaccgttaccggttattacgaacccgttctacatggcgatacgaagcaaacatccaaagcccgcttcccgatttacggcatacctagtgattttgtttctgtcgatttacctgctaatttgcgcggcagtaaagcaactgtgcgtatccaaccgaccggagcaaacagcggcgtaatcagtaatagcgccagctatacggcgaatctggctgaatttccgattaccgaacgtacccgcgcattaaaaggccgctttacaggcagccgttttgttccctactacacccgaaatcagattaacggcggcgcattaaacgggcgtgctccggttttgggttatgcagacgatccggttgaactgttttttctgcatatccaaggttcgggccgtctgaaaactcccgacggccgttacatccgtctcggttttgccgataaaaacgaatatccttatgtttccataggccgctatatggccgataaaggatatctcccattggcgcaaaccacgatgcaagggattaaagcctatatgcagaaaaacccgcagcgtttggctgaggtactcggccaaaatccgagttatgttttcttccgcgagctgcccggtaacgatgtcggtccgatcggtgctttgggtgtgccgttgttgggagaatacagcggcgcagttgaccgccaccatatcactctcggcgcgcctttatttgtagcgactacccatcctatccgcaatgatgcgctaaaccgcctgattatggcgcaagataccggcagtgcgattaaaggcgctgtgcgtgtggattatttttggggatacggtgatgaagcaggtaatgtggccggtaagcagaaacacacaggttatgtatggcaattactacccaacggcgtaatgccgcaatatcgcccttaagttttgggatataaaaccgttatataaaataaaggctgtttgaaacggctaggccgtctgaaaactttcagacggccttttcaacggttggtaagcttgaatattccgaagtaaaaatatcatgtttgaaacttttatgaattggctatttttttatcgcatattgcgtacttttataaaaaagattgcataaatatcaatgcataagatttttttatgattgtctgccttgccctgataggttaaagtgtcgggtaaattaaaaatttcacatacttcacaaaaggatacttccgatgaaaggtgatatcggtgtaatcggtttggccgtaatgggacaaaacctgattctcaacatgaacgataaaggattcaaagtggtggcttataaccgcaccacttccaaaaccgaagattttctcaacggcccagcaaaaaacacccaaattaccggcgcatattcactgcaggaattagtcgataaattggaaagcccgcgcaaaatcatgctgatggttcgtgcaggcgaagtagttgatgattttatcgcacaattgctgccgcttttggatcaaggcgatattattatcgacggcggcaatgccaactatcccgattccacccgccgtacacaatatttgaaagaaaaaggcatccgtttcatcggcgcgggtgtatccggcggtgaagaaggcgcgcgccacggcccctctattatgccgggcggtaacgaagaagcttggccttatgtgaaaccgattttacaagccatttctgctaaaactccggcaggagagccctgctgtgactgggtaggcagtgatggtgccggccattttgtgaaaatggtgcataacggtatcgaatacggcgatatgcagctgatttgcgaagcctaccaattcatgaaagacggtttgggcttgagctatgatgaaatgcaccgtattttcagcgaatggaataataccgaactcgacagctatctgattcaaattaccgctgatattctcggctttaaagatgaaaacggcgagccgctggttgaaaaaattctggatactgcaggtcaaaaaggtaccggcaaatggacaggtattaatgccttggatatgggcattccgctcacgctgatttccgaagccgtatttgcccgctgtgtttcttcgtttaaagaacagcgtgaaaaagcaggtgctttgttcggcaaaaccattactccggtagagggtgataaagcccaatgggtagaagccttgcgccaagcattgttagcttcgaaaattatttcgtatgcccaaggttttatgctgattcgtgaagccagcgaaaccaaaaactggaatctgaactacggtaataccgctttgctttggcgtgaaggttgtattatccgcagcgcatttttgggtaatatccgcgatgcgtacgaagctaatccggatttggtattcctcggctcggacaattatttcaaaaatattctcgaacaatgcatgggcgcatggcgcaaggttgtagccaagtcaattgaagcaggtattcccatgccgtgcatggcttcggcgattacctttctcgacggttacacatcagcccgtcttcctgccaacttgttgcaagcccaacgcgattacttcggtgcacatacttacgaacgtacagaccaaccgcgtggcatatttttccacactaattggacaggtaaaggcggcaataccgcatctaccacttacgatgtttaagtagttgcaactttataaaaaggccgtctgaaaacttttcagacggccttgattatttttcaatatattgttttaaaaaataaaaatataaaaataaaaatactgccaagtattttttaaacataggtatctggcacagtttgcccaagatttccgctcgtttcataccagataatcatttaccgacaaattatgcacaaaattatccacaggtttggagaattgtttgcaatcgggtaataccgtaaatatacattaatatttaaacaaatattaatgtatccgcgctatcgtcattatgacttcgctttcgcttccttatataataaccacattcattttttgaaagcacaagatgtccgcagtccaacccactattgcagccattgccaccgccccgggccggggcggtgtcggcgtgatccgattgtcgggaaaaaacctgctgccgttggcacaaaccatcagtggcggtaaaacacctaagccgagacaggcactttacaccgattttttggctgccgacggcaaacctttagataacggtttgttgctctactttaccgctccggccagctttaccggtgaagacgtgatcgaattgcaaggccacggcgggccggtagtgatggatatgctgttgcagcgttgtttggaactgggcgccaaaatggccgaaccgggcgagtttaccaagcgtgcttttttaaacggcaagcttgatttggcacaagccgaaagcgttgccgatttgattgacgcctccagtcaatctgccgcgcgcatggctttgcgttcgctgaaaggcgcgttttcggagcatgtccatgaattggtagacggcttgattaccttgcggatgttggtagaggctacgttggatttccccgaagaagacatcgattttctcgaggctgccgatgcaaaaggcaaattggccggtttacaagcccaattgcaaaccgtattggctagcgctacccaaggcgcgattttgcgtgaaggtatgaatgtggttttggtgggagcgcccaatgtgggtaaatccagcctgctgaatgctttggccggtgatgatgttgcgattgtaaccgatattgccggtaccacccgcgataccgtacgcgaacaaatcacactcgacggtgtccctatacatatcattgataccgcaggtttgcgcgaaacggatgatgttgtggaaagaatcggtatcgagcgcagccgtaaggccgttcaagaagccgatattgccctgattctgcttgatccgcgtgaaggtattaatgcgactacccgcgctattctcgagagcctgcctgcttcactgaaaaaaatcgaaatccacaataaaatcgacttaagcggtgattccgcatctgtttcagacggcatagatactcttagcggtgcagataccgtcatcaaaatttccgccaaacacaaacaagggttggatctgctcaaacaagccttgttgaagcaagttggttggcaaggggaaagcgagagcctgtttttggctcgcagccgtcatctgaatgccctgcatactgctgccgccgagttggaaaacgccgcattgtgcggtaatcaccagatcgagttgttggccgaacatttgcggctggcacaagtagcttgtaatgagattaccggtgagtttacggccgatgatttattgggtgtgattttttcccgtttctgcattggcaaataatgtttgccttgccgtctgaaagccgtgaatgagttataaaacggtaatgatttgccggcagtattggttttgaatgatttttggtaggccgaatatagtacttgcctgtttggcttgcctattctcccgtgctaacagcagattttggtttctgccatttatatttgaatgcccgacaatgaatgctacccgttcagacggcctcagtgaaacccaaaaaggcctgatttatgcgctttcctgctacctgatttggggaacgtttccgctgtattggtatccccttacccacagcgtgatcggagccgaccaattattggcacagcgggttgtatggtcttcggtatttgtcgtcatcgttgttgccgtttgcggttatggccgcacccttttggacgcattttccaaccgccggctgttatccgcttttattttttcatcagcggctttggcggtgaactggctggtgtttttatgggcagttacccacaaccatgtgttggattccagtttaggctatttcatttcaccgctggttagcattatgctaggctgtttttttctgaaagaatgcatcaaccgcacccaaatcattgctattttgctcgcggttaccggtatcttgtggctggcaatacccgctggccggataccttgggtggctttgttgttggcggccagtttcggcatctacggcttattgagaaaaaccactccgatggatgctttacccgggttggctttggaaactctattgatgctgccgtttgctgccgcatatctggtgtggacggcgtggcacggcgggctgattttcagcgaattgccgcccttaccattagctttattggtgtgttcgggtattgccactaccataccgttgatatttttcgccgcaggtgcacggcgtattcctttaagccatttcggcatgatccaatacattacgcctacctcccagcttattgtcggtttgactgtttttcgtgaaactttcactgtttcccgttttatcggttatatatgggtttggttcggtgtggcagtttatcttttcggcatttggcagcagtatcgcgccggcatatgcaccaaaaataccatttagccctgccgatgccaaaagagcagagatttgaacagcttcatggcgggcagatcgcaaagagaactgattcaatcggaagtaggattttcagagttgcttaaaaataagctacaatagcccgattacccggccaactaatttattgagagaaaacacatgttcagtttcttcaaacgtaagaaaaaaacagaggagcagtctgccgagctgcttgaagattcccaaactgaagtggaaacccttacagccggttcagtcgaaccgtttgatgatgcagagcctgagtctgccgaagaggaagttgctccgctgaccgaatccgaacgtgccgccgttgccgcagatgccgaaaccaatccaatcagcagcttggtagccgatgtcgtaggcggtcataactcattgccggagcaattcgatcctaatgccccggttgtcaaaatccacactgaaaccgctattcaggaaatttccgaaccattggagttggcggcttcggaagctgctgatgttttgaaacaggctgacagtattgctacggttgctgctgctgtacctcatgcccagaccatagaggaagaacctgccaaactcagttgggcggcacgtttgaaacaaggtttgaccaaatcgcgcgaccaaatggccaaatcattggccggtgtattcggtggcggacaaatcgacgaagatttgtatgaggaactagaaaccgtattgattaccagcgacatgggcatcgaagccaccgaatatctgatgcaagatgtgcgcaaacgtgtttctttaaaagggttgaaagacggccaagaactacgcggcgcattaaaagaagctatttacgatttgattaaaccccttgaacaacctttggtaattcccgataccaagcaaccctttgttattatgcttgccggtatcaacggggcaggtaaaaccacttctatcggcaaactggccaaatatttccaaagccaaggcaaaacggttttattggctgccggtgataccttccgggccgccgcccgcgagcaattgcaggaatggggggcgcgtaacggcgttaccgtgatttcgcaggcctcgggagattcggctgccgtgtgctttgatgccgtagaagccgccaaagcccgcggtatcgatatcgtgttggctgatacggcaggccgtttgcctacccagctgcacttgatggaagaaatcaaaaaagtgaagcgtgtgctgcaaaaatccatgccggatgcgccgcatgaaatcattgtcgttttggatgccaatatcggccaaaatgccgtaaaccaagttgttgcctttgacgatgccttaggtctcactggtttgatcgttaccaaactcgacggtactgccaaaggcggtgttctcgccgcccttgcatccagccgcccgattccggtgcgctatatcggtgtgggtgaaagcattgatgatttacgtccttttaatgcccgagcgtttgtagatgctttgtttgactaaatagcgatatattaaaaacaaggccgtctgaaatacatttttcagacggccttgttttttatttgtgaaaataccggttagttttaaataaaattctgattatttataagaaatgcggggaatgatttctgtgattaaaaggccgtctgaaaaattataattatttttgggtaataaaagctttgcagctaaaaacaaaaatataaaaaacgatgccccttaaagcctaaactttaaggggcagagcgttgcggcatatcttatacgagtataagaagccttattgtagcaacgtttctcatttcgcagtgcaacaatatgttgcttatcttagcaaaaagattcatgttgtcaagtactatattgcatataaataattagttaagatatatttattacatataacaacaacatgggagaattgtcatgtctatatctcattttcgattaaaacagctaaattatattcttggtcttgatttaggtattgcttcggttggctgggccgtagtggaaatcgatacagaagaaaatcctacccgtttgattgatgtgggcgtacgtacttttgagcgcgccgaagtgccgaaaacaggcgattctttagctgccgcccgccgccaagcgcgaagtgcccgccggttgatccgccgccgcacccatcgtttgttgcgtgcccgccgtttattgaagcgtgagggtattttgcatgcagatgatcttaatgcggagggcttggttaaagagctaccgaatacgccttggcaattgcgtgttgatggtttggatcgaaaattaatgccgaaggaatgggctgctgttttgctacatttggtaaaacatcgaggttatctttcccaacgtaaaaatgaaagcgaaggtgcggataaagaattaggcagattattggcaggtgtacacgaaaaccaccaagccttacaaagtagcgagtaccgtactcctgctgaattggctgttaaaaaattccaagcccaaagcgggcatatacgtaaccagcgtggcgattatacgcatacgtttgaccgcaaagatttacagcaagaattacaccaattgtttgcggcgcagcagaaatacggtaatccgtttgtttcagacggcctcaagcagggtattgaaaccctgttaatgcagcaacggccggctttatccggcgatgcggtacaaaaaatgctggggcgctgtacctttgaaacagaagaatttaaggctgccaaacatacatattctgccgagcgttttatttggctgaccaagctgaataatttacggattcaagaaaacggtaatgaacgatgcttaacggcgcaagagcgcgggcagattatcgatttgccttataaaaaagctaagttgacttatgcacaagttcgcaaggaattgtctttgcctgaaaatgcttttttcaaaggattgcgttatggcaaagaaaatgccgaaactgcagctttaatggaaatgaaggcttaccatgcaatacgtaaagcgctggaaaaagcagggctgaaaaccgaatggcaggggttggcttgtaagccggagctgttagatgcgatcggtacggtattttcactgtataaaaccgatgaggacatttctacccgactgcaagggcagttgtctgaagatgtaatcaatgctttattggccggattaaattttgacaaatttatccaactctcccttaaagctttaagcaaaattttaccgttgatggagcaaggccaacgctatgatgaagcacatgcagcgctttacgttcgctctaccccgcaaccgcaaaggttgttgcctcagattacggcagatgaaatctgtaacccggtagtgctgcgtacattatcgcaggcgcgcaaggtcattaatgcgattgtgcgtcgttacggctcgcccgcccgtattcatatcgaaacaggccgagaggtagggaagtcattcaaagaccgtcaggaaattcaaaagaggcaggaagacaaccataaagagcgtaaacaagccgctgaaaaatttctcgaatattttccgaattttgtcgggcagcctaaagccaaagatattttgaaattgcgtttataccaacaccaacacggccaatgcttatattcgggtaaaacattggatatatgccgtctgaacgaaaaaggttatgcagagattgatcatgccctacctttttccagaacatgggacgatagttttaataataaagtgctggtgttggccggagaaaaccaaaataaaggtaatcaaaccccttacgaatggttgggaggcgcctctaatagcccacgatggcaagaatttgtagcccgagtaggaagcagccgttttcatcacagtaaaaagcaacgcattttattgcgtcagctggatgaagaaggctttaaagaacgtaatttaaacgatacccgttacgtagcacgttttctatgcaaatttattgaagaaaatatgttgttgttaggcaggggaaaacggcgtgttttcgcatccaacgggcaaattaccagttttttacgtagccgttggggtttgcgtaaggtgcgtgaagaaaatgaccgtcatcatgctttggatgccgtggtggtagcctgttcgactgtggctatccagcagcgtattacctactttgtgcggcaaagagaaatgaatatttttgacggtgagcttatcgataaagaaaccagtgaagtgagccgcccatattttccccagccatgggattttttcaggcaagaggtcatgatgcgggtattcggcaagcccgatggtgatccaagctttcctgaagcggatacaaaagaaaccctatgcactttattggaaacccgcttgtcatcacgccctcaagccgtacatgaatatgtcactccattgtttgtctcgcgtgcgccgacccgaaaaatgagcgggcaagggcataaggaaaccgttaaatcggccaaacttttgcatgagggtaaaagcgtgttgagggtgcccctgacccaattgaagccaaatttgttggaaaagatggtaaatcgtgatagagagccgcagctctatgaagctttaaaagagcgtttggccgcatacggtaatgatccggcaaaagcttttgccaccgagtttcgcaaaaaaggcggccagttggttaaggcggtacgggttgaggatacgcagaaatccggtgtgttgctgcataaaggtaccggagttgcggataatgctactatggttcgggtggatgtatttgaaaaatccgggaagtattatttggtgccgatttacagttggcaggtagcccaagggattctgccgaataaagctgttattcaaggtaaagatgaaaaaaactgggatgaaatggatgaaacgtatactttcaaattttcaatgtaccctaatgatttggtagagataaatacaggtaaacaaagattatttggttattacattggtttagatcgcgcaactggggcaataagtatccgagagcatgatttagataattttaaaggtaaaaacggtatttatcgtgttggtgttaaaacagccatttccttcaaaaaatatcaaacagacgaattaggcaaagttgtcgtaccatgcaggccgaaaaagcgcttaccggttcgttaaaaccatccctgcttccctaaaccggaagcagggattttttcggataaaggataagaggggaaattatcatgagctggcgtagtttattgatacgggaaggcgggaaattatcactaaagcataagcagctgctgatacagcaaaacggcgaatcttataccgttcccttggaagatattgcggtgattgtgattgaaagtccggatactgtgttaacggtgccgttgttgtctgctttagcttgtgagggtgtcactcttttcacttgcgatgaacagtttttaccttgtggccaatggctgccctatgctcaatatcaccggcagctgaaaactttgaagttgcagttgaatatgacggagccacagaaaaaacaattatggcaggccattatcaaacaaaaaatatgtaatcaagcaaaagtagctgatgaaaccggtaacgattttgcagccaagcgccttcgtgcaatggcagtatctgtgaaatcgggagatagcggcaatatggaggcacaggcagcggccttatattttcaagcaatttacggcagccgcttcaagcgttggcaggaaagtccgatcaatatccatttgaactacggttatgcggttttacgcgccgctattgcccgagccttagtccaatacggttggctgccggcattggggttgtttcacaagagcgaattaaatccttttaatttagcggatgattttatcgagccttatcgccctctggcggatttaatggtgtggcacttgtatgatcaaagccggctgaaagaaagcttagaccgagtggcaaagcaaaatttggtggccttgctgaatcatcaaatcagtttggatggccaaacattcagcgtattggcatcgattgaccgaacagtagcttctttccaaaacagtattgttaccaaacaagccagattattaaagttacctgaaattttgcctttgaaagagcatttttatgagtgaggctaaatttatgcggttaatcgtattttttgacttacctgttactacggcggccaagcgtaaagcagcgaatcaatttcgcttgtttttacaaaaagacggttatcagatgctgcaattatccgtttacagccgcattgtaagagggagagattcgttgcaaaaacactacactcgattatgcgccaatcttcctgaagagggttcaatccgatgtttggaagtaactgagaaacagtttgcttcaatgcatttacttttgggccgtctgaaaacacaggaaaaaaaggtgaatgccgatcaattattattattttgattggattttttttaaggtaaaaaaacaggaagccattatgaaataaaggtttcctgttggactattgtagcactgcgaaatgagaaagggagctacaacgttgcgattaataggcaatacgtcatagttattgtagcactgcgaaatgagaaagggagctacaacatgtagtgatcattcccgccatcaataataattgtagcactgcgaaatgagaaagggagctacaacggttatggatgcattggcaaaaggtcttggattgtagcactgcgaaatgagaaagggagctacaacgaaattgtcatcatttaaacagaaattataattgtagcactgcgaaatgagaaagggagctacaactatcctgtgccagatccgcttcacggtcgcattgtagcactgcgaaatgagaaagggagctacaactggaaattattcatatgtaatcgagcgtaaattgtagcactgcgaaatgagaaagggagctacaacgatcaagcattgctagatcacgataacggcattgtagcactgcgaaatgagaaagggagctacaacacgctcggttgagcatgtcattaaatacctattgtagcactgcgaaatgagaaagggagctacaacaacgaacttgggcgttcgtaagatacttgaattgtagcactgcgaaatgagaaagggagctacaacccaacccagttaaccaaccactcccagtaaattgtagcactgcgaaatgagaaagggagctacaaccgtctcgaaaggccagttaggaaattcaaattgtagcactgcgaaatgagaaagggagctacaacaggacggcaaaaaacgtcacggcgacgcggattgtagcactgcgaaatgagaaagggagctacaacgtctcttgttctggtaatggccgttgcatgattgtagcactgcgaaatgagaaagggagctacaacaccttttgatgtcggtttaaatactacgctattgtagcactgcgaaatgagaaagggagctacaacggcttcactagaggtattagagcattcacaattgtagcactgcgaaatgagaaagggagctacaactgccaatgtagatgatttaaaacttgatggattgtagcactgcgaaatgagaaagggagttggatgttttttaattttaaaagcctgaatctgtgaatgattcaggctttctgattatagggatagtcaaaacccgtgaagtggttcggttagcccactttgtcgcctggttgtgcgccttggtccacatccagcagtttcagtttgccgtcggcggtggccgcggacaaaatcatgccttcgctgatgccgaatttggccattttacgcggggcgaagttggcaacggcgatgaccatgcggccattgagttcggcggggttgggatagctggcggcaataccggagaaaatcacccgtttttcaaagccgaaatcaaggtcgaatttcaacagtttggtgctgccttctaccgcctcgcagttcaagactttggcgacgcgcatatcgactttcataaagtcgtcgaagctgcattgttcggctacgggtatgtattgggcggctgtattttcagtggtggcttggatgttttgtttgttggcttcgactaaatcgttcacttgtttttcctcgatgcgttgcatcagatgttcgtatttgcggatggtatggccttgcggcaggacggcggtggcttgtgcccagtcaagtttgtcgatattgaggaaggcggcggctttttcggccacttgcggcaagaccggtgccaggtaaacgctgagggttttgaaggcgttgatcagttcgctgcaaacgtggtgcaggcgttcgtcttggccttcttgtttggccagttcccatggtttgttggcatcaacgtattcattgactttgtcggccagtgccatgatttcgcgcagggctttggcgtattcgcgtgcttcgtaatcggcggcgatggtttcgctttgggcggttaattcggcaagcaatgtgctgtttgaaacgtctttcagacggccttcgaagcgtttggcgataaagccggcggcgcggctggcgatgttgatgtatttgccaaccaagtcgctattgacgcgggcaatgaagtcgctgaggttgaggtcgatgtcttcaatacggctgttgagtttggcggcgatatagtagcgcatccattcggggttgagtttttggtcgaggtaggagcgggcggtgatgaaggtgccgcgcgacttcgacattttttggccgtctacggttaaaaagccgtgggcaaacacgccggtaggcgtgcggtggccgctgtattggagcatggccggccagaacagggcgtggaaatagaggatgtctttgccgatgaagtggtacatttcggtgctactgttggctttgaagaattcgtcaaagtcgatgccgatgcggtcgcacaggtttttaaacgaggccatatagcctacaggtgcgtcgagccatacatagaagtatttgcccggtgcgtcgggaatttcgaagccgaaatagggtgcgtcgcgagagatgtcccagtcgctcaggccgccttcgccgttttcgtctttggcaagccactctttcattttgttgagggcttcgggttgtaggtgcggttgttggcggccgtctgtcagggtggtgctgcctgaagtccattgttgcaggaaatcggcgcattcgcccagtttgaaaaagaaatgttcgctttctttcaataccggcgtggcacctgagatggccgaataagggttgatcagctcggtgggcgaataggtggtgccgcaggcttcgcagttgtcgccgtattggtctttggcgtggcatttggggcattcgcctttaacaaagcggtcgggcaggaacatatttttttcggggtcgaaaagctgctcgatagtacggctttcgattttgccgttggccttgagggcatggtagattttttcggaataggttttgttttcgggcgagtgggtgctgtaataattatcgtagccgataccgaagccgctaaagtctgccaagtgttcttcgcgtacgcgggcaatcatttcttctggagcgatgccttgtttttgggcggccagcatgacgggagtgccgtgggtgtcgtcggcgcagcagtaatagcattcgtggccgcgcagtttctgaaagcgtacccaaatatcggtttggatgtgttcgaccatgtggcctaaatgaatgctgccgttggcatagggcagcgcggaggtaacgagtattttgcgttgtgtcatgtcggtctgttctgaaaattatggtatttaatggtgtgaattataactttttcagacggcctgcgcttggttttcgggtaactgttgtgttaagtgctatttgacggataccgttcccgattatgccggttcgtgggcaatttcttggttcaaaattcggtaacaatttctaattttaaaatttattttaaatatcaatatcttgttttattgggaaaagttaaggttgtgcccggaaattattacggatttatataatttcaaaaagtaatgaagttacaaaggttaagggcttgccaaattaggtaattcagtttttctccccttgtgtatatggcggcttgccgtaatacttaatttacgaaatcggcggcattactaccgccgttgctttaccgctttaatatttttctgaaggagtttcataatgaagaaagctttattggcagttgttgctttgggtacttcggtagcggctgttgctgcgccgcttgctacgacttttaccggcccggctgtcgaattgggtgcgggcgtaagcaaaactgatttaaaaaatggcgattggaacgagaaaagtaaagccgatatatcgctgcgcggtaattatttagttgattatggtagcaattggatcggtggtggcgaagtggcttataagcctttgagccgcacgattgcgagtgatggtgatgctaccgcgaaacaaaaatatgatttgtctgcttcttatgtacaaggttatcgggtagcttcggatgcgctggtatatggtaagctaggctatcattacggccgcttcgatagttcttctgataagaacttcaagggcggcatcaatggtttgggctacggcttaggtgcaaaatatgcagtggcgccgaatgtggaagtgggtgccgaatgggagcaggttcgctataaagacggcgacgccaaagcaaccaacaacagctatatggctactgtcggctaccgattctaaaaaacaatttttattccctcaatgctgtaaccttctctgatatttgccggctctgaatgagccggtttttttatggctgaaatcaggtaggcgatttttgggagtttttgctcgatagtagataagggtaagataactttttcgaatttaaacttaggcctaacctatcggtaggtatcgttggattgattattcccgtaccctattgttgcaaggttgccaaggagtagaggtatgcgcatagaaaacaagatgtactgcagtttgaggaggctggataaactacctgtttcatggcgtgaaatggtgcaaacgcgcctgatggggcgttttgtaccgtttttatcaaccgcaggtctgcgtttcgaacaattgagccgggaatcggtgagggtaagcatacggaaccgccgtgcggtacaaaaccacatcaaaggcgtgcatgcttgtgcgatggctttgctggcagaaacggcgacgggttttgcagtgcagatgaatgtgcctgacgacaaactgattttattaaaatcaatgaatattcagtatgttaagcgatcggtcggtaacatgcatgcagtagcgcgcattagcgatgaaatggcggcacgtttgcagacagaggagcgcggtaattttgttgttccttgcgaggtgggtgacgagagcggggaaccgccggtattggtggaaatggtatgggcgtgggtacccaagaagcatgattgagaagttgtggtgaagtcggctttattttataattaattcattgatttaaattttgttttttcattcgatgaatttaaattaacggtatttgcatctcatttatgggccgtctgaaaaaagtttcagacggcctttattgttttgtggatttccgatatcgaatggataatttggagaacatacccgtagcaaattgtaagacaaggtcatggcgaaaatcagtttgtctgcgttatgatgagattttgtggcggatcaggataaagttatggcaataaatgcatgctcgccagtgaatacgacgcttgaagttatcggcggtaaatggaaacctgcgattgtttatcatctgatgcaggatacacagcgttttaatgaattgcggcggctagtgcctgaggccagtcagaggatgctgactttgcagctgcgcgaattggaagaatcggggattatccggcgtaaggtttatccggtagtgccgccgaaagtagaatattctctaaccgagtttggccggacgcttgtgccggtggttcaagctatgtatgaatgggggcaaacttatgccgaagaatgtgtcaggataaaagccatgcaaaaagatgccgtctgaaatatggcggcaaacggcacaaaggagatgcaaccccctttcgtttgccggcatgatttccacagtttattaaatcttgcaggcacccccagcacagttatcatcctcttctgcggcatctacaccgccctctacggtaacatcgtcaaaatcttccaatagggaatctagatcgtccagctcaaattcttgttcgttcatgtgaaatctttcatttggtcattgaggttgtagcagtcgtacgtacggtttgccatagcgaagctgtgtttggccgttatgtcgtaattgcagttacaggacaccttatcttggggcgtaaagaggcggattcaaccgtcggtttttctacggggcagtttaatatgcggtttgattttcttcggtatgcttaccggtgcaggaaccgtatttaagccgagttcctcatattgcttagggctcagaagattactccaatctccgtgccggtaccaatcgctaccgtctaattcaatcggatgttggatacgctcgcagccgttgccgcattgcagatcggtagcagcgcaatatttatcgcatccccagcagatacgttcgggatttttcggatggataggaaactttttagccatagcggtagaagcggcagaatcacgccaaatcatactctacgccaattatgaatagtttaacaatacgccttaagtcggatactgccgattttggccaaatgggaaaaattaatatacggatgaatatggtttgaaaaataacttttatttcaatagtcaaaattctacggcattttatatgccaactttaccggtagctatgatgatgggctgtaagtattttatccgttatctgcaaaagcggctttcctcggacttaggcaacagcagataaaatacatcgttatgccgtctgaaaatttcagcaggcattgtttcatggaagaggccgtttacacggttttgtttatccattgcaacaaacattccaatcaagcccgaacccagcttgtaaaagcacaggcaagtgctgattcctgctacaatttatttactttgtttacaaattatccagttttgcagccaatatgaaactccgaacacctgccgtcaatcccagaatcatggcgactatgccgattttcttcagtgtagcgattgccgcggtgcttgtttggtatttcaacctgcccaagctggcgccgcccttaatcctcggcattattgcgggcggtttggtggatttggacaaccgcctgacaggccgtctgaaaaatattctgtttaccgttatcgctttttccatttcctcgctcacggcccagctgactatggcgcaccattaccgctatacgttggctatgaccgtactcactttcggctttactttgttgggcgcagtcggcctgcgctaccggaccattgcatttggtacgctggcggtggcgatttataccacgctcacttattcccccgattccctgtggtatgttaatccgctgatgatattgtttggcacagtgctgtacagcagccttaccctgctgatgcacatgttgtttccgcaccgcccagtgcaggaaaacgtagccgccgcctatgctgcattggggggctatttcgatgccaaagccgcctttttcgatcccgacgaaagcgaccaacttgataaacaccagatcggtctggcgatgaaaaacaccggtgttatcggtgcattcaaccaatgccggagctctttgttttaccggatgcgcgggcagcaccgccatccgcgtaccagccgtatgttgcgctactatttcaccgcccaagatattcacgaacgtatcagttcggcacacgtcgattaccgcgaattggcggaaaagttgaaaaataccgacctgattttccgtatccaacgtctgctcgaacttcaggcgcgcgcttgtcgggatgtagccgaaagcctgcgtagcggcacccattacgaatacagcgaacgtcttgcccgcgccattaccggttgcaaacagtcgctgaaactgtatgccgatacccacgaaggcgcagatgtgcatactttgcgtcgtctgcttgataatttatacagtattgattatcagctttcccatttagaaagcgaagaaggcgcggatgccgatgccgacagcgatgccacccgtattgccgcccttgaaaaaggcggtttgaaaaacgcattggtcactttgcgcgggcagttaaacttcgaatccgccgtttttcgccacgccgtccgcctgtcgttggtggttttgctgatttgcgccattatagaagccttcgatttcaacttgggctattggatactgttgaccgcgctgtttgtctgccagcccaactattctgccaccaaaagccgcgttaaccagcggattgtcggaaccctactgggcgtattagtcggatccatcgttccgtatttcacgccctctatggaaaccaaactgtggataatcgttgtttccaccaccctgtttttctttttccgtaccaataaatacagcttttccacatttttcatcaccatacaggcgctcaccagtttttcgttggccggattcgacgtttatgcagttttgccgttccgtttgatagataccgtgataggtgctgtgattgcatgggtggccgtttcccacctgtggcccgattggcgttatctcacattagagcgtactgcaggccgtgcgattgcctacaacggagcctatctccgagtgattctcgaccaattgcaaaacggcggtatcgacgatgtttcctaccgcagcgtacgccgtcaaacccacgaacgcgccgccgccctcagcagtaccctttccgatatgagcagcgaaccgaaaaaatacggtagcaaagtgcaagacggcttcgaattattgcggctgaactacacgctggtcggctatatctccgcgctgggtgcttaccgcaatcagatgcagaaccaaagcggcgatggctttatccgcgatttttaccgcactgcctaccgcatagcggatttactcgaccatatccgagagttggacgaa

SEQ ID NO: 3165 - DNA, 23210 bp, synthetic construct
  source 1..23210: mol_type = other DNA
  misc_feature 1..23210: note = Synthetic
caaaaaaagccgtctgaaaatgcgattttcagacggcttttttttgggggggggggggagaaacaggctttacagccgcgtcacgctcaatacgcctttgacatcgcccaagctggcgagtacgcgcggtaagtcgttgacttgtttgacttccagcgtgaaacgcatgctggcttcgaggtcgcgggactgggtttgtacggcggtgacgttcagtttgtggcgcgccagcgcgtcggatacgtcgcgcagcaggccgttgcggtcttgggcgcggatttcgatatccacggcgaacacttggccttcctgcgccgctgcccaacttgcgtttaagactttgtcgggcgactgctcggccagatgcaggtacgacgggcagttgcggcggtgtacggaaatgccgcgctcgcgggtgacgaagccgacgatgtcgtcgggcggcgcgggtttgcagcattttgccaaggtggtcatcaggccgtcttcgccgtcgatgagtacgccgtttttgccgccttttttgattttcgattgtttgacgatggtggtttcggtaatcggggcgggcggcggttcgttcagcaggccgcaggctttttgaatggcgcgcggggtgacttcgccttgtccgattgcggtatagaggtcgtcgagttttttgaagccgaggttttcggccagatcttgcaggttgggtttggggttgattttggcgagttgtttgtcgagttgggcgcggccttcttcgcgcacggtatcggcgttttgctggcggatgaaggcgcggattttgctgatggctttgccggatttgacccagccttcgtgcagccagttgactgaggggtggccttctttggcggtgatgatttctacgcgctggccgttttcgagcggggtggaaaggggaacgatttggccttcgactttggcgccgcggcagcggtcgcctatgctgctgtgcagggcgtaggcgaagtcgatgggggtggcgcccgcgggcagcgacaggactttgccgtgcggggtcagaacgtaaatcgtgtcgtggaagagttcggttttgaaggcggcggcgaggtcttctttgccgctttcggccatgttttcgcgccagtcgagcagttggcgcaaccaggcgattttctgttcgtaggcggagtcgcctttgccgccttctttgtaacgccagtgggcggcaacgccgaattcgttgaactggtgcatgtcgaaggtgcggatttggacttccacgcctttgtcttcggggccgatgatgacggtgtgcaggcttttgtagccgttgcctttggggttggcgatgtagtcgtcgaattcgccgggcacgggctgccacaggctgtggacgatgcccagcgtggtgtagcattcgggtatggtgtccaccagaatccgcacggcgcggatgtcgtagaggccgtcgaaatcaagctttttcttcaccatttttttgtaaatggagtagatgtgtttcggccggccggcgacttcgaaatggatgttgaatttggccagctcgccgcgcaggatgtcgaggaagttttcgatgtattccagacgttcggtgcgtttttcgtcgaggagtttggcgatttctttgtatttttccggctcttggtggcggaagcccaaatcttcgagctgccatttgagttgccatacgcccagccggttggccagcggtgcgaaaatatccagcgtttctttggcgatggcgcgtttttcggggctgtcgggcagggtgccgatgtattgcatggtgcgggtgcgcatggcgagcttgattaagaccacgcggatgtctgtcaccatggccagcagcattttgcgcatggtttcggcctgctgggcgcgttcttcgggcgtggcgaggctgtcgactttggcgaattgggtgagtttgtgtacttcgtctatgcctttgaccaattcggtgacggtggcgttgcattgctcggtgacgacggtttgccagtcttcgagacataaagaaatgctggagagcaaagtcgccgccacggcgtcgggcagcaagtccatttcgttgaccatttccgccgcgccgaatacgttgctcatcacgggctcgccggcgaaggtggccaggtctgccgggtagtgctgcgccgccagtttgagggcggcttggagcatggcgcgatcctgctcgttttggcgggcaagataggcgtcgaaccattcgctgtaatggctcaggtcgggagcgatgttgctggcgtgcggggtcatggctgcctcttttccgatgcgctgatggaaggggctattgtagcagggaaaggcgggaatgaataatcccgttgccccaatccggcgaaacggtggtttaagtgaggccgtctgaaaacaagtgttgatttcagacggcctgcgggggtaaagtatggcgtttgtttgatgatgaaagatgagaatgaagctgtatatttacgaccattgccctttttgcgtacgcgcgcgcatgattttcggtttacgcggcgtggcggtcgagcaggtggtgctggcgaatgacgacgaggccaacccaatccgcatgattggtgcgaaacaagtgccgattttggaaaaagacgacggcagttttatgggcgagagcctggatattgtgcgctatgttgacgaactggcaggcaaaggccgtctgaaagaagaagtgcgccccgaggtgcaggcctggttggataaggtcggcgaatatgtcaataaattggtgcagccgcgcatggtgaaaatcggtttgccggagtttgcggaagcatcggcggtgcgctatttcacggagaaaaaagagcagaatatcggcaatttcgagcaaaatctcgccgatacgccgcaatatctggcgcaaattcatgccgatttgcaggcgctggaggtgtatgccgccggcggcgatgcgggcttcggcggggaaacgggcatggaagatattctgctgtttccggtattgcgtaacctgaccatcgtcaaaggcattgagtggccggcgcagaccgccgcttatgtggcgcgtatgagccgcgcttcgggcgtaaatctttatatggaacgtgctatctgatatagtcgtcgaacttaaatcctgctatggcgttggctcgccttggcgtatttgtagcagaaattaatttcttcgactatgttgatatatttttattgttttcaacaatatatgaattttcacagacagaaaatcgctagattttcgtcattagcttcgcaagtccgctacgctacccccgcgcaggcgggaatctagaagctgagcgttacagaagcctgtccaaaattgcagcagcacaacgttctggattcccgcctgcgcgggaatgacgaatcctcacggattctgtctgcctaagaaaataggttactgaaaattatatagtcgaagaactgaatttttgctacggcgttggctgcgcctttccgtactactggtactgtctgcggctcgccgccttgtatcagaatttaatttctccgactatattttccgcctgtcgccacgccgcaggcagaaaaaagccgtctgaaaatctcgattgccgtatcgcggcagcggattttcagacggctttttgcgtgcggattattgcgtgatggcatcggccgcagcgtttttgcgctggtagcctttgtcgtgcatacaggcgtcgaacagggcgcggtcctgcgtgccgctgctttcggcgcaggcggagatggcttccgccgccgtgagcttgcggggtgcggggcggtcgccggtgttggcgcaggcggcgagcagggtggaagcggcaatcagcatcagaatgtgtttcatggtgtttccttgaaaaaagcgggtaggggggagtttaccagtttttgactttgtccaaatcattttgcgcgagctggccggcgtgttcgctgcggctttggtaggcgcggtcggcgcggatatggtcggagacgaagtccaaatggttttgcgcggtttcggcggccagcgggccgttgccgtcgcgtatggcttcaaacagggcgcggtggtggcggattaaggtcgggcgcgggttgtcggcgcggttggttttgatgatgttgctgcgggtttcgcggtaaagcatacgcagcaggctgccggaaagatggccgaacagaatattgtgggtggcatcggcgatggcctgatgaaagctggcatcggcttcggtttgatgctcgagattattttgcgcgcaggcggcttcaaaattgtccagccagaagcggatgcggctcaaatcggcttcggtacgccgctcggcagccagcgcggccataatgccttccatgtggcggctgaaatcatacacatcgcgttcccaatgcgaatgcttgcccaaaagctcctgccagctttgcagaaaatcctgctgcgaccgggaggaaacgtaatagccgtcgccctgacgcgcttccagaattttgcgcgaaaccaatacggccagcgctgcacgcacgctcgggcgggaaacgccgaactcgccggccagcgtgcgctcgggcgggatgcggctgccttcggggtattcgcccgaggcgatgcgctcttctaataaggccaggatttggtcgctgattttttgcgggcggataagtttggtcatgggcggttggtgcgtgggtgcgtcggcatatcgggaaaacagaaaatgtatcgttatagtcgaagaactgaatttctgctacggcgttggctcgcctagccgtactacttgtactgtctgcggctcgccgccttgtatcagaatttcatttctccgactatatataaattggtataacaggctgcgtttttcagacggcctgcgctgcctgcgccagcgcgttttgctggtgttgcaccaattcggcgatgcctttctgacccagcgcaatcagtttgcccaattcttcgatggaaaagggcgcgccctcggccgtgccttggatttcgatgattttgcctgatgcggtcatgacgatgttgacatcgctgtcgcagccggaatcttccggatagtccaaatccagcaggggcgtgccgccgacgacgccgacggagacggcggctacggcttcggcaatcgggttttcgctgatcaggccgtctgaaagcagtttgtccaccgccattttcagggcgacgaatgcgccggtaatcgaggcggtacgcgtgccgccgtcggcttggatgacatcgcagtcgatcaggatttggcgttcgcccagtttgttcatgtcgaccacggcgcgtaaggcgcggccgatgaggcgttggatttcttgggtgcggccggactgtttgcccgcggtggcttcgcggcgcatgcgcgaggcggtggaggcgggcagcatgccgtattcggcggtgacccagccttgtgctttaccgcgcagaaacggcggtacgttttcgtcgatggaggcggtgcagatgactttggtgttgccgcattcgattaagaccgatccgtcggcatgcggcaggaaatcgggggtgattttgatgtcgcgcaggctgtcggcggcgcgggtcgtgcggatggggtgcatggtcaatccttgaaatttggtgtggcgcaattatagcatgcggggaatgtgctatattgggtagtgatttcactcgtgattgaattggaaacggagtaaaacatatgagcattaaaagtatgaccggctttgcaaatgtggccggagaatgcggcagcaagcgcgttaatttggaaatccgtgcggtgaaccaccgttatttggacgtgcagttccgcatgccggaggatgtgcgccatttggaaggcgcgttgcgcgagcagattgcggcggcggcggcgcgcggtaagctggagtgccgtattcaggtgcaggatattgcgcagggcgggcagggcttggcggtcaatcaggagctggttgaccggctggcgaagctgaataagcagtggcgcaagcagcacggggatttgggcaagttgacggtggcggatattttgaaattccccggggtgttggcgagccaaaacgaagacgcggatacttttgcgaaaaccgtgcaggctttgttgtcgcaggccttgcaggattttaattccgcgcgtatccgcgagggggcgaagctggcggagcatttgctgcagcgtttgggcggtatgacggaaatcgtcgatgcattaagtcaaaccttcccaagccttttggaagcgcatatggaaaaagtgcgcgcgcgcctggccgaagcggtgggtcatatcgacaacgaccgcctgcagcaggaatttgcgctgtttatccagaaatcggatgtcgatgaggaattcagccgcctgcgcacgcatatcgctgaagtgcgccgcattgtgaccgaggataaaggcagcgcgggcaagcgtttggactttttgatgcaggaattgaaccgcgaagcgaatacgctgggcagcaaggcgattgcggcggaatgcacgcaggcttcggttgaattgaaagtgttgattgagcagatgcgcgagcaggtgcagaatatcgagtaaggtttggataaacaaaaggctgtttgaaaatacgcattttcagacggccttttttgctccctatggatatgaatcaaattaatctttaacatctgaatttttcaggcggcatcgcaccatatccgcgtcagcaggggcggcctttctgctatacttaaagccgtagcgcgaacgaaatccaataaaaaagctgcggcataatgtcggctgcgaaagcagagccgaagcaggctgccccgcatcttttttatttcatttcacgataacgaccgaataccccaaaaggataccgccatgagcaaactgtttccccaagccaccctgcgcgaccgcgcgccgttccgtttcgacatcgtgggcagcttcctgcgccccgacgcgctcaagcaggcgcgccgccaatgcgtgtgcggcgaatgctcggtagaggatttgcacgccgtggaagatgcggaagtggccaagctggtggctcaggaaaaagccgtcggcttgccgaacgtcaccgacggcgaattccgccgcacctggtggcacttggatttcctgtttgagcttctgggcgtggagctggaagacgccaaagaatacagcacccagtttaaagcgcatatgcaccgccctgtgaccctgaaaatcaccggcaaaatcgaatttccgaaagtgcatccgtttatcgaccacttcaaaggcctgcaaaaagccgccggcgattatcccgtgaaattcaccattccctcgccgagcatgctgcacctgattacctgcgtgcgcacgcccaatccgcaattaatcgagcgctatgcgggcaacgaagagcagctgtttgccgataccaccgccgcctacatcgacgcggtcaacgccctgtatgccgccggctgccgcattttgcagctggacgataccgcatggggcgaattctgctccgaagaaaaacgcgcgctctacaccgcgcagggcgtggacatcgatgccgtggccaaacgctacgttaaaatgctcaacgacatccgcgacgccgcgccggccgatatggcgattaccatgcacatctgccgcggcaacttccgctcaacctggttctccagcggcggctacgagccggtggcggaaatcctgttcggcggttgtcatgtagacggcttcttcctcgaatacgacagcgaccgcgccggcgacttcaaaccgctgcgctttattcaaaaccagcaagtcgtattgggcctgattacctcgaaaaacggcgatttggaagacaaagccgccatcatcgagcgcatcaaagaagcagcgcaatatgtcgatatcaaccaactctgcctcagcccgcaatgcggcttcgcatctaccgaagagggtaatgtcctgaccgaagaagaccagtggaaaaaactggaactggtacgcgaaatcgtagaagaagtgtggggcaaggtttaattcccggcgcattttgaatacgtatcggattaagataaagcataacaggccgtctgaaaatagggttttcagacggcctgtttgtttatgatgcttggatacagcgtgccgtattgctttgattttgcatcacgctcgaacttgcaaacttaaaagccgtctgaaaatggagattttcagacggcttttctatatcgtttcggaacaggttcaaccgaaaaagcccattttcacctgaatcagtttttccaattcgcgcaatacgcggcggcgggcgacgaagaagatgacgtggtcgccttcctgcagcacggtttcttcgtgatgccccatgatgacttcgctgccgcgtaccaatgcggcgaagtggcagccctgcggccattggacatcgcagatgcggcggccgatgatggcagaggtgtttttgtcgccgtggacaatcacttcgatggcttccgccgtaccgcgccgcagcggatgcacggctaccacgtcgcctcggcggacgtgtgcgagtatcgagccgatggtaatcagatgcggggaaactacaatgtcgattttattaccctccagcaaatccacatagctggagcggttgacgatggcaatcacgcgcttggcgccgaggtttttggccaaaagcccggacatgatgttgttttcatcatcgttggtcagcgcgcaataaacgtcgatttcgtcgatgtattcttcggccagtagcgattcgtcggtggccgagccttgcagcaccagcgtattgtcgaggttttccgccagccattcggcgcggccgggattgcgcgagatgattttgatgtcgtattgcgactccagctctttggccaggcggtagccgatgttgccgccgccggcaatcatgatgcggcggttgcgcgcttctttcggccgcagctcgcgcataatcgcggctacgctgttgctgctggcaacgaaaaacacttcgtcgccctcgatgatgacggtttgcggcgtgggcacaatcaggcggttgttgcggtaaatcgcgcagatttggcagtccacgccgtcgggcaggtgggcgttgatttcggcgatttccttgttgaccagcaaaccgcccaaacgcgcctgcaccaccaccatacgcacgcggtcgtcggcaaaattcaatacctgcagcgcgctggtgtagctgagcagaccgaccagccgctcggtaaccagctgctcggggctgatggtttcggtgatgttgaaaaagctcaggctgtcggtatcgcctttatcgccgtccacacggtattccagatattcgcgcgagcgcacgcgggcgatgcggctggggatgttgaacaaatcagcggcgattttgcaggccacgatattggtttcgtcgctgcgggtcagcgccagcagcaaatcggcatcctccgccccggcctgctgcaacacaaacggcgatgcgccgttgccggtaatggtttgcacatcgcagcggctgccgatgagttgcagggctttttcgtcgatatcgacgatggttacatcgttgctgggcagctgcgccaggttttgggcaacggtagagccgacctggccgctgccgagaatcaggattttcacgatagtttgcgggtgaagataaggataggcgaattgtataacaaaggccgtctgaaagcagtatggctgcgttttcagacggcctttttgcatgggaaagccggtttgcggtgcatggccggaaacaggccgtctgaaaaagacgatgcccctgtttaagaaaactcaaacaggggctcatacataaagtattttacgtcgcggcgcgtcttttcagacggccttattgtagcaacggctctcatctcgtagtgcaacaatagggcgtattttataaacggaagcggcggttgtcaacgccgatgcggagtgggaaaatacgctaaggtattgttttatagatttgagcaaggaagagaaaggtgaaaaccatgccgcgctatattctcggattggatttgggtattgcttcggtgggctgggctttggtatcggtggatgaggatgagcatccggtcggcctgattgattgcggcgtgcgcacgtttgagcgggcggaagtgccgaaaaccggggattcgctggctttggcgcggcggcaggcgcgcagcgtgcgccgcttaatccgacgcagggcgcaccgtttgctgcgtttgcgccgtttgttgaagcgcgaaggcgtgttggcggctgcggattttgatgccgacggtttggttcgggatttgccggttgatgtgtggcagttgcgtgcggcgggactggacagaaagctggaagccaaagaatgggcggcggtgctgctgcatttggtgaaacaccgcggttatttgtcgcagcgtaaaagcgaaatcaatgaaacagataaacattcggagcagggtcgcttgctggccggtgtggcggcaaacagcgaattattgaagcaggatgcttaccgcacgccggcggaattggcggtgaagcattttgctgtgcaaaacggccatatgcgcaacaaaggcggcgattattcgcatacgttcaaccgccaagatctgcaaaaagagctgcgtcttttgtttgaaaagcagcgcagtttcggtaatccgtttgccgcagcggagttggaaggcaaagttgaagatttgctgatgacgcagcgaagcgctttgcagggtgaggcggtgctgaagatgttgggcaagtgtacgtttgagccttccgaatacaaagcggccaaaaatacctattccgccgagcggtttgtgtggttgaccaagctgaataatctgcgcattctgcataacggcgaagagcggcctttggaagaagccgagcgcaaaatgctgctggacgagccgtataaaaaagccaaattcacttacgcgcaggcgcggaaattattggatttgcctgccgatgcagtgttcaaaggtttgcgctacggcaaagattcagacggccttaaagccgaaagcggcgcgctgatggaaatgaaggcttaccacaaaatccgcagcgtattggaaaaggcgggcttgaaaaccgaatggcagggcttggccacgcagcctgaatggttggatgccgtcggtacggctttttcgctttataaaaccgatgaagatattaccgcgcatttggcagaatttaagctgcctgaaaacgtgttgaatgcgctgttggccggtattagctttgataaatttattcaattatccctgaaagcattggataaaatcttgccgattatggaagtaggcaagcgttatgatgaggcttgcgcagcggtttacggcgatcattacggcagcaaaccggtgcaaatcagccgcctgctgcccaccattcccgctgacgaagtccgcaaccctgttgtgttccgtaccttaacccaagcgcgcaaagtggttaacgccattatccgccgctacggttcgccgcagcgcgtgcatattgaaacggcgcgcgagttgggcaaatcgtttagagaccgcaaggaaatcgaaaagcggcaggaagaaaaccgcaaagagcgcgaacgggcggcagcggattttaaagaattgttcccaaattttgccggcgaacccaaaggtcgggatattttgaagttgcgcctttacaaacagcagcaatgcaaatgtctgtattcgggtgcggaaattgatttgcgccgcttggacgacgatggctatgtcgaaatcgaccacgcgctgccgttttcgcgcacttgggacgacagtttcaacaataaagtgctggtgctgggcagcgaaaaccagaaaaagcgcaaccaaacgccgtatgaatatttggacggcgcaagcaacagccaacgctggcgcgaatttcaggcgcgtgtggcggcctgccatttcccgtatgccaagaaacagcggattcagacggccaaactcgacagcaaagccgagcagggctttttggagcgcaatctgaacgatacgcgctatattgcccgctttttgtgccatttcatcgaagaaaacctgcatttggaaggcaggggcaagcggcgtgtgtttgcttcaaacggccaaatcacatcgctcttgcgcggcttgtggggcttgcggaaagtgcgtgaagacaatgaccgccaccatgcgctggatgcggttgtggtggcgtgttccaccgtatccatgcagcagaaaatcaccaaagccatgcagcggcgtgaaacgctggaaacagtggataccgaaaccggcgaagtgaagccgcgcattccgcagccgtgggattttttccggaaggaagtgacgatacgggtgttcagcgaccggccgcgtgaggaactcgccaaggaactcaattcgcgtccgcaggctctgcatgaatatgttacgccgctgtttgtttcccgtgcgccgaaccgtaagatgacggggcaggggcatttggaaaccgttaaatcggcaaaacggctgtctgaaaatatcagcgtggtgaaaaagccgctgacgcagttgaaattaaaagatattgaaaaaatcgtcggttatgaacaggcacgggaacctgcgctttatgcggctttggaagcgcgtcttcgggcgcataacgatgacccggttaaggcattcgccgagccgttttacaaaccggcgaaagacggcagacaaggggctttggttaaagccgtgcgcgtggaggatgtgcagaaaaccggtgtgatggtgcgcgacggtaacggcattgccgataatgcgactatggtgcgcgtggatgtgttcgggaagaacggtaaaaactatctggtgccggtttatgcgtggcaggtggcgaaaggggtgttgccgaatcgggcggtggtacagggtaaggatgaagcagactgggaggtgatggatgaaagctttgcgtttaaattttcgctttatccgaatgatttggtggaagtaatcacaaaaaaagggcggattttcggttatttcgccagttgtcatcgtggtacaggcaatataaatattcggattcatgatctggatagtaagattggtaaaaatggaatgttagaaggtgttggcgtaaaaaccgcattatccttccaaaaataccaaatcgatccgctaggcaagaaaatccgcttgtgtaagcccgaaaaacgccttgaattgaaaaacaaaaaataaatgccgcaggccgtctgaaaagttttcagacggcctgtcgtgctaaaaacatacggagaaagcaacatgacttggcgcagtatcctgattagccggcctgcccgtttgtcgttgcaacataaccacctgctaatccagcaagacgaagccatcccggtaccgctggaggatatagccgttatcgtgatagaagcacgcgaagtggtgataactgcgccgctgttgtctgcgctggcgcaatacggcgttaccctgctgacctgcgacgagcaatttctaccctgcggacaatggctgccgtttgcccgataccaccgcagcctgaaaatcctcaagctgcaaattcatatgacgcagccgcagaaaaagcagctttggcagcggattgtgcggcagaaaatccgcaatcaggcttggctgctgggttacagcggtcacgatatcggtgcaggccgtctgaatgctctggcggatgaagtgaagtcaggcgacaaaggctatgccgaagggcaggccgccgcgctgtattttcccctgttgtttggcgatgcgtttacccgcaatcaggaaaatgccgtcaatgcctgtctgaattacggttacagtattgtgcgttccgctgttgcccgcgcgctggtgcaatatggttttctgcccgcgctgggtttgcagcacaagagcgagctgaatgcatttaacctggccgacgattttatcgagccttaccggcagattgtggatttgctggtgttcgacgccgtgtgtacgcaaagcctgcctgaaacgctttcgcccgaaatcaagcgcaagctggtggggctgctttgctgccagattatgctcgacaaacgccgttacagcctgttggccgccatcgaccgcaccatacagtcttttcagacggcattaatcgaaaacaatcccaagctgctgaaactgccgcaaatgctgcctttgaaagagcatgattatgaatgaggccaaatttatgcgcttaatcgtctttttcgacctgcccgttaccaccgccgccaaacgcaaggcggccaaccaattccgtaagtttttgcagaaagacggctaccagatgctgcaattgtcggtgtattcgcgtatcgttcgcgggcgcgatgcgttgcagaaacaccacaaaaggctgctgcaacagctgcccgaagagggtcaggttcgttatttggaggtaacggaaaagcagtatgcgggtatggtgatgctgatcggcgagccgaaaacgcgcgaaaaaaaggtcaacgccgaccagcttttgctgttttaaaacggaattttaggcagaaataaagccgggaacccttgttttataagggttcccggcttgggtattgtagcactacgagatgagagagggagctacaactaatcgcaagatactacgttatgggcgtgcattgtagcactacgagatgagagagggagctacaacatgatttcggcacgctcccgctccgctttgattgtagcactacgagatgagagagggagctacaacttggtcagcgggctatcacacttcgcggcaattgtagcactacgagatgagagagggagctacaactatcactccgaaaacaagttgatatcagggattgtagcactacgagatgagagagggagctacaacctttttggtctgccaaaccctgttgtcgacattgtagcactacgagatgagagagggagctacaactttaaaaccggacagctactgcttccgtatattgtagcactacgagatgagagagggagctacaacgaatggccggatgcctgcttaagctggggcattgtagcactacgagatgagagagggagctacaacaatgaaagcgtagatgccaaagttatcgctattgtagcactacgagatgagagagggagctacaactttcggtcctacaaatttgattgatttataattgtagcactacgagatgagagagggagctacaacaatttgcgtcaacatcaaacttttctagaaattgtagcactacgagatgagagagggagctacaacaatataacttatcagttatcaatcggtgcggaatcccattgtagcaccacgagacgaacacccaatccacaacaatctacgcaatccgcctacaaaaaagccgtctgaaaatcgcttgtttttcagacggctttttctgctttatgcggtttctgcaacccaatgcgggtttaccaatggcccaataccttccaccaggccaggccgatggtggcgaaaatcaggagttctaaaacgctcatgatgaagccggctttccaccattcggtcatggtgacgaaacccgagccgtaaatcacgggggaagagcctgatgcgtagtgggtcagcgacatcatgatgccggtggcggcagccatcatcagggcaaacagcatgggcggggcgcccaaggccaagcctgcgccgtagaatgcgccgaacatggcggtaacgtgcgccgtgccgctggcgaagacgtagtgtgcgtagaggtaggccagcatcagaagggcgcagccgccttgccagcctaagcccatgcctgaaataccggcttgcaggtagtcggagagccagccgattaagccgagtttgttgaggaagttggccatcatgaccaatgcggcaaaccacaccacggtatcccacgcgcctttttctttcagagcgtcgtcccaagtcagtacgccggtcagcagacagagtgcgaatccgaggaaggtggtggtggtggcatcgattttgatgccgaacagcatgtccggtacgcccgcccataaaaacagcagcagcaggaagatgcccagcatgattttttcttcacgcttcatcggtcccatttctttcaactgctctttggccagagaggtagcgttcggtgtttgcttgatttcgggggtgtagaggaaatacagcaccagcggcatcagcagcagggcggccaagccgggtacgaccatggcggcaaaccatgtgccccaagagaggtggatgtcggaatcggtggctttggcaaccaattcgaccactaggggattgggggctgtggcggtgatgaagatgatgcagcagatgatgttggcgtggtagttgaccagtgccagatatttgccgattttgccttccgtgcctttttcagggtcggaatcgaaactcagggcgatggatttcataatcgggtgcacaatcgcgccgccgcgtgcggtgttggagggggtgaccggtgcgatgaagaggtcggcgattgccaggctgtagcctacgcccagcgtgcgtttgccgaacagggaaatcaacaggtaaccgatgcgcatgccgaggccggttttcaagaggccgcgcgagatgatgatggcgataccgatcatccaaatcagcgagttgttgaggctgctcaatgcgtctttgatggcttgtccggccgggtttttgaccggttcgccgtccaccagttcgggtacggtcacgccggtcagcgcaaccagtgtgatgcccagaatcgccatcgcgccaatcggcatggctttgccgatgatgccggcaatgatgccgacaaacaaggccagcaggtgccaggcctgcggcgacacgccttccggtaccggaatgatgaaccagataagcagcgtcagtatcagcgcgacggctgcgggaattggcttaaagcccattttgaatctcctgaaggtataaaaataaaaggggaatcgggtttcagacggcatttatactagtcaaatttccaagaaactgtaatgagcagactcagtaggggtaaggttttgctgggctgaagcccagcctgttcattataatttttataaatttcaatatgttgatttaaggccgtctgaaaaaggtgtcggctgggagatgaaatcccgacaaatattctacaaatccaaacgtgtcgggtttacaacccaagctacacaatacgcaccactattatgagtaatgcgtaggctgggcttcagcccggcaatacctagctccgaccgtgctaagatccaacctactcattttatatactcgtcccgttggattgatacggcgttgttgcgtccggctcaaagaggaagcccgactaagctgtcttgtctcaatctaacgaaatgacttgtgtcacacagaaacattttcagacggccttaaacgcattcaaggccgtctgaaaaattaccgttcctgctctcccggcaggccgtattcttcggggaaggtacgcagcgagctttgcaataccgttaccgcaccgtcgattaggccgcagcgcccgctgtgcggcagcagcttgcacaggctttgcagggcgtgcaaatcgtcggcggtgccgataccggtgtccacgcggttgaggaggcgggaaagttggaaggtgccgcctttgcagggcgggcattggccgcaggagtttgcggcgaaaaattccacgtattccgatactttgcgtacgacgctggtgccttcggaaatgacaatcatcgcgccggtgccgaggctggatttgcgttcgcgcacggagacgaagtccagaggcacgtccaaatctttggcagtcagaagcgtattcgaggggccgccggtaaacacggctttaaaggtgcggccttcgagcatgccgcctccgtggacgtaaatcagctcgtgcagggtggtgcccatcggcagctcgtacagccccgggttcaatacgtcgccggagagtgagtagagtttggtgccggcggcttcgcccaagcccaaattccgataccattcggcaccgttggcgaggatttgcggaatgttggcgaaggtttcggtgttgttgatcagcgtcggcgcgccgaatacgccgctttcggccggaaacggcggtttgcggcgcggaaacgggaaattgccctccaaccaggagatgacggcggtttcttcgccgccgatatagcgtccggatgttttcaccagctgcaagtccagcggtttgcccaaatagttttcaatgcggatgaacaaatcgcttgttttccattcttcgatggcgggcgtgagcgaggcgatggattcggtttggtgcggattgacatacaaaaccgctttgttggcacggcaggccacggcggcaatcagcacgccttcgatgacttggtggggtgtttccgccagcagtacgcggtctttgaaggtgcccggttcgtcttcgttggcgttgcagacaacgtatttgtcgccgtttttgctttgtgcggcgactgcggcttcccacttgcgccaagtcggaaaaccggcaccgcccatgccgcaaagattcgcgtcttgcaaagtggcgatgatgttttcgggggcggacaaggcagccagcaggcctttgccgccgccgactttgcgccatgccgccaaatccgcgccgacgcggcgcgacgggtgcagtaagttttgatttgcctgattcatgattgttctccttgcaagcctgcgtgttcgcgcaaatcgaatttgccgtagtcgggatagagtaccggtgctttgacatcgctgtgtaaaccggcgcgggtcatttcgcgttgcaggttgtggacatggtccacgccgccgcgtacttttttcagcggcaggccggatgtggcggcggcaatgccggcgcggcggccgaagctgatgatgtccaaaagtgcgttgcccatcagacggttgcggccgtggatgccgccggttacttcgccggctccgtacaggcccggaacggaggttgaaccgtcgccgttgatttccatgccgccgttttggtagtgcagggtcgggtgaatcatcatcggctcgaccgccggatcaatgccgcatttgtgggcgacgtgtcccagcgtgaccaaacggctcaatacgtcgggatcgttttcaatcagacgcggggtatccaggaaaacaccaagctggccgtcgcgttccacgccgcggccttcggccacttcgcgcaaaatcgctgccgccaccacgtcgcgcggttgcaattcgtcaacaaaacgctcgcccaagccgttaaccaatttggtaccggcggaacgcacggcttcggaaatcagcgcgccggccaaatgcggcgggtgggcgactccggtggggtggtattggaaggagtcgacgtcgcgcagcttcgcgccgatacggtaggccatcaccaagccgtcggctgtcgcaccgtagtggttggaagtggcgaaaccctgcaggtgcagacggcctgaaccgccggtggccaataccacggatttggcgtgcaccaataccaaggaacggttttccagatcgtatagaatcgcgccgacgcagcggccgtgttcgtccgacaacaattcaatcgcaggatggcggttgagctgggtaatgttttcgtccagttcgactgcttcgcgcagcaccctcatcatttccaagccggtaaagtcccggtagctcaaaatacggggaacggtcgtaccgcccgcacgtttgcggctcagatggccgttgctgccttcgcctttggccaggtcaaacgtcatgcccaagccaatcagccagcgcacggcagacggcgcgtcggtgaccatttgtgcgaccagctcttttttcgcagcgttatggccgcctttgatggtgtcgtcgaaatgttgctgcaggctgtcgtcggcaccgactgccgcctgcatgccgccttcggccatcacggtgttgctgtcgccgatgcgcagtttgttggccataatcacgcgcgcacctgcttcggtggccgacaatgccgccgccgcacccgcgccgccgccgccgattaccaaaacgtcggtgttcaagtgcaccgcgcgcgacaagtcgtagtcgtcgatcaagggttggctggtcagcagtttggccaagtcgggatggcagtagtcgcccgtgttcgggccgatgggcagcttcacgcgcgcaccggcttggtagtcgggatggtatttgctcagcaattcctctttgggtggcaggtcgccacgcagctccaatgaagattcgcgcaggtttttcagggcggtttcgtagtcgataccggtaaatttccgagtcattacacggcctcctcttcaaaggtaacggtcattttgccgctgtcgatttcctgcaggcggcgcatgaggtcgaccgggcgcaatgtccgcgcggctttcatgcggcgtgcgaacagccccaagtggttggggcggatgtgttcggggcaggagagggtgcagaggttgcacatcacgcattggtcgaaagtgtcggatgcggcgccgaagtcgccggatacgacttgcgcgacgcctttttccacttccaaacctttcggacaggctctgttgcagccgccgcagtggcggcagtgttgcgcttcgggaaaggcttttgtggtgtcgtcgagccagttccaaccgtcgccgacctcgctgacgtcgtagtattggatgtgttcgggaatgaaatagtcgataaagctgacctgcatgccggcttcgactttggtttcgcaggccagcgcggtggtgacttcgcggtcgccttctttgcggatcatgcagcggcaggatccgcatacgccttgacccatgcagccgacgttggcggtcagcgcattgcccgaacgggcgtaggcttggatgatggacgagtcgggagaggctttgacttcgtgcccgtctatggtcagggttaataagttttcactcatgattaagtcctgtggcaatggaaaggtatgggccggcaggttatgtgtacttttattacagccagccggtcaaagtacctgagcggtttacttggcttttcttatataaatcaacgtctgccgattaagtgaaagtgtagcagaaatcgtgaaaggttttgagacgggggtggggaggctgtgtttttcagacggcttgtaagattgtggacaaaattacgcagtcagtaaaggaagggatggggtaattttttatttttaatggaaatatgttcaagccgcggaaacggtttgttagaaatttacaaaatacgatattgggttgtattatattttttattgatgattttaaatatcttattgaaatataatgaaaatataaattacgggataggtttggttgattgttataaaatttcaaaaaaatcaagcaagtttgatttctgtcaaaatttcgctgcaaaaagatgacatctttttcacattcgcgtagcgtgtctgctgtaaagagaaggccgtctgaaaacggtataagactgcttctaccgaaagccggtaaaatatagtcatttaacacagaatgatacggcgttgctgcgcccggctcagagagggggcttgactaagctgctgaagcagcaagtccgccgacccgtactatagtcatttaaaataagaatggtacggcgttgcttcgccttgccgtactatctgtactgtctgcggcttcgctgccttgtcccattcttattttattcgactatacttgtactgtctgcggctttgctgccttgtctcattctgtgttattcgactataaatgcttattgtgtttcataaaaaatcagagcattggtacaataggcgcgtattggaaacaatattaaagataaagtgtactgccgcagccgggaagggaggcggtcaggccgtctgaaaacctaccgtggtatgcgtgcagctttgtgggtattgtttatcccgtttgcgtatcagcccgagccactttcccattaccaaaaggaacaaccatgacgattatcaaacaagaggatttcatccgcagtatttgcgatgctttccagttcatcagttattaccacccgaaagactatatcgacgcgctttacgaggcgtggaaaaaagaagaaaacccggccgcgaaagatgcgatgacgcagattttggtcaacagccgcatgtgcgccgaaggacaccgcccgatttgccaggataccggtatcgccaccgtcttcttgaaaatcggtatgaacgtgcagtgggatgccgaaatgagcgtggaggaaatggtcaacgaaggcgtgcgccgcgcttatacttgggaaggcaataccctgcgtgcttccgtattggccgaccctgcgggcaagcgtcaaaatactaaagacaatacccctgccgttatccatatgtcggtggtgccgggcgacaaagtcgaagtcacctgcgcggcaaaaggcggcggctcggaaaacaaatccaagctggcgatgctgaacccgtccgacaatatcgtcgattgggtcatcaaaaccatcccgaccatgggtgcgggctggtgtccgccgggtattctgggtatcggtatcggcggtacgcccgaaaaagccatgctgatggcgaaagaatcgctgatgagccacgtcgatatccaagacttggaggctaaagccgcttccggcgcggaattgagcacggtagaatctctgcgtttggaattgtttgaaaaagtcaatgcgctcggtatcggcgcgcagggtttgggcggcctgaccaccgtgttggacgtgaaaatcctcgattacccgacccatgcggcttccaaaccggttgccatgattccgaactgcgcggccacccgccacgtcgagttcgagctcgacggctccggccccgcggtgttgacaccgccgagcctggaagactggccggacatcacctacagtcccgacaacggcaagcgcgtgaatgtggacgaattgaccaaagaagaagtggccacttggaaaaccggcgatgtgctgctgctcaacggcaaaatcctgaccggccgcgatgccgcccacaaacgcttggtggacatgctcaacaaaggcgagcaattaccggttgatttcaccaaccgcctgatttactacgtcggcccggttgatccggtaggcgacgaagtagtcggccccgccggtccgaccaccgccacccgcatggataaattcacccgccaaatgctggaacaaaccggc

SEQ ID NO: 3166 - DNA, 23207 bp, synthetic construct
  source 1..23207: mol_type = other DNA
  misc_feature 1..23207: note = Synthetic
gtattgccgatcaattgcgcatcaccacttaacggtagtaataaagcgatttgattcaagctggtttgctggaaattaaacagcccctgtaattccgtcgggaacaaataagcggccgtatggttagggtagctgtttttccagttttgcagtgcctgactgagttgtgctggttgatttagattatcattataggcttttgccagtgccagccagccgcctaatgccgcattaccttctgccgcggtattattgattacgcctttattggtactacgcaacaacgcccaagtgcggtcgttatttgcctgttttctttgtgtatcggttaagtaactgtcaatttgaatccgtgctttaacggcatcaatcggatcattgcggttttcggcgatgcgagccaccacttcataataacgggatttttgggacgggctcaatagtgccagattaatggcggttaattgggtttgggcgcttttatttttgcctttgattgccgcgatattggcatcaataatggatttgtccagcagttgctcatcgtttagatctttcagctcggctaacagcgcttgggcttgcggaattttgttttccgtgaccagaacccgggcggctaacagtttataagtctgtttatcttcattatcattggtttgctcgattttattcatataaaagtcggaattggcattggcatcgtttttcaacacgccggtgaagctgctgccgaataaagtggtacagcctgcgagcaagagggcgaataaaaaaggcattaattgatttttaaaattaatgcgttgtaatagaatagtcataattactccgttgttcaaacaatctgtacggatcttacttatctgaataattaaaagcaaataaaagaagttaaaaaatgaataatttagccggaatcctatatattgtcgccacaccgattggtaatttgcgcgatattagccagcgtgcgctggatgtgtttgcccaagtggatttaatcgccgccgaagatacccgccatagcggattgctgctggcgcattacggtattaaaaagccgttttttgccttacacgatcataacgaacagcaaaaagcggcgcaattggtggaaaaattacgacaaggggcgcatatcgcattagtttctgatgccggcacaccgttaatcagcgatccgggttttcatctggtcagacaatgtcgccaagccggtattcaagtggtgccgctgccgggggcatgtgcagcgattaccgcgctgtgcgcatcgggcatcgcatctgatcgtttctgttttgagggatttctgcccgcaaaaagcaaagggcggcgggataagctggaagcccttgtcgatgaggaacgcacgctgattttttatgagtctacccatcggattacagattgtctggcggatatggaaatcttgttcggcgcgacgcgttatgtggtgctggcgcgagaaatcacgaaaagctgggaaaccatttatggcgatacgcttgcgtcgctgcggcactggctggcggaagatccgaatcgcactaaaggcgaaatggtgttaatcgtcgaaggtaaaccaaaagtatcagacgccgaattttcccctcaggcggtcaaagccctgaggttaatcgcccgtgagttgccgctaaaaaaggcagcggcaattgtagcggagatttacggatataagaaaaatgcactgtatcaattcggcttggcgcagttggaataacggttaattgaaggcgccgggcatgatttattgtaataaaaccattatataatcccttggctttgtgtataattgcgccagtttagaggaaggacagtcgtatgagtcagtttttttatgttcacccagaaaatccgcagccccgcttgattaatcaggcggtggatattttacgtcgcggtggcgtaatcgtttatccgacggattccggctatgcgctaggctgtatgctgggcgataaacacgctatggatcgcattgtgcatatccgacagttgccggaaaatcataactttacgctggtgtgcagcgatttatctgagctgtcgaattattccgtggtaaccaacagcgcctatcgtttaattaaaaacaatacgccggggcgttatacctttattctcaccgccaccaaagaattaccgcgtcggttaatgacctccaaacgcaaaaccattggtatccgcgtgccggacaatcagattgcgctggatttattgaaagcgttaggcgaaccgattttatcctgctcactgatgctgccgggtgaagaacatctcacccaatcggatccggaagagatccgtgagcatctggaacatcaagtagatctgattatccacggcggctatttggggcaaaaaccgaccaccgtagttgatttgaccgaagatacaccggtgattattcgtgaaggcagcggctcggtaactccgttcatctgagtgctgcgccgattatttaacaagacgcttgggaaagcgacaaagaggaattatgaaatcaaacaagctaaattctcgttcaaatcgaccgcactttaatgctgaaaagcgtgataaaagtgcggtcgattttagcaccgtttccgctacggtaaaaaacaaaaaaccggcggaaggggaaaaactacaaaaagtgctggcacgcgccggtcagggatcgcgccgtgaaattgaggcgatgattgccgctaatcgagtcagcgtggacggcaaaatggcaacgctgggcgatcgcattgatgtcaattcggcggtgaaagtgcgcatcgacgggcatattatcaatctggcgcaagcgcagaaagaaacctgccgtgtgctgatgtattacaaaccggaaggagaattgtgtacccgtcatgatccggaagggcgcgcgacggttttcgaccggctgccgcgtttaaccggcgcccgctggattgctgtggggcggctggatattaatacttccggcttattgctgtttaccaccgacggtgaattggcaaaccgcttaatgcacccgagccgggaagtggaacgcgaatattcggtgcgcgtgttcggacaagtggacgatgccatgctggcgcgtctgaaaaaaggcgttcagctggaagacggtccggcgagttttaaagtgattaagccggtgggcgggcaaggcatgaatcaatggtttgacgtcaccttgatggaagggcgcaaccgcgaagtgcggcgtttgtgggaatcgcagggcattcaggtcagccgcttgattcgcattcgctatggcaatatcaaactgatgaaatcgctgccgcgcggcggatgggaggaaatgccgctagacgaggtgaattatctgcgcgatttggtcggcttgccgccggaaaccgaaaccaaactggaggtcggtaaagtgcggcgacgcccgaaaaccggacaaattcgcaaagcggtgaaacgttacacggaattgaataaacgctataaaaaatcctaaaaaacataccgcacttttctcaggcaaccatacaaagtgcggtttattttgtgagaattttatgaaaatacaacaactgcgctacattgtcgaaatcgtcaatcaaaatttaaacgtgaccgaagccgccaatacgctgtttacctcgcagccggggatcagcaaacaggtgcgcctgctagaagacgaattgggactggagatctttgaacgtaacggcaaacatattaaagccttgaccccggcgggcaaaaaaattgtctctattgcacgcgaactgttggtcaaaacccagagcatcaaagcggttgccaatgaatatacccagcccaatcacggcgtgctgcgcattgcaaccaccaatacgcaggcgcgttacatgctgcctgcggtggtagagcgcttttctaaacaatatcccgatgtcagcctgcatattcatcagggatcgccgatgcagatttatgatgccttgctgtccggcgaagtggatcttgccattacgacggaagcgcagtatttatttgatgatgttgtgctgctgccttgttatctgtggaaccgttcggtgattgtcaagccggatcacccgctggcgaaatgcgacaatctgaccatcgaagagctgggtaaatatccgctggtgacttatacattcggttttaccggtgtctcggatctagattattctttcaacagtgccggaattttgccgaatatcgtatttactgcgacggatgcggatgtgattaaaacctatgtacgtttggggttgggcgtggggattatggcttccatggcgcatactgcggcagattccgatttgctggcgattgacgccggtcacctgttccgtgccagcatgacgcagatagccttcaaacatagcgtctttttgcgtaattatatgtatgattttattaattatttttcaccgcacttaacccgtccgatggtggaaaaggcagaacgcttgcatgataataatgcggttaaaaaattatttgataatgtcgaactggaagttcgttaacatgcaacctattaaatgaaaacccgccgtttcatgttgttcgagacggcggttttttatcggcggaatacggatgcccgcggcggcattagttaatgccgatccagttcggtagcgccagtgaaatcgccggaatataggtaattgccaataagaaactcagtagaataagcagccacggcatcgccgcgcgcaccacatcggttaatggcatttttgatacggcagacgctacaaataaattaagtccgattggcggggtaatcagcccgatttccatgtttaccaccatgatgatgcctaaatgaatcggatcaattcccagctggattgcgatcggaaacagaatcggagcaagaatcagaataattgccgagggttccataaatgctccagcgatcagcaggataatattcactacgatgaggaacgtccatggctgtaaatcccattcaataacatgttctgtgatcagttgcggaatttgttcggtggttaatacatgggcgaacaacattgcgttggcgatgataaacatcagcatgatgctgagtttggcggattccagcaatactttcgggcaatcgcgtagtctgacgtctttataaataaataccgcaacgaaaaacgaatacaccgcagcgacggctgccgcttccgtcggggtaaagataccgctataaatcccaccaaggatgattaccatcaacagcagaccccagctcgctttgcgcgcagcgctgcaccattgacgcacactggctctgggctgtgctggtagttttttaacccgcgcaacaagataaattgccagcattaacactatgccgagcaatgtacccggtataacacctgccataaataaacgtccgaccgacgtttccgttgccgcggcataaaccaccatgacaacggagggcgggattaagatccctaaggttcctgcattacagataataccggtaccgaagccgaccggataaccggaacgtaccataccggcgatggcgatagaacctaccgccgcgacggtggcagggcttgaacctgaaagtgcggcgaacagcatacaggacatgacggcggcaatcgctagaccgccgcgaatatgtccgaccgtggcattggcaaaatcaatcagtcgtttggcgacgccaccggtggtcatgaatgcgccggcaagtaaaaagaacggaatggctaacagggtataatgttccgatgtttcaaacaacttaatcgccagtgagctgagcgaatcctgactgaaaaacagaatggttactgcgccggataatcccagcgatacggcgattggaacgccgataaacataaagacaaataacagcagaaataataccagaattgtcatttcgcctccttgcgggttagcttcagcgcgtcttcgctttcatcggcaagccccaaattgcgttgtttgccgcgtaaaatacggatcagaatttcaataaaacggattgcgattagtgcaaagccaagtggcataattaagcctgtttgccacagctgaatgttgaagtgatgtaaatcatcggcgcccacgccggtcagatacatagcgtgaatccattggtagcttgccgcgctgattaaaataccataagtcaaacaacacaatccggcgataatactgaccgttttctgacttgaacgggataaatgtttaaccagaatatcaacaccgatatgacctgcggtacgaacgccgtaagacgcaccgaaaaaaatcagccagccgaaacagactttggttaccgcgatactccaagtcatttcctgagccgtcagcataatcaattctccgaccggttcggtaaatggcgcggtcacggggaaacggtcagccagatcaaaaaacacattataaagattgttgaagatgacataaaaaaatgtcactaatgtcatcaccattaataaaattgcgataaaacattcctcaaaacgctcccacaaccactttagagaagccattttttactcctgctgcaatagatgataaaagtgcggcattaaattgccgcattttcatgataggcgataacgtcgttattgaatattggaggctgccgccgcctgaatcagatcggcaccgatagcgtcttcaaattgtttccataccggtttgaccgcatcgcgccattggctgcgttgttcagccgtcagcgtgataatctggcttgagccggaatcaataattttctgtttatcggcaagattcagcgcatgagattgcttgttcacttcagtggaaacctctgccaaaatggtgattaattcagcgcggatatcctcgggcacactatgccagaagtctgtgttgacgataaccatgtaagagagcaatccgtgattcgattccgtaatatatttttgtacttcattgattttctgtgaaaaaatattggaatatggattttctgcaccattaaccacaccagtttgtaatccctgatacatttcaccaaacgccattttacgcggtacagcttttaatgctttgaactgcgcatccagtacttcggagttttgaacgcggaattttaaaccgcgcgcatctttcggcagtctcaattctttgttcgcggaaagttgtttgagatcattattccagtaagctagcccggtgatgcctttatcttccatggatttcaacagggattttcccgcgtcactttgttcgaagcgttctactgcattaatatcatcaaacaaaaacggcaaatcaaacagttgaattttaggcgtatatttatcaaatttggctagagagggagcaagcatttgaacattgttcaaaagcagcgcttccatttccttaccgtcgccataaagggaagagttgggatagacttcaactttcactttgcctgccaaacgctgttcaaccagtttctgaaacattaatgcgccctgaccttttggcgtttcgttggcgacaacatgtgaaaatttaataataatcggatcattggcccatgctgataatgaaaaagcggcactgaacgcaaatgccgtgatcatgtttgttagttttttgtataacattgtgtttacctcactcgatagggttataaatcagaagattcgtcagctaatttgccttgttttttacaaaagtaaacattttgttaacaaaattttgacaaagatctcaaaaaatttaattccctctgaccggagatgccgaaataaaagagtgagttttcaatagaaatatgataaaaataaactcttttttatataatttataggaaacaactatgtcagagctacagaacatcattgaagcggcatttgaacgccgcgctgaaattacgccgaaaaccgtagatgcgcaaactcgcgcagcggtagagcaggttattgacggtttggacagcggtaaataccgggtggcggaaaaaatcgacggcgaatgggtgacccaccaatggctaaaaaaagcggtactgctgtcgtttcggattagcgataatcagctcattgacggggcggaaaccaaatattacgacaaagtgcggttgaaatttgcagattatgatgaagcccgttttcagcaggaaggattccgtgtggtgccgtctgcgaccgtgcgtaaaggtgcatatatcgctaaaaatgcggtattaatgccgtcttatgtgaatatcggcgcttatgtcggcgaaggcaccatggtggatacttgggcgactgttggttcttgtgcgcagattggtaaaaatgtgcatttgtccggcggcgtagggatcggcggtgtgctggaaccgttacaggccaatccgaccattatcggcgataactgttttatcggcgcgcgttcagaagtggttgaaggcgtaattgtagaagacggctgtgtgatttccatgggcgtatttattggtcagtccaccaaaatctacgatcgtgaaaccggcgaaatttattatggtcgcgtaccggcgggttcggtgggagtgtctggcagcttgccttcgaaagacggaaaatacagtttatattgcgcggttattgtgaaaaaagtggatgctaaaaccttaggtaaagtcggcatcaatgaattattgcgcgccatcgacgaatagtcagatttaataacataagccaaatcactgaaggtttggcttttttattgcccgtataattaaaaaaccgaatcgttaatctattaggcattgtatggcgaatgaacatttagtcagattttattatattttattgatgggagtcggttttcctattatgcgttttatgagtatccaatttgatacgttaaataataatgcagtgcggtttctttccggtggatttttatttgttgtaatatgtctgtttaaatataaacatgaattaaagaaaataattgaaaaaccgaagcacattatctatttgctgatgttggcggtttttatgaccggtaatatgtattgttttataaatggtcttaaatatacttccgcattagccggcagtattttcggtatattagccatgccgttatctgttgtgatggcatcggtcttttttaaggatgaacgcactaaagcgggacaaccgaatttttatatcggcggtttcttcgccgtgttaggttcgctaatttttgtgctttatggtaatcaatccgacgaaggagatgattttattaccggtgctttgtttttgagcgccgctattgttatccagtcgatacaaaatctcattgttaaaaaagttgccgaacagctaaatgcaatcgtaatcagcgcctccaccgccaccatatccggattgattttcttaattctagcgatatataccggacaaattcagcatttacgagatgcaagtgttggattattaactggtctggttttggccggtatatatggcatgctgacgggcatgttattggcattttatattgtccagaaacaaggcgtcatcgtttttaatcttattcagttaaccgttcctttatctaccgccatagccggctatttggttttagatgaagtgatttctatttaccaaggtatcggcgcaattattgttattatcggttgtattgtatcgttgagaaagaataggaaaatatgatgtatttaatattgtcaatatcatattagttttattataatttttgattaatagataaattacgtatctgcaattgatttatttttctatagattatgagaaactatttatgcccataaacgattattgtctgatatagtaagtattcatttaatagcaataagttctcagagtagaataaaccttactaaataaactatctaaaaagatacccctagaaattaaaatttctaggggtagagctttgcgtaatctttcgatcacttattgtaataacgatctatatttcgcagtgtcatcattacgcgagctactatataatcaatttaatttctagtcaaataaaaaaggagaaaatcatgacgttgcgttatattttaggcttggatttggggattgcctctgttggctgggctgtggtggaaattgatgaaaatggatacccgattcggttgattgatttgggtgtgagagcttttgaaaaagcagaaactgccaaagaagggaaatcgctcaatgaagaacgccgtttggcacgtgcttctcgccgtttgattcgccgtcgtgtgcaacgcctaaaacaggcaaaacgtttactgaaagaaaatggcgttctgcttccctcagattttatctcttctcaacttcaacttccgattaatacttggcaactacgtgtaaaggggctatctgaaaaattagaacgtcaagagtgggcggtggtgttgctccatttgattaaacatcgtggctatttatcgcaacgtaaaaatgaagcccaaactgaaaataaagagcttggagcgatgttaggcggtattgcggaaaaccaaaaattattacaatctgctgaatttcgcacacctgcggaaattgcggtgaaaaaatttgtggtggaagccaaacatattcgcaatcagcgagggagttacgcacacacttttaaccgcttagatattttggcggaaatgcagttgttattccaaaaacagcgtgagttgggtaatccttttacatctgcaaattttgagaaaaatatgaccgcttgtttaatgttccaaaagcccgccctttctggcgaggcgattttgaaaatgcttggacattgcacttttgaaaccgaccaatataaagccgcgaaaaatagctattctgccgagcgttttgtttggctaaccaagctcaataatcttcgcattttgcacgaaggcgaggagtttgctttaacggaagagcagcgccgttctattattgatgagccttataaaaaggcgaaattgacctatgcgcaagtgcgtaacttattgaagctacccgaaacggcgatttttaaaggcgtgcgctatcgccaagataaagtggcagaaagtgcaacgttaatggagctaaaagcgtggcatgccgttcgcaaagccctggaaagtaacaacttaaaaacagaatgggaagagttgaaaactaagcctgaattattggatgaaatcggcacggcattttcgttgtacaaaacagacgatgatattcgagcgaaactgggtgataaattgcccgaagcggtgctggaatgcctattagcacagctgaattttgataaatttatcaatctctctttgcaaagtttagccaaaattctaccgcttatggagcaaggcgtgcgttatgacgaggcttgccaacaggtttacggcgatcattatgggagtaaaacgaagcaaaatgagattttcttgcccaaaattcttgccgatgaaattcgtaatcctgtagttttacgcacactcacgcaggcacgtaaagtaatcaatgccgtggtgcgtcgttatggctcgcctgatcgggtgcatattgaaatcgcacgcgagttgggaaaatctttccaagatcggcaaaaatttattaagcagcaggaagaaaatcgtaaagcgcgagaaagagcgggtgaaaattttcgagaaatatttccgcattttgtgggcgaaccgaaatataaagatttgttgaaattgcgtttatataaagaacaagatggaaaatgtctttattctggaaaagcattagatttgacacgtttactagaaaatggttatgttgaagtagatcacgccttgccgttttctcgcacttgggatgatagccaaaataataaagttttggttttaaaagcggaaaatcaaaataaaggcaatcgtacgccttttgaatggcttggcggggttgaaaatagcgatcgttggaaaatgtttaaagtgaacgtggaaatgagcgcattttcttatgcgaaaaaacagcggcttcttacgcaaaaattagatgaaaaaggttttaaagatcgcaatttaaatgacacgcgctacatcagtcgttttatgatgaattggattgcggataatatgttattgaaaggtaaaggaaaacggcaggtttttgcaccgaatggacaaatcacggcattgctgcgcgggcgttgggggttaacgaaaaatcgggaagaaagcgatcgtcatcatgctttagatgcagttgttgtcgcctgcgcaacggtttcgatgcagcaaaagattactcgttttatgcaatatgaagcggagcatccttatagacaaaatttgggacgtgttgatgttgaaacaggtgaaattattccgctacatttcccagcgccttgggagtatttccgtgaagaagtgatgattcgcgtgtttagtgatgtgccgaaagaagatttaactatccagctacctgctcgcctagaagccaatcacgagtttgtgcaaccgttgtttgtatccagaatgccaacacggaaaatgacggggcaggggcataaggagacagtgagatctgcaaaaaggctagaggaaaaaatcagtataaagcgtgttgctttgacagaattaaagttagatttgttagaaaatatggctaattgtgaacgtgaagttgagctttatcaagccttaaaagaacgtttaaatgcttttaaaaatgatcctgtaaaagcctttgctgagcctttttataagaaaggtgggcaattggtgaaagccgttcgagttgagttcttacaaaaagctggcgtattggtacatcaaggagcgggtgtaacggataatgcaacaatggtgcgggtagatgtctttaagaaaaatggcaaatttttcttagtgccaatttatacttggcaagtggcgaaagggattttgccgaataaggccatatatggcagtgatgaagacaattggttggaaatagacgaaagttatcaatttttatttcctatgtatccaaatgatttaatcaaaattgtaaaacaagaaggaaaattacaaaacgaatattttggttattataaggaattggatagatccgatgcacgaattattatttctagccatgatagagatattcgtaaaggaaatgtgaagcaaaaagggagcgacaagttaactggaaaatttaggatttcaactaaatcaaaagtaatttcttttgaaaaatacgaaatcgatgagttaggaaaaaatatccatctttgtcgttattcaaaacgtcctaatgtgcgttaattttgatccctgtgtatgtttatacacagggattttttatatgggagaaaatatgagctggcgaagtttattaattagtaaaggtggtaagctttctttaaaaaataatcagttgctgatttggcaagaagagaaagaatttagtgtacccttggaggatattgccattattgtggttgaatgccgagaagtcgtgattactgcgccgcttttatcagcatttggattatatggaattactttattaacctgcgatgaacaatgtttaccttgcggacaatttttgccctttaatcagtattgccgacaatataaaactttaaagttacaacttgaaatgtctcagccgttaaagaaacaattatggcgaaaaattgtaaaacagaaaattttacatcaaagctgggtattaaaagaaattggttgtgaagccgaaagtcagcgtttagaaaagatggcaaagcaggttaaatcaggcgataaagataatttagaagcacaaagtgcggtgctttattttcatactttgtttggtaaaaaatttagccgtaaaacggaaaataatataaacgctcatttaaattatgcttatattgtattacgttcagcggtggcaagaagtttagttttacacggctggttgccgcaatttgggatttttcattgcaatgaattaaatgcctttaatttagccgatgattttattgagccttttcgtccgatagtggatttgcgggtatggcaactttgggaaaacggcacattatctgagcatttatcgccgtcaacaaaacagtcgttgattaaattattgcattatcaaatgacctttcagcaagaaacattaagcgtactggcggcaatcgatggttgtgtcggttcgctacaaacggcattgctcaacaaaaatgcggattggctaaaaatgccagaaattcgatcgcttgcggagcatttttatgagtgaggcaatatttatgcggataatcgtcttttttgatctccccgtaactacaaaagcgaaacaacgagcagccaaccagtttcgccaatttttacgtaaagatggctatcaaatgttgcaactttcagtttattctcgcattgtacgcggacgagattctttggaaaaacataataagcggttaagagccaatttgcccgaagaaggatctgttcgttgtttggaagtcactgaaaagcaatttgcttcaatggcaattttacttggcgagaagaaaatccaagaaaaaacagtgaatgccgaccaatttttactgttttaacgtgattttttgcaataaaaaaccgcgcaacgccttgatatataaggctttgcgcggcttgaattataacactgcgaaatatagatgggaattacaactatgacccctttatggggattcttaaggggattataacactgcgaaatatagatgggaattacaactactgcacacttagataagacggcttttaaattataacactgcgaaatatagatgggaattacaacggtggttgatgcttatcgtgcaaacaagaaattataacactgcgaaatatagatgggaattacaactcaaaattttcacttacggcacgtttaaatattataacactgcgaaatatagatgggaattacaactaacggcttttgcgtgctacgctcggttggattataacactgcgaaatatagatgggaattacaacttgttgtgccaacatgcccactcggcttaaattataacactgcgaaatatagatgggaattacaaccaaggcacttgcacaaagcgatcttcggttattataacactgcgaaatatagatgggaattacaacttagaagtccaatattccgatgaattattgattataacactgcgaaatatagatgggaattacaactgccgtcgcaactaatcaagctgccgacgtattataacactgcgaaatatagatgggaattacaactggattcatgaggctatgtacgccctcattattataacactgcgaaatatagatgggaattacaacatggtgccggacgatatagatgataaccccattataacactgcgaaatatagatgggaattacaacgataaaatgcttagttccaaagcagttggaaagtcggtcagcccaaatctgcattctttggctgtcgcaaatgcagataaactatatgaaaatgcgttatatggccgggcaaaacccgacaggtcaaatgatcctaatattaccgctattcatcgtttattcttagcgattgaagacggtaacaatcagtatttggtcaagctgacagtcaaagagatcgcgcgtaaagaccaagcgaataaactatatactcttgaagcaatagaattaaatgaaaaatctcccgcagctcaatgggttgactcgactattcaagctgatgggcttgacccgacttcaatccgctctacgggagatatttgtaagctagcagaaaatgcacaaaaaagcaatatcagcggtaggctaaatagattgctgaaaaagagctcaagataaaagaagggaatcgatgaatttacgcgaaatagccaatagcgcgatcacagccgtgaatcctaatgtcttggttacacttaaactgaatgtgggctatggaactgatgacactggaaagagagttgcaaagtttgaggatgtgagtgtcgaaattcagcctcagagcttgtcaacgcaggacttgcagttatttgatagccttgcccagcaagggcaactattgaatgtatatgtaagtggacaaatgcacgccttaaggcgaatctcgcagcaaggtgcagataagttagtgtttaaggcgttcggagagaaatcggaatcagaatggttaattaaatccattacagaatcattccccgaatggtgcaaggtggttgtatggcgacagaattaaatacaacgcataatgatatttatcgagaagtccgagaattgttgctcgggctttttaatttatcaggggagcgagttattcgtggatatagcgacaatgtgccattgccagaaggtggttttatcttgatgaatattattcacgggcaagatctatcaacaaatagccataattattccgttgaacggggaaatgtagaagtcacacaaagcgttgaattgcaaatgcaaattgatttctatggtgatcaagtaaggaattttgctcgcactttttacaagctgtggcgagatttttattcctgtgagctgcaagccgttgtattgcgataatcctaaatgcttaccctttacgaatgaaaagagccagtacgaagaacgataccttgttacggctcacctaacttataaccccgctattactcatgaacaggcgtttatggacaaagcgggagaaattgaacttaataaactataagaggaaaacttatgttgaaatccattccggcatcaattataacctgcgaaatatagatgggaattacaactgatagattatgattaccctatgcaaatattgagaaacttatcatctttatgtactgaaaacaaaaggtatatagaatagtgaaatggtagttattttatatccttgcattgaatataagttatagtgaatgttaatcagagttctgagtagatgatttttacatacattatatcttatttcttccaaacgatatgatattcccgttcttcttcacggtgagagattaaaaatttagcgaaaatatcgtccatttcgtcctgttcgttgagtagaccgatccaaacttcggcgtatgcttcggggtcgataagcacaccgatttcctgttcccaatcttcagcggtttcgacgaattcaacggcgccacgttcttcaaattggaggttaaatagcataatatccgccggatcaagattttcgcccgccatttcaagaaaaatatcgtaggcgatgtcaattgcggtatcagggtcaatcggttgaatttgagtagtcatggttctttcctgtaaggttaaattggcgctatgatagcacaaaataaaaagtgcggttgatttgcgcactgaattcaagttcggtaaacacggcttaaggcgtagttggtttgggataatatcatacaatcaacgattttttcgtgctcattccataatgtcgcattattcaatgagggggagaagataatcggcaaaaaatggtgaatctgagattcaccattgccgtcagggtttatttttctgcttttagaataccggaagagccttccgaataatcccgcggttggttgtcttcgcttggatcgccgtcagcgtctggctcgttttggtgtgcgataagattttgcgcgaacaattccttatcggccagctccggtaacaatgtatttgatgatgacgccagatgacgataaagtttctgatagtcttgtgccatcgttttcaacaattcggcgctttcggcaaaatgtttttccagttgttgtttttgattgccgagttcatgtttgacttgctgtaattccgcttcggttttcacttgtttttttaccgatcctttggtgaaacgcaacagcacgtagccgataattaccccgacaaccaaaccgataagcgcggcttgccacatttcggcagtccaattttgcataatatactccttaataagctgtaaagatcgtttgttatcataacgttaaattaggcatatttctttgcgccggatcacagtatgataaatcggcgcacagtttgacctgacgccggtttatgcgcagtgcggtttattgtcggtgttcgcgtttggctttttgcagtttggcataggcggtaagcagtttctgatgggcgtggaaatgctgtaaccgttcgtcgtcggctggcaaatcgtaaaacggattgctgccttgtattgcgttccaagcaaactctaccgcagtattgccgtacattttctcaaataccatgcggtattgttccggcgtgcgtgcgctatcggaaaacagctcaagagagctgattaaacagcggtaatagttggcacgcgctgggctgaagaccgaagcgctcatatttaatgtccaagtcgcccattccagtgcattgtccagatcctgaatcgccaaatacaacatggatttcagctcgccaatacgcagcgttgtccagcctgattgcggcggggcgacaatgccgataaattcgcgcactctggtggcgtcgtcaatgccttgttcatccagttccgccaacaattctcggtaggtttcctgcgtatgatgaaaatgcggcagatcgagcaaaatttcacgccagtccattcccatgttgttattggcgtaaatcagatcatcggcaggataaatatctgacatgcccggcacgataatgcggcaggcatacacatccagatgagtataatccataatatagacttctttttgctgcgcttgaaagatcgccatgagattctcgtattcttgatgggtattgccggaaaaatcccaatcggcgaaggcaaaatccgcctcttgtttaaatacgtcccatgaaattaagccgctggaatcaataaaatgggtttccagattggcgtgatcggcgacgtcatcattattaaacgacggcggggtgaaaacatccaaatcctttaagctgcgcccttgtaacaattccgtaacggtgcgttccaacgccacctgaaaattcgggtgcgcgccgaaagacgcaaaacaggtgccgttgtgcgggttcagcaagataacgcaaatcaccgggtattgaccgcccaaggacgcatcataagccagaatcggaaaaccttcttcttccagtttccgaattgatgcttgcaccgaaggatagcgcgccatcacatgttccgggatcaacggcaggctgatagcctcggcgatgattttattttttacatagcgttcaaacacttccgacaatccctgtactcgggcttcatagcgagtgttgccggcggacatcccgttggagacatatagattcgcgataatgctttgcggaaaataaaccgtgcgttgatccgactggcgtacataaggcagcgccacaatgccgcgttcagcattgccggattgcagatcgaccagcaattccgggctcagttcgttattcggatcataataattcagcagttcctgatttaaaatacccgacggcagcaatccgtcgtcttcaatcggaaaccatttttccgacggataatgtacaaagtcgccattagcgatatcttgcccgagataaaaatcggcgaagaaataattggttgacagacgttcgaaatattcgcccagcgccgacgccagcgcagctttcttgcttgcgcccttgccgttggcaaaacattgcgggcaatctttgtcgcgaatatgcacggaccacacgtttggtaccggattcagccacgagacttcttcaatatcaaagccaagtgcggtcagtttttgttgaaatttcgcgatactctcttcaagggcggcatctttaccgggaataaaggtttgtgctgtcatgctgtcttctcttgtaggttaaagcagagcataataggggagtttgcttaatcgggcaagcataatgtactgctgcttgctgattaacgcctgtttttgaacctgaccgcctacgcttagttttccttcatctgtttaaaggcgttggctggttccagattacccgcggcgcggaaagacattttctgcggttgcagagtgagcggataaacccgtttttgtgcgcagatcacggttaacggcgcaaacggtccgcgctcattgtgcaggggtaaatgttgctgcgccagaatgtcaaaattcagcagttccaaccaatcgatcactcggcacagcaaatattgccgaaaaggaaaaggctgttgcactttaacgccgagcgtgcgcttaaacaatagacgactgaacgggttaaagagtgaaacaaacaaatagccgtcgtcgcacagtacacggttgatttcgcgcaggatttggtgcggatcctgacagaaatttaacacgttgagcagcaggcaggcattgatcgaatcttcaacgaaaggcagttccagcgggcttgcttgtatcagcgagagattatcgtcagctaaaagtgcggtcagattttcgtcaatttctgccgagacgattatttgatgcaactgcggcaattcacagcgaatttcggcgctgagtccgccgatttttaacaaatgatcgccgacaatattcggcaaccagttggcaaaatagcggttaagtgcattacaatactggctaccgcgctgcaactgccgccagctggtaggctgattgaagtcggcggaggattttgcgttccatttcattattaacctcgaggataattacatgttatttccgattcctgcacttcatgataactatatttgggtttacggacgagaaaatttgcccgtaattgtgatcgaccttccggaaaccgagaatttgtttcgctttttaacccagcataagctggaggtggaggcattgttgctgacgcataaacatgatgaccatgtcggcggcgtgagcgcatttaaacgcgcttatccacaagtaccgatattggggccggcagaaaccgctgacaaaggcgccacacagctggtgagcgagggagagattgccactacgcattaccagattagggtgctgcccagcggcggacataccgcgcaacatgtcagctttctgatcgacggacacttattttgcggcgattgtttgttttccgccggctgcggcagagtgttcaccggcgattaccagcaaatgttcgattcgcttcagcgattaaaagcgctgcccgatgagacgattgtttgccccgcccatgaatataccctgagcaatctgacttttgccgcgaccgtcgcacatgatccagcagtcgtgcgtcgctatttggcacaggtggaagaatggcgggcggcacataaacccagcgtgccgaccagattaggatttgagaaatccattaatccgtttttacaggcaaattcgctggctgaatttacggcgttgcgtaaagcgaaagatgatttctaatcaaatcaggttattctgcataaaaatagggaatctgatttgctacgctgagcataattgcttaaaatgacagggttttattttctattttgagaatgtggggatattgagcgcgaagtgcggtcaattttcaacgagtttatgacaattcttgtgttaggtattaaccataagaccgcttctgtggcattgcgcgaaaaagtcgctttttctgaagaaaagcggcttttggcgttacgccaactcagccaatccgcactggcggacagtgcggtgattctctccacatgtaaccgcacagaagtatattttcacaataaacagatcccgccgcacgaggccaaccattggcagcaacgctgtatacactggtttgccgaagtacaccagttaagcgtgggcgatttgaacgattgcctttattcggcacaaaatcagcaggccaccgaacacttaatgcgcgttgcctgcgggttggattcgctgatactgggcgaaccgcagattttaggtcaggtaaaacaagcctatcaaatcagcgcacaattttatcaacagcaccaaagtgctgtttccggtgagttttcgcgcttgtttcagaaaacctttgccgccgctaaacgggtgcgtacggaaaccgacatcggcgaaaatgcggtgtccgttgcttataccgcctgtaccttggcgcgccagatttttgacagtctgagcaaactgaatattgtactggtcggtgctggagaaaccattgaactggtcagccgccatttattgcgtcacggggtgaaaagcctgactattgtcaaccgcacattagcccgtgcgcaggcgctggtggaaaaactggagacggatcaacatattcgcattctagcgttgaatgacttgcagcaaggggtggattcggcggatattattatcagttccaccggcagccaacaggtactgattacgcaggaaatggtgcgacaggcgcagcgcaaaagacatcaccagccgatgttgattgtggatattgccgtgccgcgcgatgttgagcaaagcgttggtgagctggaaagtgtttatcattacacagtggatgatttgcaacatattattcaacgtaacgtcagccgcagagaacgggcgtcaacgcaggcggaaaccattatccaacaggaaaatcaggatttttatcaatggcttaaggttcatcagttttccggattgatccgcgcttaccgcgacagtgcggaacaaacccgtcaggcattgttggaaaaagcgctgttatcgctgcggcagggtgaaaatgctgagcagatattgcaggaattaagctataaactgaccaacaaactgattcaccaacccacccgcgcaatgcagacgatggtgaaatccggtaacgcgcagggtttacaggcattttccgacagcatcggctccacttcggaagaatgaagataactgaacattataaaagtgcggtccttttcaccgcacttttgccgtttacagcacaatggttttattctggtaaacaaaaatccggtcatgcaaggcgagatccagcgcccgggtcagcacgcttttttccacatcacgcccggcgcgcatcatggcatcagcactataggtatggtcgatattgatcacgttttgcataataatcggaccttgatccaactcattattgatgaaatgtgccgttgcgccgataattttcacaccgcgttcatacgcctgctggtaaggtctggcaccgataaacgctggcaggaaggaatgatgaatattgataacacgattcggatagcgggcgacgaactgcggattcagcacgcgcatatatttcgccagcacgatgtaatctggggcataatcgtcgattttttccgccagcagtctgtcgtgttcgactcgg

SEQ ID NO: 3167 - DNA, 23204 bp, synthetic construct
  source 1..23204: mol_type = other DNA
  misc_feature 1..23204: note = Synthetic
tggcggcggctactacgatgttacgctggcagccttgaaaggccgtctgaaaccgcacacagtgggcgccggctttgcctgccagatttgcgcccgcctgccgcacgaagcacacgatattgcgctggattcattcgtcagcgaagcaggcagggtagattttcccgccaggcccgcctaatccgcctgcacatgttttttcagacggcctccaacttggcaaacgcagtatccaaatctttcaccccttctttgccgaaattaatcgtcagccttgccgagccgcctttatccaccgcatcgataatcacgccggtgccgaatttggcatggcgcacgttttggccgatggtaaaaccgtggtattgctgcggcgcgtaaaatgtttcgacaacgcggctgccggccttcttcgacacaccggcagatccgccggcgcgctgcggggcgggcgaaaggcggtggagcacttcaggcggaatctcttcaacaaagcgcgaaacgatgccgaaatgggtttgaccgtgcagcaggcgctgttgggccatgctgatataaagccgtttgcgggcgcgggtaacggccacatacatcaggcggcgttcttcttcgaggccgccgcgttcggccaggctgtattcgctgggaaacagcccttcttccatgccggtgagaaaaacggcatcaaattccaagcctttggcggcgtgcaccgtcatcatttgcagggcttcttcgccggcaccggcctggttttcacccgattcgagcgcggcattgcttaaaaaggcgagaatgggaaacagcgggctttcggcggcgttgtcgggcagaatttcaaaattgctttcagacggcttaaaagcaacggcggcattgatgagttcgtccagattgtctaagcggtcttggtggctgcctttttgggtttggtagtattcgaccaggccgctgtcgcgggtaacggcaagcatcatttcctgtagggatacattggcggcttgcgcgcgcaggccttcgattaggcgcacaaaggcagcaactttggcggctttcgcgcccataccgcaggcagcctgccacagcgaaacaccctgctctgcggcggcggcctgaatgttttcgatggtgcgggtgccgatgccgcgcggcggggtgttgatcacgcgcaacagggcgttgtcgtcatcagggctgacggccaggcgtaggtaggccagcgcgtgtttgatttcctggcgctcgtaaaaacgcagcccgccgtagattttatagggcatgccggcggcaaacagagcctgttcgatgatgcgcgactgggcattgctgcggtagagcaccgccatatcatcaagccggcggccttcgcgttgcagcgatttggcttcgtcaataatgaactgcgcttcatcataatcaacgggggcgcagtaaaagcggattttgtcgccgctttcggcttcggtgcgcaaattcttgcccagccgctcggcattgttggcaatcaccgcgttggcggcggcaagaatgtggccgtctgaacggtagttttgttcgagcttgatgggcgcctcaatgccgaattcgcgcatcagggcagtcatattgccgacatgcgcgccacggaagcggtagatagactgatcgtcatcacccaccgcaaacacagccgcgcccccgccggccatcagcttgagccaggcgtattgcagtttgttggtatcttgaaactcatcaaccaaaatatggttgaaacggttttggtagtgcaggcgcagcgtttcatcggcctgcagcatttcataacttctgagcatcaactcggcaaaatccaccaccccttcgcggttgcaggtttgatcataagccgcgtaacactcaatcatgcgccgggtgtacgcatcgggcgcagaaagctgcgcggcgcgcaggccgctttctttttgggcgttgataaagccttgcagcgagcgcggggcaatgatttcttcagcaatgttaagctgcttgagcagccgcttgattagggcgagctggtcgccgctgtcgagaatctgaaaagtagaaggcaggccggcggcttggtggtgcaggcgcaaaaagcggtggcacaggccgtgaaacgtgcccagccacatggcgcgcacgttaacatggctcatcgcccccaggcgggtttgcatttctttggccgctttattggtgaacgttaccgccaaaatgccgtgcacaccggcctggccgctttgcaaaagccaggcaatgcgggtggtgagcacacgggttttaccgctgcccgcgcccgccaacaccaacgcagactgcggcggccaagtaacggcagagagttgttcggggttcaagccgtgcagcagggatacagatggattttgagaaaacataaaaaaagcaggccgtctgaaaaatagtctgaaaaataaaagatgggcattatcatgaatccacattgtttccgctacggcttgactgcccctgctcgaagagaacggtttggcaagccgccgaagcggcagcagaaccggttccgtatggtctgcagcttgctgccggtgccggaaataaaatggcttcacgctattgtaatggataaggccgcctgaaaacgaaaaggtttatttttcagacggcctgcttctataatttaattttgcgcaccaaaccggcttgcaaacctatatcgataaaagacacccgatatttattttcgcccaattccgccaaaccgattccaccgaaatccgcctacccgcccgccacgccggtggtgaaacacagcaaaaccatttgcaggccgcccatatcccgctttaaccggcacgacaacagcagcaaatggggcacacttcacggccactttgccgagaccaaccccgtttggcaggccaccggcacagaaaaccgctggctggcagtatttcaagacagcggccgctatatctcgcccaactggtatccgagcaaacagcgcgaccacaaagccgtgccgacctgaaattatcaggcagtacatttggaagggtatttgacgctgattgatgatgccgacactggttatgccattctcgccgaatcaagccgtatccacgaagcaaccctgccacacccgtggcagcttaccgatgcaccgcaagattatcttcaagtgatatataaataattgaaatgttttgaattaacagttgaaaatgtggaagctgcctataaactgaaccaaaaccaaagcacagaaacccacaacggcgtactgagcagtttgtccgaccaacccgacccggcagtggaaacaatgacacaaaacatcacgcgttttgcaccgaacctataacataggccgtctgaaaaatatggtggggtacacagaaaaaggggaataactcaaaggcgtatccgcagtatcgggtattaggataaaggcaacaaaatttgcacaacatagagccttggaagactttcagttcgacaatccgaggcagactaaggtcatatccgtctactgatggaaaacgattggggctgtactagataactagggaaatttaacttcaggttagaataatccctatgagaaaaagtcgtttaagtcagtacaagcaaaacaaactgattgaactatttgttgcaggtgttaccgctcgcacagcggcgcaattagttagcgtcaataaaaataccgctgcctattacttccaccgtttgcgcttacttatctatcacaacagcccgcatctggaaatgcttgatggtgaagtagaagttgatgaaagctattttggcggacaacgcaaaggcaaacgtggtcgcggtgcggctggcaaagtggctgtattcgggcttttgaagcgtaatggtaaggtttacaccgttgccgtacccaatacacaaactgcgactttattgccaattatccgcgagcaagtgaagcctgacagcattgtttataccgattgttacaaaagttatgacgttcttgatgtgagcgaattttcacattttcggatcaatcacagcacacattttgctgagcgacaaaatcacattaacggaattgagaacttttggaaccaagcaaaacgccatttacgcaagtttaacggcattcccaaagagcattttgaactgtatttgaaagagtgtgaatggcgttttaacaacagtgagataaaatttcaaatttctattttaaaacaatcagtaaagcaggatttgttctagttatctaggacagccccaaacgattatatctgcaaccaacattatttttattggaggagcaggaaccggcaaaagccgtttggcaacggctatcggtctgcacacggtttcggaagggtttcgggtaaggtacttcaacgtattggatttggttaaccatttggagaaagacctgtaccggtttggaagataaaatgattaggcagttggacagtatgatcttccgatattggacgaaccgggctatttgctattcagcccaaaaagcgggggtattgttgtttaacctactgggtcctttacatgagaaagtcagtttggccggttagccaatccggtgtttgcgaaacggggggtgtattcggagacgaaaccatgacgcaggctttaatagacaggttgctgcaccgttgcgaaccgattgaaacggacaatgagtctttcaggtttcaaaactgttgctgatgccagtttgaaagtggtgcacttttagatgactgttggcaagtagtaaataagtctcaattatctattttaaaataattagtaagaagcaatttggtctagttctccaagacaatccctaaactaacaccgcattggctgaaattgagtccgtctgaaatcctgcctttaatttttccctgctgcgtatcctaacgcaaacgctgtccggtttctgcatcgataatccggcttggtgttttcctgccgccgatgcgtccgccgatgacccgcacactgcggccgaacaagcgccgtgcttcgcgctcggttttacagggtctgccgccggcgcggttgcatgatgtggaaaccagcggcgtattcaacgccttgcacaactgccgcgctgttgaatgagcaggcacccgcaccgccagcttgctgcgcccgcgtccgcgcaacagcagcggcaaacggcggcagggtaacagaaacgtttccggcgcaggccattggttttccaacatcgccgtcatgctttcagacggccgccccagcaaaggcagcaattgtgccaaactgttgccgataactatcatacctttgttttgcgggcgttttttcaggcatactaattttttcaacgcccgagtatgatacggcaggcagccgatgccgtaacaggattcggtgggatatgccaccaaaccgccttgtttcagatgggctgccaaccctgcccgggcggcagccgaaagaatacgcgctgttttcatcatttttctttttcggttgtggcctcgtcttttaaggtaaggcaaggtgaaacggttggaagggtgtaaccccttgccggtgggcaacatattagttaggcgatgccttatgtataggaaacaatagaggtgcagatgagtctgataatctgagccatccgggccggataaatgcggtaggccaacagctttttcagatggcctgccgctttgtaaaccggcttatggcgggtagcgggtgtattctcgatacaaaagggcaggcaatcgccggcggtgcgctcgcaccatcggcttgggcggcctgctgtttcgccctgcgcaaccgctctcttgggttgagatgtaaataccgtaccgatgcctgccaattattaggccgtctgaacatacccgctgccgttaccggttttgcaaaccattgtatgccctttaagccggcagaaattcaacccacaattttaaaattgttgaaatcaaatactatttagttttaaggttcggactgatatttgagcagaaatggcaaatcgaccttttgtgcggttaaattttcaaaattttacccggaagccgttcaaaagcgctaccgctgatacggcaggcaaatgcctgcctgaaaagaaacagtggctgtctgcctaatccgggataactgcaaaccatctttttcgggcgggtaccggtttgttgcgaaagccgttcaggccgtctgaaactgtttcagacggcctgaaatgttggaaagcccggcgttgtttgcacttttcattgttagcataagccttgtttgggggtaaggcttgttaatcattccggaaaatgcgttaaaaccgcagaattgccggaatattcaaaaactgcaaacagctgttgcggcgaaaaaaaccaaaactgcccggcatcaaaaatgtaaacccccggctttttattgccgtttgaataatatttagcggtgaacggctttgtcggcaatatccgtgcggtattgcatgccgttaaagcggattttctccaccgcctgataagccctggctttcgcagcggctgcaccatcgcccaggccgaccacgcataacactcgcccgccgttggtgagaatttcacctgtttcaccggcggcggtgccggcatggaatactttgccgatttggccggcttgctgcaaaccgttgataatgtcgcctttttttggggtttcggggtagttttccgctgccagcaccacgccgacagcggtttgcgggctccatttggcggtaacggtatccagcctgccttcgatggcggcggtcaccaaatccgaaaaatcgctgtcgaggcggctcatgatcggctgggtttcgggatcgccgaagcggcagttgaattcgatggtgtaaggcgagccatcggcaccaatcatcaatcctgcgtataaaaaacctgtaaattcatgcccttctgccttcatgccttgcacggtgggcaagatgatttcgttcatggcgcgttgatatacggcaggcgtaaccaccggcgcggggctgtatgcgcccatgccgccggtgttgggacctttatcgccatcaagcaggcgtttgtggtcttggctggtagccatcggcaatacattgttgccgtctgccattacgataaagctggcttcttctccttgcagaaaatcttcaatcaccacccgcgcaccggcgttgcccattttgttgcccagcagcatatcgtcaacggcagcgtgggcttcttttagcgtcatcgccacaatcacgccttttcctgcggccaaaccatcggccttaatcacaaccggtgcgccttttcggttgagatattcgtgggctttttctgcattttcaaaggtttggtattgcgcggtggggatgccgtgtttgtacataaaggctttggcgaaatctttcgagctctccaattgtgcggcatggcgggtggggccgaaaattttcaagccggcggcacggaaatcgtcaacgatgccggcggccagcggtgcttcagggccgaccagcgtaaaggcgatattttcgcgttggcagaaatcaatcaaatcggcatgggcggtgagcgacagattatacagtttgggttcggctgccgtgcccgcgtttcccggggcgacaaaaacggcttctactttgggggattgggcgagcttccaagctagggcgtgttcgcggccgccactgccgataacgagcaatttcatgatgattccttgattaaaaagatattttataaactcaagccgttttggggtaacgggttttgagctggcttttatagcataaaatgacacggtgtctgcattaacccgttctctgcaaggcatttctaagattgccaacccgcttcatagctgttacggcattgctgcgccttagttaaagagaacggtttttcagacggccaagcggcagcagggccggctcggtagcgtgatgttgtctgcggcttgccgggtgccggaaatgaagccgggctcaccacttaatgctgttccacgttttaagctgcccgcttgtttcgggttgccaatgttttctttcagacagcctcttcaggctgtatttcaatcgagcgcgtctgttcccaagctgccaggcaggcggcgtagttggccagcggaatgctcaccgttagccggcagtcgagctgtaaatcctgcgccaccacttctgcctgatgttgtttggcaacacggatggcatcgttcaaatgcgggtagccgcagcgcagccaaaccgttttttcgatatttttttctaatttttcagccaattgcaatgcttcggcggtggcggttttataggcgtggatcaagcccggcacgccgagcagggtgccgccgaaataacgcaccaccaccaccagcacatcagtaagccccgccgaatcaatctgccctaaaatcggccggccggcactgccggaaggctcgccgtcgtcgttggcacggaaagtgttgccgtcagtgcccaaacggtaggcataacaccaatggcgggctttatggtgtgcctcgcgcagggcatcgacatagtttttgacggcctcggtggtttttacaggataagcgaaagcaataaaacggctgcctttgtctttgaattcggcctgcaccggtgcggcgatggtgtggtaaaccgtggcattcatacttataccgcccccaccgcctgccgcaccgctgccagcagcgcatcgatatgcctgcagcgggtgtcgaagctgcatacaaaacgcgatgtgccttgttcgtcccaatcataaaaatccgtatggccgcgcactttatctgccgcgccctgcggcagtttcgcaaacacggcattggcttcggcggggtaaaccaattccacgccgccgatgctttgcaggccgtctgaaagccttttggccatcatattggcctgctgcgcggcttcgcgccacaaatccccttccaacagcacaataaactgcgcagaaataaaacgcattttggaagccagttgcagattgagtttgcgcagatagccgaggccgtctgaaaccttttgcgggttcaaaaccaccacgcattcgccgaacaacaagccgtttttggtgccgccgaacgagagaatatccacccccgcatccgtggtgatttcgcgcagcggcacacccagcgcggcggcggcattggccaggcgcgcgccgtccatatgcagcgccatgccgtgttggcggcaaaacacgccgatagcgcagatttcctgcggcgtatagaccgtgcccagctctgtgctttgcgtgatgctcgctgccaacggctgggcgcggtgctcgaaaccgtagccgtgcgcatggcgggcaatcagctcgggcgtgagtttgccgttttccgccggaaccgtccacagcttgaagccgcccaccgcttgcggcgcggtgctttcgtctgcatggatatgcgccgtttcggcacacaccaccgctccccagcgcggcaggcaggcctgcaaagccaacacattcgcgcccgtgccgttaaacaccaaaaacgcctcggcttgtttgccgaaatgccgtttgaccagcgtttgcagatgtgcggtataaggatcgttgccatacgcgcccacatggccgccgttggccgccgccagcgcggccaaaatatcggggtggatgccggaacagttgtcggaagcgaaagaatgtgcatcgggattatgcagcaggttcatgccgatctttcagggagtatagggattaaaggccgtctgaaaccttttcagacggcctgtttcgttgggcggattttaacagattatctaagacgatgcccccggccggaaatccgatcgggggctcatactataaagtattttacgtcgcggcacatcttttcagacggccttattgtagcaacggctctcatctcgtagtgcaacaatgttcctattataaattcgacccacatggctgtcaaatatttatttgctatgttaattagtgttattattttgcttatttgttaacagctttatttgcaaagggaaaaaatgaaaacaactacttacagatatattctcggtttggatctgggcattgcttcggtcggttgggcgttggtgttggtggatgaaaacgaacatcccatcggtctgctggattgcggggtgagggtgtttgagcgtgcggaaatgcctaaagacggcaaatcgttggcggcgacaaggcggcaggcgcgcagtatccgccgtttaatccgccgccgcgcccaccgtttgctgcgtctgcgccgcctgttgaaacgcgaagggctgctgagtgcggcagattttgcggccgacgggctgcctgctgccatgccggtcaatacttggcagttgcgtgtggaaggattggacagaaaactggctgaaaaagaatgggcggcggtgctgctgcatttggtcaaacaccgcggttacctgtcgcagcgtaaaaacgagatgcagacggaagataaggagctgggcaaacttctggcaggagtggcggaaaaccgccaattgctggcagataatcccgaacaataccggactccggcggagttggcagttaaacggttcgccgtacaaagcggccaccttcgcaataaaggcggcgattatgcccacaccttcaaccgcttggatttgcaaaaagagctgcatctgctgtttgccaaacagcgcggattgggcaatccgtttgcctctgcggagttggaaaacaaagtggatatgctgctgatgacacagcgcgccgcactgcaagacggtgcggtgttgaaaatgctcgggcactgcacttttgagccgcaggaatataaagcggcaaaacacacctacagcgcggagagctttatttggctgaccaggctgaacaatctgcgcattctgcacaacggcgaagagcgggcgttaaacgaacacgagcggaagctgctgctggacgaaccatataaaaaggccaagctgacttacaagcaagtgcgcaaaatattggatctgcccgacagcgcggtattcaaagggctgcgctacggcaaaagcgaagacggcctgaaagccgaaagcggcgcgctgatggaaatgaaggcctaccacaaaatccgcaccgttttggaaaaagcaggtttgaaaggcgaatgggaaaaccgcatccgcaaccctgaagtgcttgatgcaatcggcacggcattttcgctttataaaactgacaacgacattcagacggccttagccgatttagccttgcccgaaaaggtattggaagccttgttgaaaggcatcggtttcgataaattcattcaactttcgcttagtgctttgcgcaagattttgccgctgatggaacaggggctgcgctatgacgaggcctgcacaaaagtttacggtaaccattatggtgcaaaaatacaacaaaacagcttggtgctgccggtgattgacggcaacgatatccgcaatccggtagtgttgcgcacactcacgcaggcacgcaaggtggttaatgccgttatccgccgctacggttcgccgctgcgcgtgcatatcgaaaccgcgcgcgaattgggcaaatcatgggatgaccgcaaggaaatcgaaaaacggcaggaggaaaaccgcaaagagcgcgagcgcgcagcagacgagttcaaagaatatttcccccactttgcaggagagcccaaagggcgggatattctgaaaatgcggctttacaatcaacaacagggcaaatgcctgtattccggcctgccattggatttaggcagtctgaacaagacaggttatgtggaaatcgatcatgcgctgccgttttcgcgcacttgggacgacagtttcaataataaggttttggtgctcggcagcgaaaaccagaaaaagcgcaaccaaacgccttacgaatatcttgatggtgcaagcaacagtgagcgctggcgcgaatttcaagcccgggtggcgggctgccattttccgtatgcgaaaaaacagcggattcagacggccaaactcaacgagcaggattttatcgatcgcaatctgaatgatacgcgctatatcgcccgctttttgtgcggctttatcgagaataacctgcatttggaaggcaaaggcgagcggcgggtgtttgcatcaaacggacaaatcaccgctttgctgcgcggtttgtggggcttgcgcaaagtgcgtgaagaaaacgaccgccatcatgctttggatgccgttgtggtggcctgctccaccgtatcgatgcagcagaaaatcaccgaagccatgaagcggcgcgaatcgctggaaaccgtcaacacagaaacgggcgaagtcaaacagcgcattccgcaaccgtgggattttttccggcaggaagtgatgatccgcgtgttcagcgaccatccgcgcgaagagttggcagaaaaactcaactcccgcccgcaggcgctgcacgagcacgttgctccgctgtttgtttcccgcgcgcccaaccgtaaaacaaccgggcaggggcatttggaaaccatcaaatctgccaaacgcctgtctgaaaatatcagtgtagtcaaaaaaccgctggcttctttgaaaaccaaagatattgagaatattgccggctatacagccaaccgtgagcctgagttttatcaagcattgaaaaaacggctggctgaatttaacgatgaccccaagaaagcctttgccgagccgttttacaaacctacgaaaaacggggaacaaggcccgttggtaaaatcggtgcgggtggaagatgatagagtgaaagtcggtttggctgttcgtcatgggattacggatacaaacggtgatatggtgcgtgctgatgtttatcaaaaagcaaataaaagcggcagaatacagtattttgttgtccctgtgtatgcgtggcaaatagcgaaaggagtattgccgttattagattgccgaggatataaaattgatgaaacttatacattctgttttagtttgcataaatatgatttgatttccttcccgaaagacggtaatcctgaggaggaacaactggtttattacataacttgcgatagttcgaacggtcgtttttggattgcctcccatgataagggtgccaaggagcagcaattccgtatcagcacgcaaaaccaattatttatcaaaaaataccaaaccgatcctttaggcaaggaaatccgcctgtgtaaacctgagcaacgccctgccttaaaaatcaaacgataaatcatcacccggccgtctgaaaaccgtttcagacggcctttttataaagggaattttatgagctggcgcagtatccttattagcaaacctgcccgcctgtcgttacagcaaaaccacttgctgatccaacaagacgatacagttcccgtaccgctggaagacattgccgtgattgtggtcgaatcgcgcgaggtagtgcttaccgctccgctgctatcggcactggcacaatacggcatcactctgctcacctgtgatgagcagtttctgccctgcgggcaatggctgccctttgcccgctaccaccgcagcctgaaaatcctaaaatatcaaatggaaatgaccctgccgcagaaaaagcagctttggcagcagattgtgaaacagaaaatccgcaatcaggcctggctgctggactacagcggacacgatattgcggcaggccgtctgaacgcattggccgacagcgtgaaatcgggcgataaaaactttgccgaaagccaagcggccgcgctctatttccgcgtactgtttggcgaacactttacccgcagccacgataatgccgtgaatgcctgcttgaattacggttacagcatcgtgcgttccgctgttgcccgcgctttggtgcagtatggctttctgcctgcactgggcctgcagcatcatagcggattaaacgcctttaacctggccgatgactttatcgagccctaccgcccgatggtggatttactggtatgggaaaacggctttacaaacgggttgccggatacgctgactccgcaggccaagcaaaaattggtgtcattgctgcactgccaaatcaaacttgataggcgcagttattccctattggctgccatcgaccgcaccgtacagtcttttcagacggccttaaccggcggttcaaaaaatttgaagttgcccgagatgcttcctttaaaggtgcaggattatgagtgaggccaagtttatgcgcttaatcgtatttttcgaccttccggtcaccaccgtagaaaaacgcaaagccgccagccaatttcggaaatttttgcaaaaagacggctaccaaatgctgcaattatctgtttactcccgcatcgtacgcggcagagatgcgttgcagaaacaccacaaacggctgcaggcacacttgccggaggaggggcaagtccgctatttagaggtaaccgaaaagcaatttgcaggcatgattatgctgatcggcgagccgaaaccgcgtgaaaaaaaggtgaatgccgaccaacttttactgttttgacacagtttttcagagcaaaataaagcagggaatccttataaaacaaggattccctgcttgggtaattgtagcactgcgagatgaaagaggaagctacaacagagtgtggaaaccggagaactcaagtggtattgtagcactgcgagatgaaagaggaagctacaacgtgctgggaagtagtagagttatgagcaaaattgtagcactgcgagatgaaagaggaagctacaacttacctcttgcccgtctttctatgtttcacattgtagcactgcgagatgaaagaggaagctacaacttcttctaagctgagattgtttatatccttattgtagcactgcgagatgaaagaggaagctacaaccagcatggcgcgttccagcgcaattctgttattgtagcactgcgagatgaaagaggaagctacaactgaaggtttcgtcaaaaatcaggacaatggattgtagcactgcgagatgaaagaggaagctacaaccacagcctgtggcagcctgtgcccggcgagattgtagcactgcgagatgaaagaggaagctacaacggcggcttgcttctttcacgtcctgcacgtattgtagcactgcgagatgaaagaggaagctacaaccctgaacacgccgggtgtaaccgaagtattattgtagcactgcgagatgaaagaggaagctacaactcgacgaggcactgggcagcagttggtttaattgtagcactgcgagatgaaagaggaagctacaacgttggcggccttttagggattgaccgccctattgtagcactgcgagatgaaagaggaagctacaacgcaacactcttcctgcaaaggtcacttttcattgtagcactgcgagatgaaagaggaagctacaaccatcgggtatcaaggcattgcgccttgtcgattgtagcactgcgagatgaaagaggaagctacaaccaaaggcggtaacggtaagacccaggtcggattgtagcactgcgagatgaaagaggaagctacaacctgtgcgcggcgcttgttcgctttataaagattgtagcactgcgagatgaaagaggaagctacaactctcacggtttattcgacagctacgaagaaattgtagcactgcgagatgaaagaggaagctacaaccttggcttccccgccgtataggcgggaatcattgtagcactgcgagatgaaagaggaagctacaacacagaggcggacgctacacattcgattcggattgtagcactgcgagatgaaagaggaagctacaacccgtttctcatggcatcggccaaggccgagattgtagcactgcgagatgaaagaggaagctacaacgaagaaatcattgccccgcgctcgctgcaaattgtagcactgtgagatgagagaggaagctacaactcccgaaagcgtgtttatacgccccgaccaattgtggcactgcgagatgggaatggaagctacaactaacacactatactttttccggtttcaaggcctgaattgtccgcctgcttcaacatatccgccacatatcaggccgggcggtttccccctggccgccactgcaccgcctgatgaaggcaagacacccttgctcggtttcagacagtctttacgctctgtttgggcaaccggcggggcgcagggcagaaagtcgtgcagggccggtttgtgattcggctgtctgcaaacgcctgctgaccgatggccggctcgggaaagcagttgataaaaagcgggcggtttttctttcggccgcccccgccggcaaagcggggaggcatcggacgccggcatattgacgggcggtgccgccttgctccgaaccgggcagggaatccggcaaaggcgggattgacggccgtctgaaacggacgcgccggtatcgggcatggccgcttcagacggccggccgagtgataaaaccgagttcctttcaaatatctgccacagcattatcggtttccgccggcgggcggcgtgataaaacttttcatccacagcgtatcgctgcaacggagttatcggttcctgccgaccggagtagtgataaaacggcagcaaacgcccgcataacgactcccaagttcctggttgccggccggcggcgtgataaaaaccgcccgcccgtgcgctcggctttttcgccaacgcccgaaaatcacgcagccgttgcttcggcagacaacacaagcttcccggcatcaaaagtgtgagcagcccggccttttccaacgcacgcccaccgtctgcaaccggcggatgactgcgggcaaagaaagtgttccatgagccggaaaaccggttgggccggttaaggcgggagcatatttcaaacgccttctgctcggtgcttacggccgctgccgtttctgcccgtctgtcgggcaaggaggcgatacgcgccgataatccataaaacgcccttctggtttttgcctctgtcagataaggaggcgatacgcttcggcagttcctttctcggcacaacccggttttgccctcctgtttggataaggggcgcgatacgcacacacggcggtatttccatgctgccgctccccaaaacgccgccgcccgcctgctttgcctgcctgcacggcgtttggcaggttcgggttccctatccatcatttcacgctcggccaaacggccggatgctccgcttcggataaggttttgtcctgcacaacaggggttcgggcaggataattgacggtttgcaggcagaggcaatcatggcttgattcacggaatacgcaggcggtgcaggatttgggaaagcgctcgggttcaggcgtggcgatgcggcaggctgatgaccgttcaacttactttcacaaacggatacttcaacgccaaactaaacgggctgtaccggcttaacagcctctttcaggctttttgccgggcggcctgcccgagccgctgcgttcagacggccaaaggttgcgggaaaagcaggccggagcttaccgcactgatgcggcggcgggtgtttggccggaggcgggcaagggtgggcggcggacacggtgaggcatgcaagagtgtggcgggtaacggtttgtaatgaatcgggtttgttgaggaggaatgtcaaaatgccccctttcctgagggtaatatcaggccgtatgaaaacgcaaattgaaaacctgcttgagcacaccacattcactagacagtttgatgttgcataaaaacgaatttggggccgatctctgcgcggcagaggcagttgtttggctgctgcctgactgcgtgtagaatatagtgagcctgctttatttctgttacggcgttattgcgccttatcggagagaataattttgtaagccactgtatcggcaacagaatcagtctcgtatttattgcagtttgctgctttgtagcggaaataaagcgggattattatacggcttcggcccggtagcctgtggcgggccggcaactcccctattgatttttaaggatactctattaatggctaaatccattatcagcatttcagatattgaaggtgaacccgggcaagttgaagtcagcttcgacatcggcgaaagcgaggaagacggcctcactgctgcgcaaaacttttctatgattatcaattacttgataaagtgcataaacacggaggaatttctaaaattggctttagcggttgttaaagagaatcaagatgagttagatcatcctgagctgctcgaaatactggaagctctggaaacgctggaaatttctgaggctgagaaaatattgagtattgcacccgcttccaaactgattcactaacggctccgctccaaacaggccgtttgaaaatattttccgctatctgtatctctgcacacaaacaagtgcaccaagcctttgccccctgcccctacccgcaaaggattgcgcttaaagcataagttgatgccgatgcaaacggcacatttccaactattgaggcaaccatgaacctttaccgcaagctgccggcgccgatgctgcccgaagaaacccgccgcgaaattcaggcgcgcgagtcttaccatgttttaaagctcatttcagaatttgtcgaatcaggcgaagagttgcgtgccatccagccggctgtgagcatttacggcagcgcgcggacaccggccggccaccctcattatctgtttgccgaacgcctttcacgcaaactttccgatgccggtttttcggtgatttccggcggcggccccggcattatggaggcggccaataaaggcgcgtttgccggcagaagccccgccgtggggctcaacatcgtgctgccgcacgagcaacatgccaacccgtatcagaatttatccattaaattccaacacttctttccgcgcaaagtgatgtttgtgaaacatgccgtggcctatgtggtgatgcccggcggtttcggcacgcttgacgagttgtttgaaagcctcaccctcgtgcaaacgggcaaaacgcccagccgaccgattattctggtgggcaaaaccttctggcagggtatggtggattgggttcgcgaccaactgctcggcaacggcatgattgccgaaaaagatttggatttgatgcagcttatcgatgatgaagacgaaatcgtagcgcatattttcgcccactacgaaaaccgccccgacggcctgttcgagccgcaaaacaacacttgggagttgggtttgtagcaacagcagaatgttttctaaaatcggttaggccgtctgaaaaacagttttcagacggcctttgtttggtttggcgtgtatcagggttgcaggggggaagagtcttgcggcagcggctctgcgggagtggtttcaatggcagcggcgggggtggcgggggcggacatcgggttgtcggcagccggcggtgcggcagttacgctgtcggccacataaatgaattttacgcggtcgtcttctttggcagacaatttcacgccttggtattgcacttcctgcaggccgggaaaggctccctggctgccgatattttcagcagaggcaaaagaggcggcggcagcggccagtgcggcaaaagttaaagtggttttcttcattatcgatcctttcggtttggtttatctgtttaatagggctacggtttgacggtgggtttgtgcgagagtttttggtgtgagtttaaaggcgggttaataaataacaggttgataaaataaaactgctgctttggtaagttgtgcaaacaacccgggggggttctgatatatgatgttaaatgtgaataaccggataagccgctttgctgtgaatccgaccgtctgaaaacgcaggctgagccggtttgaagaggctttacggctttgcgggataagccgcagctgttgggttgtgctgcggctgctctgtcatcagcccttaaagctgctaaaaatctatgtggacgttgggaaaatgaccggccggcccgataaattctatgagcttttgcgcctgcggcgttaaacgcggtggtagcgcattgcagggtgtcgggcggggcgtttcagcgcatccggtgccgtgtctgccattgctccgttggcacaagtgggcggctttaccgcaggtttactgcaggagcggcggtatttatgttcggcatcggttggtttatgctaacttatgccggccatgcttcaaaaatctaaaggcaatggtttaacaagccgttgaagcagcaacagaattggctatgtatatctgcgcagcggcgctgcgtatgattgtatgcaggccggggcatcatgccggcattttttgttttgtttcggattgctctgttgccgcctaaaacaaggccgtctgaatattttcagacggcctgaagaagatttgcaaggggtgccggcccgtttgaaccgtggcggccggttatccgtaaactttcagcagctccacttcaaacaccaatgtggcattgggcggaattacgccgccggcaccgcgcgtgccgtagcccatttcgggcggaatggtcagcctgcgcttgccgccttctttcatgccgccaaagccttcgtcccagccggcaatcacttgccctgcacccagcgtgatggtgagcggctggcggcgctcgaggctggaatcgaattgggtgccgtcttccagccagccggtatagtgtacggtgatttctttgcctttcacggcttctttgccgctgccggtttcgatgtcttcaataatcaagcccatggctctgctttcttaatcgggttggggcggcaagcataacataaaaacaggcatcagttgcctacgcattggtgcagcggaaaacggcttttgcaggcgcgcaaattgttctttttttcgtagcggttccatgctttttcgtgaaaataaaacacaaatgtgttggccagcggctcaatcaaagccaccgcgccggaaacgccgatgctgccggttaaaacataggctacgctgaatgccacgctgaagtgtaaaatggcaaatgtgatggttttcaacatggtaggttccttttaagagcctttaagaggccgtctgaaatgatatcgattggcatcataacggggcggtgatggttaagaaatttgattctgccaatattttattagttaaattttatcgtattgaagatttcgatagcaaaggataattatgaaaacattgagcattgttgcgctcgaccgcgacacgctggcagacaaaccgtttgatttcgatttcaaattcaaactcgccgaatacggcaatactgagccgaacaacacggcagagcgccttcagggcgcgcaggttgtgattaccaataaagtggtggtggatgccgggcatatcgcagccaacccgcagttgaaactgattgcggtggcggccacgggtgtgaacaatgttgatgtggcggcagccaaagcagccggcgtggcagtgtgcaatatccgcgcctacggcaatgattctgtggccgaacatgcgtttatgctgatgattgccctgatgcgaaacctgcccgcttatcagcgcgacattgccgcaggcgtgtgggaacagtcgccgtttttctgccatttcggtgcgcctatgcgtgatttgaacggcaaaacgctggtgattttcgggcgcggcggcatcggcaccacgctggccggttatgcccgtgcgttcggcatgaaagtgttgtttggcgaacacaaacaagccgtggccgtgcgcgaaggctatgtagcatttgatgacgctatccgcatggccgatgttatttcgctgcactgcccgctcaccgcacaaaccgctggcatgataggtgaagccgagctggggcagatgaagccccaaggggtattggtgaactgcgcccgtggcggcttggtcgatgaatatgcgctgattgcagcgttgaaatacggcacattgggcggtgccggtttcgatgtgcttaccgaagagccgccgcgcaacggcagcccgctgcttaaagcgcgtttgccaaacctgattgttaccccgcacatggcctggggcagcatagaggcccgcagccgcctgtttgatatgttgatagaaaacattaaccgttttgtggcgggcaagccgcagaacctgctttaaagcattgccgggcaggcaagttacacaagcctgatacagcggatgccgtctgaaaacatcaaacctgataatgttgtccacaaataataaaaaaagaaataaacaatttattcattatcatagacagaataaaatataccgtttatcattattaaaaaccgtttatacttattttgattatttgacaactacaataaagggaggcaccgtggccggctcatattcactctaccgctgcgccgttttagccacttccaccagtatgctcgacagcatactcgaccgaaacagcccgattcatatgttgcgtttgagtgtgcagatgggcggggaaacctatgccgaaggcttggatttgaaagccgaagaattttatgattggatgcgcagccaccccgaagaaaaagcggttacttcaccacccgacatagaggctttatgccaaacatttcactatttgaaatcgcaaggttatcaagaagccatcataaccaccatcagtggcaaactgagtgaaaccgcagccgttatccgcaaggcggtgcaaacaatggaaggcaagctgaagattcatgtggtcgataccggcaccacctgtatgcccgagggttttttcgcccttgaagccgtgcgcctgcttcaggcgggcaaaacagcagcagaagtggtggcatatctcgaaaagttaaagccgcgctgcgaaattctgtttggcgtaaattcgctgacgcagctcaccaaaaccggcggcctgctgcgcatcggcgcggcgtttaacgattggctgggtttgaaaaccgttttgcgcttcaaccataaaggtgcatcgcatttggccagcgtgcaggacgatgaacaattgatagagcgcttgatcgaagccattatcgtgatgacggtagataaaaaccccacacatttggtgatatcgggcggttattgcggcgattaccagctctaccagcgctttgcccgcaaactacacgcgaaaaccggcctgcatttggaacacggcatacccgtttcccctgtggtcggtacttacttaggcttgaatgccgtgggagtgggcattgtggagcggttgccggaata

SEQ ID NO: 3168 - DNA, 23189 bp, synthetic construct
  misc_feature 1..23189: note = Synthetic
  source 1..23189: mol_type = other DNA
ctttagtcaataaagtcagagatacccaataatcataagacggagtattgaagtatgaaaacttttaccgataaattgttcaacggtattcaaatattgctgggtgtgatgctcgccgtaatgattgcccttgtgttttttaacgtcatacttcgattctttttcaattccggtttggtttggtcggaagaggtctcgagatatgtttttgtttacgtgatttatctcggggcgattgtggcgatgaaggaaaatgcccatttgggcgtggatacgttcattaaaaacgcaccggaaaaattgaaatggctgcttttcgtcgttggacgggtcatcattattgtcgttatggctatcttgtttaaaggtagcctggctatggtggttcaatcgcatacggcgaaagcggcggcaacgggtttgcctttatccgttgtgtacggaatcggattattgacgggagcggcaattattttaattgcgttactgaatattattgatgtgattagaaatcctaaatctgttcaccaagccgcattgatgagtgaagcagattcagattaggagaaaaccatgaccattcttatttttttagccagccttgtaggcggtattgtaatcggtgtaccgattgcattctcgctgctgttttcaggcatgatgctgatgttttatctgggcggcttcaattcacagattctttcgcaaaatctgtttaacggtgcggacagcttttctatgatggccattccgttctttgtggttgccggcgatttgatgaaccggggcggattaaccaacaaaatcgttgatgcggcgaccgcacttgtggggcatatccggggcggtttagggtatgtggcgattatcgctattctattgttcgccagtttggtgggaagcgcggtggcgtctactgccgctttaggggcaattttaattccgatgatggcgactatcggttacaaccgtgatcgcgctaccgcgttgattgcggcgggtaatattttatcgccgattatgccgccgtccgtgccgatgattattttcggcgttaccgcgggcgtatccgtaacggatttatttatgggcggtattgcaccggccgtttatattacactgactctttgtgtgatttgggctatcgtttcccgtcgcgattccgccgtaccgttgccgaaaagatcattccgcgaagtggtacgcgctacgcgtgaagcgctttgggcgattttgatgccggtcggtcttttattaggcttgcgtagcggtatgtttacgccgacggaagccggggtggttgcggttgtttatgcgttaatcatcggtttgtttgtgtaccgagaattaactttccaagccattaaagaatgtttcatttcttccgcgaaagccagtgcggcaattatgtttctggccgccgccgcgatggtgtcttcctggctgatgaccatcggtaatattccacgtattgtcacggatttacttcatccgtttatcggttcgccgattctgttaatgcttgtgattgccggtttagtgttgctggtgggaacttcgatggacgtggtaccgactattttgattttaacaccggtattaatgccggcagtgaaacaggcgggaattaatccggtctatttcggggtggtatttattattacctgcgtcttcggtttgttaacgccgccggtaggtacggtattaaacgttgccgccagtacgggtaaaatcaacatggaacgtatcgtgcgcaaagtatggcctttcctgcttgcgattgttgtggtgctgctcgtgttaatcgtattcccgagtacgttcatgataccacttgaattttttactaaataaggattgataaaatgaaagcaataactgtttcccaacctttcgaattaactgtcgccgatgtgccggcgcctaccgtgacaaaagatgatgatgtgattattaaagtggctttcggcggaatttgcggttcggatatcggtatttataccggcggtaattcccttgccaaatatccggccattatcgggcatgaatttgtgggaaccgtggtggaaacgggtaaagccgtaacacacgttaaagtcggcgattatgtggtgagcgatatagttaacagctgcggacattgttacgcctgccgtaccggtcatcacaacgtgtgcaaaaacctacaggttaccggagtgcattcacaaggcggctttgccgaatacgccaaaacccgggcggataatgtttatttagtggatacaaataaaatcccgcataaaaccgcttgtttaatcgaaccttatgccgtcggcgtggaaattaatacccgggcgtctatcgctgccggcgataaagtcgtggtattcggttccggtcctgccggtttggcggtgatgcaggtggcacgggcccgcggtgcggaagtgctgattaccgatattttcgaagaacgtctgcaattagcgcgggaaatgggcgcgaccaaagcgattaacgtgaaagatatcgatatgcgccaagcggtcaatgagtttaccgatgacgaaggtgcgcacgtggtagtggatgcggtttgttcgccgcaaagcattcttgatgcgttggatattgttgcgccgtccggtcgtttggtcgtgttaggaaccggtgccgcaccgtcggaaattccgcaagtcgcatttactaaaaaaggtattaatgttttcggtacccgtttaaacaataaacgtttccctgaagtgattcgtttattcgaagaacataaagttacgccggaaaaaatgattacgcatacttataagttcgaagatattgaaaaagcctttgatgtgatcaaaaacgaaaaaaatacggtgtgtaaagtattactcgaatggtaataaagtgcggttaaaaaaaggattaattttatgaaaacaacattcagatggtatggattaggcaacgatacgattccattagcccatattaaacaaattccgagtatgaccggggtggtttgggcattacacgacattcccgccggagaaatatggccggaagaacgtattgccgaagtgaaatctcaagtcgaaccttacggtttaagtattgacgtagtcgaaagtgtgaatgttcacgaaagcatcaaattgggtgcgtcggatcgtgacgtttacattgaaaattataaaaccactctgcgcagtctgggaaaatacggcgtaaaagtcgtgtgttataattttatgccggtgttcgactggatccgcacggatttatttaaagaagcggatgacggttcgaccgcacttttctatgaacacgcccgtatcgacggtatcgatccgaaagtgttggtaaaacagtttgaagaaaattctaaggatctcaccttaccggggtgggaaccggaacgtttgaaacatttggataaattgttcgacctttataaaggtatgacggaagacaaattaagagaaaacttgaaatacttcttggaacaaattattccggtagcggaagaagcgggtattcgcatggcgattcacccggacgatccgccgttctccgtattcggcttgccgcgtattgtgaaatgccatgaagatttccaaaaaatcgtagatatggtagacagccctgcaaacggtattacgttatgttccggcgctttaggcccgaatctgaaaaataatttgccggaaatgatccgcactttccataaacgtattccgttcgcgcacattcgcaatatcaaagtattcgaaaacggagatttctatgaaacctcccatttaacccgcgacggctctctggatattgcggaaatcgtaaaagcctaccatgaagtcggtttcgacggatattggcgaccggatcacgggcgccacatttgggatgaaaaatgccgtccgggctacggtttatatgaccgcgcattaggaattatgtatgtagaagggctttgggacgcatacgaaaaagaaaaaggacgcaaataatgaaactttcatatgatgctttaaattcaaaagaatggcaggaaaaggggtatcaattgccccgattcggcatttccgatgtagtaagtaacacaaaacaacaaccggtttggcttcatttgggggccggcaatattttccgcgcctttttagccaatctgcaacagcgtttgctgaatcagggcgacgcgcaacaagggattatcgtcgcggaagggtttgattacgaaattatcgagaaagcctatcaaccctttgataacctttgcgtattcgccaaattaaaaaatgatcactcggtggataaaatcgtggtggccagtattgtggaaagcttgcgcatggatccggcgtttacacaggatttcagccgtttgaaagcgattttccagtcgccgtcgctgcaaatggtcagcttaaccattacggaaaaaggctatttaatcaaaggattggacggcgaatactatccggcggtgaaagcagactttgaagagggaccggcaaaaccgcagagttatatcggtaagattattgccttattgcacgaacgctttgctgtcggcgcgttaccgttggcggtcgtcagcatggataatatgtctaaaaacggtgaaaaattgcaaaaagtgattttggaatttgccgaacaatggaaaaagtgcggtcatttatcgcaagattttttagattatttaaattcggataaaatcagcttcccttggtcgatgattgataaaatcacaccgcgccccgacacggaagtgcaacagcaattacaaaacgacggtattgaaaatctggcgccggtcgtgacgtcgaaaaatacctatgtcgcgcctttcgtgaatgcggaagaattagaatatcttgccgtcgaagacgacttcccgaacggtcgcccggcattagagaaagtcggcgtaatttttgccgatcgcgataccgtgaataaaatcgaaaccatgaaagtgaccacttgtctcaatccgttgcataccggtttggccattttcggttgtctgctcggtttcaccaaaatttctaccgaagtgcaagatgcggacttgtcggcgttaattcggaagttaggttatcaggaaggtttaccggtggtgattgatccgcaattaatcaatccgaaacaattcctcgatgaagtcattaatattcgtttttccaacgatttcattccggatacgcctcagcgtattgcgacggatacgtcgcaaaaactggctatccgcttcggcgaaacgattaaatcctacgtgaaagccggtaaatcgacagatagtctggtcgctattccgttgatttttgcaggttggctacgttatttattgggtattgacgatgaaggtcagccgttcgaaaacagtccggatccgcgtttaaccgaattaaaagcaaaactcgctaatataacgttgggaagtgtagtatcatcagcaaccttaaaaccgattttatcggataaaagcattttcggtgtggatctgtatgaagtcggtctagcgggcagagttgaacaatatttcaacgaattattagtaggcgtgggggcggtaagaactagcttacataaatatgtaaattaaggtagtaaaatgatagagccaaagcttcgagaatcctcgcgggattacgcatatcgcgtaatcagagaaatgatcgtcaacatggagttagtccccggaagtaaagtcagtgaaatagagttagccaatttattaggcatcagtcggactcccgttagggaagcgttaatagatctcgcccgtaacggcgcagttactatacaaccgcaaaaaggaacgtttatttcattgatagattcggatctcgtggaagaggctcgttttttgcgaaaaaccttagagaaagaagtcattgcgctattatgtgaagattcttaccaaaaggatcttcatattttagatgaaagtctcagtttgcaggaattttatttgaagcaaggtaattatgaaaaatttttagagttggataacgaatttcatcagttatttttcaaaatcacccacaaagatcgaatttatgcattaatgaaagggttgaatattcattttgaccgggcaagaacctctatctttaagaaaaaaccgtctataaaaacactggaagaacataaaattctgctgaaagctattcacaaccaggacaaagatacggcgactcaatgcattgagcggcatttatatcaatacgaactggataaagatagttttgagaaagaatacagccattatttcaataagagtggtaattaaatgaaaaaactcgctctaatcggagaatgcatgatagagctgaacggcgagccgttcggcactatgcgtcagacttacggcggcgatacgctgaatacggcgacttatgtggcgcgcgtcagctcgcccgaacggattcaggtatgttacgtatccgccttgggcacggataaattgagtcagggcatgattgaccgctggcagggggacggcattcagacggattgggtgctgcgcgatgaaaaccgttccgccggtctgtatctgattcagttagacaaacaaggcgaacggacgtttttatattggcgcaaccaatccgccgcccgttacttgctgcaacacccggattatcctcaggttctctccgccctgaaaagtgcggacatgatttatttaagcggcatcagtctggcaatcttgccggaaaacgaccgcactttgctgattgcacaattgcgcgaattgaaaaaagccggcgtggaaatcgccttcgacagcaacttccgtccgaaattatgggacagcctcgcacaggcgcaagcctgttatcgagccttgttaccgttagtggatgtggcgttagtcacctttgacgacgaagaaatgctgtggtcggatacggacgaacaagccactatcacccgcttgtccgccttcgatattccgaaaatcatcgtaaaacaaggcagtctgggtgccacgatttgtgaaaacggcacgcagaccttcgttccgacgattcccgtcgaaaacgtaacggacaccacttccgccggcgattccttcaacgccggttttctggcgggctatttacagggcaaaccgttgaccgtttgttgcgagcaaggtaaccgactggcgggcatcgtgattcaacataaaggcgcgataatcgaccctgccgccaccgaagcgttacgcgcagcgtttaattaaatacaagatagaaaaattaaggacggattatggcttacagcaccgaacaaattatcgaaaaactcagccgactgaaagtggtcccggtgatagccgtggatgaggcgaaggacattattcccttagtgcaaaccttatcggacaacggtttaccggtggcggaaatcaccttccgttcggcggcgggtgaagaagcgattcggttaacccgtcagcattttcccgacgtactgattgcggcaggaaccgtgctgaccccggcacaagcggtggcggctaaaaacgccggcgcggattgcattgtgacgccgggatttaacccgaatatcgtcagactttgccaagcgttggacttacccgttacgccgggggtcaacaacccgatggcgattgaagcggcattggaattaggcgtgaaggcggtgaaattcttcccggcggaagccagcggcggggtgaatatgattaaagcgttgctcggaccttatgcaaacctgcagattatgccgacgggcggcatttcgccttcgaacatcaaagattatctcgccgttccgaacgttgtggcctgcggcggttcctggtttgtggataaggcgctgattaagtcgcagaactgggatgaaatcgggcgcttggtacgcgaagcggtggaattggtcagctaaaaccgtgttaaaacaataaccggagaaaccggtcagggcgacgataagaaccgctggagagaagaacgctcattcggttcttgttcggttggggtgcagccggggcaaattggtataatagaaaaagagtggggtttacccactctttttggttaaaagtttttaatcaaacaacattcgattggcaaaccgattagtaaacgccttgcgccaacatcgcgtcggctacttttacgaaaccggcgatgtttgcaccggcaacatagttgatattcccttgttcgtcggtaccgtattttttacagttggcatggatgtccagcatgatgttatgcagtttttggtcgactacttcggccgtccagtattcacgctgcgaaccctgcgccatttcgaggcctgaagtcgccacaccgccggcattggccgctttacccggtccgaacaacaccccggcttgttgcaatgcttcggtcgcttcaatagtcgtcggcatattcgcaccttccgccactaattgcacaccgtttgcgattaaggtttttgcagcgtccaaatccaattcgttttgcgttgcgcatggtaatgcgatatcggcttttaccgtccacggtttttcaccggcaacatattttaagccgaatttttccgcataatcttttacacgaccgcgttgaacgtttttgatttccaataatgcggctaatttttccgcagtaaagcccgcttcatcataaacataaccggaactgtcggagcaagtgaccactttcgcgcctaattgaagcgctttttcaatagcgtattgcgctacgttaccggaaccggacacgagcacggttttgccgtcgaaagattgacctttttccgccaacattgcttgtgcgaagtaaaccaaaccgtatcccgtggcttccgggcgaatcaagctgccgccgaatgacaaaccgcgaccggtaaacacgcatgcggcttggttagataattttttcatataaccggcaagataacctacttcacgaccgcctacaccgatatcacccgccggtacgtccgtatccggacccacgtgacgatataattccgagattaacgcttggcagaaacgcatgacttcgccgtcggatttgcccttaggatcaaagtcggaaccgcctttaccgccgcccatcggtaatgtagttaacgcgtttttgaagatttgttcgaagcctaagaatttcagaatagataagttaacggacggatggaaacgcataccgcctttaaacggaccgatcgcactgttaaattgcacgcggaaagctcggttaacctgagtctgacctttgtcatccgtccatgccacccggaactggatagcgcgttccggttcaaccaagcgttccaataaggcttgtgagcgatattgcggatttttttccaggaacggccagattgatgtaaacacttcacgtacggcctgtaaaaattccggctgattaccgtcgcgttttgccaccaaagctaaaaattcttctaatgatgctaccgagtttgacatgataaaatccttcttaatgttgaatgcttgtcattgtaatattacgccgttttatcggctcgtccttaatatgcaatagaacaaaacggaaaatcaaacgatttcttggtgagaggcgtaaaaaagaaaaaaatgctttttgttattaaattatatataaaaaataattggttttattatctgaattttaaaaatttgactggaatttaagaaggtttatgttttaatacataaaaaccattcttttttctaattgggattagcgtaaaaatgcttcgctctctacagctaaaattattttgaaacgactcaaagtgcggttgtttttgcgcttgattttttatgaggaataataataaaaaacgatgccccctgaggaagtcccaggaggcagagcgttgcgagaaatttatctcttattgtaacaacgtttttcatttcgcagtgccattacaatgaattcaattgtaaatttacttcaatttttcgtcaatatatttctattatttgattaaaaattgttacaatcccagcaactttctagattgtgggagatgagctgtgaacaacatgaatttaaattatattttaggtttagatcttggtattgcttcagttggttgggctgtggtggaaattgatgagcaagaaaatccacagcgtttaattgatgtgggcgtgcgaacctttgaccgtgcagaagtgctgaaaacgggcgaaagtttggcattggctcgtcgcttagctcgttcttctcgccgtttggtgaaacgtcgtgctgaacgaattaagaaagctaaacgtttactgaaagcagaaaatctgttgctttcagccgatgaaatcttgccaaacgaggcgtggcagttgcgtgtaaaaggcttagatcaaaagttggagcgtcaagaatgggcggcggtgttgttacatttattaaaacatcgcggctatttatcgcaacgcaaaaacgaaagcaaaagtgaaaataaagaactcggggctttgttgtcaggtgtggcgatcaatcatcaaattttgcaatctgccgaatatcgcacgcctgcggaaattgcggtgaacaaattccaagcggaagaaggacatattcgcaatcagcgtggcgcttatacgcatacgtttagccgtttggatttattagcagaaatggaattattattccaacgtcaagccacattgggcaatccgcacacttctacaaaattattggaaaatttgaccgctttattgatgtggcaaaagccagccttggcaggcgaagccattttgaaaatgttgggtaaatgtacttttgagccaactgaatataaagcagcgaaaaatagctattcagccgagcgttttgtttggctcaccaagctgaataatttacgcattttagaacagggcgcagagcgagctttaactgataacgaacgttttgcgttactcgatcagccttatgaaaaagccaaactgacttacgcccaagttcgcacactgcttggcttatcggacgaggcgatttttaaaggtttacgttatcaaggcgaagataaaaaagccgtggaaacgaaaacgactttaatggaagtgaaagcctatcatcaaattcgcaaagccttggaagggttggatttaaaagcagagtggaacgagctgaaaaataatcctgcgttgttagatgaaatcggcacggcattttcgctgtataaaactgatgacgatattcatcgttatttagatggcaagttatcagaaagcgtattgaatgccttattagaaaatctcaatttcgataaatttattcagctttcgcttaaagcattacaacaaattttgccattaatgttgcaagggcaacgttatgatgaagcggtttctgcgatttatggtgatcattatggtaaaaaatcggacgaaattgaccgcttgttgccgaacattcccaccgatgaaatccgcaatcctgtggtgttacgcacgctaacccaagctcgtaaagtaatcaatgcggtggtgcgtttatatggttcgcctgctcgtattcatattgaaacagggcgtgaagtgggcaaatcctatcaagatcgtaagaagttggagaaacagcaggaagaaaaccgcaaacagcgtgaaaatgcggtgaaaaaattcaaagaatattttccgaattttgttggcgagccaaaaggtaaagatattctgaaaatgcgtttgtatgagttgcaacaagcgaaatgtctatattcaggcaaatcgttggaattatatcgcttgttggaaaaaggctacgtggaagtggatcacgccctgccgttttctcgcacttgggacgacagttttaataacaaagtgctagtgcttgctaatgaaaaccaaaacaaaggcaacgccacgccttatgaatggttagacggcaaaaataacagcgaaggctggcaacattttgtggcacgagtgcagaccagcggtttttcttatgcgaaaaaacaacgggttctaattcaagaattagatgaaaaaagttttattgagcgtaatttaaatgacactcgctatgtcgctcgtttcttgtgcaaccatattgccgataatatgttgctgacaggcaaaggcaaacgaaaagtttttgcttcaaatggacaaattacagctttattacgtggttgctggggactacaaaaagttcgtgaaaacaatgatcgtcatcatgcactagatgcggttgtggtagcttgttcgacaaagtctatgcaagataagataactaaatttgttaaatataaagaaggtagattatttaaagataaaaaagatggagtgtataagggagaacgtattaaccgtgaaacaggtgagattatttcgctccatttcccaacgccgtggaagttctttaaagaaaatgtggaaattcgcatttttagtgaaaacccgaaattagaactggaaaaccgcttgcctgattatccgcaatacaatcacgaatttgtgcaaccgctgtttgtctctcgtatgccaactcgcaaaatgacggggcaaggacatatggaaacggtgaaatcggcgaaacgtttagataaagggctaagcgtgttaaaagtgcctttaacgcagcttaaactgagcgatttagaacgaatggtcaatcgtgagcgtgaaatggcactgtatgaagccttaaaagaatgtttggagcagtttggtaacgatccagctaaagcctttgccgaacctttctataaaaaaggtggtgcattggtaaaagcggtgcgagtagagcaaacgcagaaatcaggtgtattggtgcgtaatggcaatggtgtcgccgataatgcaacaggttcaatagtacgggttgatgtctttaccaaaggtggaaaatatttccttgtgccgatttatacttggcaagtagcgaaagggattttgccgaataaggcggttattcaaggtaaagatgaaagcgaatgggaagaaatggatgaaaatgctgtttttcagttttcaatgcataaaaatgatttaattaaagttaaaacgaaaaaaggggaaatttttggttactttaatggtttagatcgtgctactggcagtattgagattgaagaacacgatttagaaaaatcaaaaggaaaaaatggctctcatcgtggtttaggtgtaaaaaccgcttttttccttgaaaaataccaagtcgatgaactcggtaaaaatatccgtccttgtcgtccaacaaaacgacaacacgtgcgttaaatcagtccctacactctcacgagtgtggggatttttttgtattaaggagaatctatgacgtggcgtagtattttaatgagcaagggcggcaaactttcgttgcaacaaaatcaaatgttgattcagcaagaaggaaatgaatttaccgtaccgttagaagatattgcgattgtggtggtggaaagtcgggaaacagtgattaccattccgttgttgtccgcctttggtttgcatggcgttacctttttgacttgtgatgaacaatttttaccctgcggacaatggttgccgtttaatcaatatcatcgccagctcaaaacgctcaaattgcagttggaagccagtctgccgcagaaaaaacaactgtggcaagcgattgtgcaacagaaaattcgtaatcaagctggtgtgctaaaaatttgcaaatttcaagcagaatccgaccgcttgttgaagatggcggagaaagtgaaatcgggcgataaagagaatttagaagcacaaagtgcagtcatttatttccaaactttatttggcaaaggttttaagcgtagcgaagatgaaagtgcggttaatagtgccttaaattatggctatacggtaatgcgttcggcggtggctcgggcgttggtgctgtatggttggttgccgcaaatcggtttatttcaccgtagcgaactcaatgcctttaaccttgccgatgattttattgagccattccgtccgttggtggatttattggtggtgcaactggaaaatgaagacaagctctcggctaatttgtcgccgattttaaagcaacgattgattaaggtgttgaattatcagctgttatttaaacaagaaaaagtgaatgctttaacggcgattgagcgaagcgttggctcctttcaaacggcattaagccaacgcaatgccgatttgctaaaactgcctgaaattataccacttgcggagcatcaatatgagtgagaatgtgtttatgcgtatgattgtgttatttgatttacctgttaccaccaaagccaaaatgcgagcggcaaaccaatttcgccaatttttgctgaaagatggctaccaaatgctgcaactttccatctacagtcgtattattcgggggcgagattcaatggaaaagcaccataaaagattagtagaacatttgccggaagaaggttcgattcgttgtatttccatcacggaaaaacaattcgccaatatggaaatcctggtcggcgagaaaaaattgcaagaaaaaaaagtcaatgccaaccaacttttgctgttttaaaccgtattttttaagtaataaaaaagccttgaaacgttatatttcaaggcttttcagcgtcccaattatagcactgcgaaatgaaaaagggagctacaacgatggattagttccgtcggggctttttattattatagcactgcgaaatgaaaaagggagctacaacgctagaaagctcgacatccttaaaaagcctattatagcactgcgaaatgaaaaagggagctacaactcgttctgttattcaggcgttcgctaacggattatagcactgcgaaatgaaaaagggagctacaacgattaaggatgggcttaatcgcaccgtgcaattatagcactgcgaaatgaaaaagggagctacaacaaacaactgtaccagttgaattacgttgagattatagcactgcgaaatgaaaaagggagctacaactccatattgctccttatttatgcaaccattattatagcactgcgaaatgaaaaagggagctacaactactgggtcgtattttgagccattccacagattggaactctgcgttcttaaattaaactaattgcagtataaagtgcggtcaaattttccgttatttttccgttaaataattcaacaccacctgatgatgttcgcctgttttgaatttggtgaacacttgttcaatcttgccgttttcgtcgattaaaaaacttatgcggtggataccgtcgtagacttttcccatgaatttcttttcgccccagacgccgaattgctcggcaacttggtgatcttcgtcggataataaggtgaaattcaacgcttgcttttcttcaaattgcgccagttttttcggcgaatccgggctgatgcctaaaatgatgacacctgatttatctagttccgctttggcgtcgcgcagtccgcaggcctgtatggtgcagccgggggtgagcgctttcgggtagaaataaatcagcacttttttgccctgaaaatccgttagggaaaccggttcgttgtgttgattcggtaaggtaaagtgcggtgcgttttcgccgggttttaaggtgttcattcgaaatttcctcgttaaaatagatttaacagtattctaacaagcattgcgcttttgtgatacaatcgcgggacatttaatttagctgaaaaaatcatgtccagacagaaaaaatcccgtcgtttaaccgatgttatgccgacgcgtaaagccgataaaaaaactgaaatcggggcggttaaggcgcgtcccggcaagaaattaacccgttatgaattggatgccagagcacgcgaggaaaaacgcaagcgcaagcataaaggcttggattccggttcgcgccacagcgcctcttcggatagcggtaaaaatcaacaaacggaagtaaaagatccgcgtatcggcagccgtaaaaaagtgccgctggtggtagaatttgtgaataagccggaaaaaggacaatttattcaaccgataaaaaccgagaaaaaaccgaccgcgcttgatcccgcgacggagctggaacagctggaaaataacgaatgtctgaacgatttgctggatcaactggatgccggtaaagtcctcagtaaagaagatcaggtttttgtggacgaatgcttagcccgcattgcgcaactgatggatgaattgggcatcagcgacgatgaagagggcgaagacgatttgctgcgtacttttgaaaaaatcgatattaatcaattccgttaatttatgatgactaccgtattatttgtaatcggcgttgcagttatgctggcaatggcggcttattccgtttatctgttggcgcaattacacaaacagcaacggctgtaccaacaagcccggcaggcgcgcgtggcacgattaaaagaaagcatccggattattgcccgcgccatgcagtcgggcgaatgtaatcattcggaaggcgtaattcggttgaaaatgctgctggaccccctcgggcagaaaaccttgacagaatatgccgccatgtggcggctttatgaaacggtacgtgatatgccgactcatgacgagcggagagccttaaagaaaaacgagcgcatgaggttggatctcgaacgcgaagcgaaagaaatcgagttggaggcggcaattaaagccgaagcgaaactgctgttaagcgaattgccgtagacttgcccgagacgtaacaatctactctgtaaccataaatttaacctgacgatatgaccgatattacttttgatctcgccctgattcaaaaatacaatcaatccgggcctcgttatacgagttatcctacggcgctggaatttaacgaaaattacagcgaaaacgattttgaaacggcagcggcgcgctatcccgaccgtccgttgtccttgtatgtgcatattccgttttgtcataagctttgctatttctgcgggtgcaataaagtgattacccgtcaccagcataaggcggatatttatctggatttcctcgaaaaagaaataaccaaccgcgcgcctttattcaaaaaccgtaccgccacccaaattcactgggggggcggcacgccgacttatttgagcgaagcgcaatccgcccgtttgatggatatgctgaaatctaattttaacattgcggagaacgccgagatttccattgaaatggatccgcgcgaaatcgaattatccatgttggagcacttacgcaatatcggttttaaccgtatcagcatgggcgtacaggatttcaacaaagaagtacaaaaagccgtcaaccgcgagcaagatgaagactttattcgcgccttactggtacgcgcgcgcgaactgggttttcaatcgactaatctggatttaatttacggtttgccgttccaaacggtggaaagcttcatgtttaccttacaaaaagtgattgaattgaatcccgatcgcctgagcgtattcaactacgctcacctgccgagccgtttcgcgggacaagtgaaaatcaaagacaaagatttgccgtcgccggaaaccaaactcagtattttgcaaaataccatcgaaaccttagctgccgccggttataaatttatcggtatggatcacttcgccaaaccggacgatgagctggcaatcgcgcaacaaaacggcgttctgcatcgaaattttcaggggtacaccacgcaggaagaatgcgatttattgggattaggcgtttcggctatcagcctgttgggcgacagttatgcgcaaaaccaaaaagaactgaaacaatattacgccgatgtggatgaaaagggtattgcgttacacaaaggactgacgttaacggaagaggattgcctgcgccgggatgtgattaaagctttaatttgcaattttaaattggattatgccgctatcgaacagcaatatcacattgatttcaatacgcattttgccgaggacttagcattgctgaagccgttggcggaagacggtttggcggatattcggcctaacggcattacggtgtcctcaaaggggcgtttgttgatccgaaacatctgtctgtgcttcgatacgtactcacgccaacaggctcgccggcaacagttctcgcgtattatttaatgtgtaaccctaaagtgcggtcaaaaacgaaagcgttttcgaccgcacttttattctctgtttattttattataaaaacttcgtcagtagcgtttcgaataacacataaaaaccgagtaaatccgttttcgccagcgatttgaaagggagcaggacgtaatagagaatacgatgctttttcaccaaagataaggcgtaatgccatacacggctgtcttcgtaatggatgaaggtattgatggtacgctgaatctgagcgggggtggttcgttcccggcatacgccgtaaataaacagtagggcgtcacgcgttttttgctgcgccagtttacgggaacgggaagccacttcgaaatcgataaaggatgctttgccgttttgccacaaaatatcctttaataacggacgtccgtgcacaatattgcgagcatgtaaattagccagtgtttttgcgcagtcgtccagaatccgttgcttttgttcgtctgtaatatcgctttccaaccaagagcgtacggtacgtccggcatcctccattaccaaacaacgggaattgataattttcaccggtggaatcggcgctttctggaaaatcagcaattttatgcgttgaatttcccgtttaaatgcggcacgggaaaacggcttgagcaaacgttgaatgcctttaggatgttccggctgtttcagccagtaagattttccttcgaattgaaaggaataaacccgttccatgcgatgttctgcctgtaaagtttcaacataatccgctaatgtcacgtttttctcctgtaattatcggaagaatactttaccatataaataaaaagagcgggataacccgctcggattagtaagacggcttttccgttaaatattcagcatcgccgcgtcatcaataaaatattggttcatttcaaacgccggtttggaatcgtgatctttgccgataatccgcgccggtacgccggctgccgtagcatgttctggcaccggttgtaacaccacggaattagcgccgattttggcatatttgcctacttctatattacccagaatcttcgcaccggcgccgatcatcacgccttcgcggattttcggatgacgatcaccgcattctttaccggtaccgcccaacgtcacgccctgcaggatagaaacgtcgttttcgatgactgcggtttctcctactacgataccggtggcgtggtcgaacataatgccgcagccgatacgcgccgccgggtgaatatccacatcaaaagctacggaaatctgattttgcagataaatcgccagagaacgacggttttcctgccataaatagtgggtaattcggtaactttgcaacgcgtgaaatcctttcaggtacagcaacggcgtcgaccataaatctaccgccgggtcgcgctggcgtaccgcggtaatatcgcaggcggcactttcgataatgctgggtttggctgcataggcgtcttcgataatttcgcgtaatgtgatggcaggcatggttgtcgtcgccagtttgttcgccagaatataactcagtgcgccgcctaaatgcttatgctttaaaatggtcgaatggaaaaagcttgccagcataggttctttattcaccagacactgcgcctctttccggatttgtttccaaactttaattgccatttcggttccttaatattcgtcttttcgttcgcgctgtaaaagtgcggtcgccatttcctgcggatttttaccatggaacaatgcggcgtaaatctgttctgtgatcggcatttccaccccctgacgctgcgctaatgccatggtttctttagtattgtagaaaccttccactatctgtccgatttgttccatcgccgcctgagcggaaactccctgtcccagcatcataccgaaacggcggttgcgcgattgattatcggtacaagtaagcaccaagtcgcctaagccggacatgccggtgaatgttttcagattcgcccccaatgatacgcctaaacgactgatttccgccagtccccgggtaatcagcgcagtacgtgcgttggcgccgaatcccagaccgtccgacatacctgccgcaatggcgatgacgttttttatcgctccgcccagttgtacgccgatcatgtcccgattgaggtatacccgaaagtgtttactgcaatgaatgcgcgtctgaaactcccgggcgaaccgttcgtcgtttgccgctaaagcgattgcggtcggcataccggcggctaattctttggcaaaagtcggaccggataacaccgccaacgggtatgccttgcccagctcgtcttccaccacggattgcaacaagcgtccgctgtttcgttccaatcctttggttgcccatgcgatgcggctgtccggacgcaagaacggtttaatccgatgaatgacttcgccgaaagcgtgactgggcaccacaatcaacaaatctttcgattttttgaccgcacttgctaaatccgcttcaatggttagagagtcgggaaaggcaatatccggcagaaaacggcgattctgccgttcttgctgcaaatgctgacattcctcgcggttatgtccccataatgtggtagggtaaccgttgcgggaaaagcagatcgccaatgccgtaccgtaagaaccggcacccagaatagtgatcggagattgatttaccatatttccacctaaagaaaagcccacgccgaaaacgtgagcattgccgatatccggaacaattaattgagggtcggctgttcctccggcgcagattcttcttctacgcgacgcatatgttcaaggaaaagcgcatcgaaattaaccggggctaaattcagcggcgggaatgtaccgcgattgaccaaactcgccactaactcgcgggcataaggaaacagcatattcgggcactgcgaggttaacgcatgggttaactggatatcggttaaaccgccgatagtgaatacgccggcttgtttcacttcacagataaaggcggcgtcgccgctgtcttcaagtgttgtttccaccgatacgtttaatgttacctcgaataaattctcgcctaattgtttggcttccgtccccaaatcgaagtttaaattcggtttccattcctgttgaaaaatatcaggcagattcggtgcttcaaatgacacatcttttacataaatgcgttgaatttgtaatacgggttcttgagcttgttccgccggtgcggcttgattttcatctgtcatgttgaagtccttattttactaacggtaaattttcggcattccaaccagcaatgccttcttgtaatacgtaaacgtgattaaagccctgtttggctagaatttcacctgaagagcgggcggtgatgccgctggcacagactaaaatgaccggcacgtctttgtgttgttccagtttccccaggttgtggtttttaatatccgaagggacgaattctttgctgttcacaatgtgtccgcgtttgaattcttcgatggtacgtaaatcgatcactacggcgttttggttgtttatcaatgcgaccgcttcggcattggacaccaatttcactttactggtgatcgctttgaaatttacgtagataaaggcaataaaaattgcaacccagccgacgaccattaacgtatgatttttaataaaaggcgtagccagcgttaaaaattcttccatgttgttctcaatagattaatgataaaaaagaggagttaagtataaccgcagtgagcggattttcaaaggctgaaaggaaaagtgcggtcaaaaaacgaaagaattttgcccgcacttgaattatttgtccaacagacggatatggcgggtagcggaaatccaagcggaggcgtaaccgacaatggaacaaatcactaacaaaaacagcatttcgccgaaatccaagccgccgagattaaaactgacggcaaaaatatccgtcacatatttcactgcactggtgaaatatccgatgagtaaggcgctgaaaaaacaggcgaaaaacgcaccgaaaaagccgtaaataatgccggtatacaaaaacggacgcaaaataaactgatccgtcgcccccagtaatttcattacctgaatatccgcctgactactgtatacgtcggaacgaatgctgttaccgataaccagaaataccgccagcgtcatcaataccgcacagaaaatggcgacatgggctatcagccaagtgatcgcggtgagtttttccagccaatcgttatccatacgtacttcttccacccctttgattttagcgagattttcccgtagttcctgacgtttttccgaggctttgaattcctccgtcggtttaatcattactacggccggtaacggattatcatccagaatatctaattcttcaccgaagccggaccatgcgcggaaatctttcagactttcctggcgggacacgtagttcaaactttctacgccctcctgtgatcggactttttccactacgccgttagcatcgtcctcattgagatttttgtgtaaatacaccgtcaactcgctgtccggggaaaatcgggtaatggcgttatgggtatttttccacagtaaaaaactgacggtcggaatggttaacgacacggcaatcaccaagacggttagcagcgtgccgtattttttcttgattaaatccgcccggacgtaggctaaaacatatttcatttgcacccaaaatggagctttttgtgttgaactcatagtaaatttctccgattttaacgcaaacggccctgttccagaacaaggcagggattcggtttttggttgattagaccgacatcatgtgtagcaatcaacacggtcatgcccatgcggttgaggtcttcgaacagattaaataaatccagagataatgcattgtcgagattacccgtcggttcatctgccagtagtaattgcggtttatgtaccacggcacgggcgatatccacccgttgttgctcaccgccggataaatggaccggcaaatgattggcgcgttcgtacaatcctacgcgatctaaagaagatagtgcgcgttcacgtgcggttttcgggtgcatgccgctgataattaacggtaatgctacgttatccgctacgga

SEQ ID NO: 3169 - DNA, 23183 bp, synthetic construct
  misc_feature 1..23183: note = Synthetic
  source 1..23183: mol_type = other DNA
ctttattcacttgccgttttcggtttgcgtccgcgtgtggatttaactggcgcagcagatgccacggtggttgtggttgtgccgacttttttcgcgctgtttgaaccgccgccacgcatttcatcaaaaaagtcgtggttgtttttggtttttttgattttgtccaacaagaattcagccgcttccacgtcgtccattgggtgcaacacacggcgcaacacccatattctttgcaactggtcgcttggcacgagcaattcttcgcggcgcgtacccgatttgttgatgttaatcgctgggaacacgcgtttttcagccaaacggcgttccaagttcaattccatattgcctgtgcctttgaattcttcaaaaatcacatcgtccatacggctgcctgtgtccaccaaagcggtggcgataatcgtgagcgaaccaccttcttcggtgtttcgcgctgcgccaaaaaagcgtttggggcgatgcagcgcattggcatcgacaccaccagtcaaaaccttgcccgaagtcggcacaaccgtattatacgcacgcgccaagcgtgtgatgctatccaacaaaatcaccacgtcttttttgtgttccaccatgcgtttggctttttcgatgaccatttctgccacttgcacatggcgttgtgcgggttcgtcaaaggtggaagccaccacttcgccacgcacgctgcgtgtcatttcggttacttcttctgggcgttcgtcaatcagcaatacaatcaattccacatcgggattgttggcggtaatggcgtgggcgatgttttgcagcatcacggttttgcccgatttgggtggcgcaaccaacaaagcgcgttgccccaaaccaatcggcgaaatcaaatcaatgatgcgccctgtgatgttttctgccgacaaatcattttcgcgctccaatttgagctgtttggttgggaacagcggcgttaagttttcaaacaaaattttgtggcgactgctttcgggattgttgctgtttacgctgtccacgcgcaccaaagcgaagtatttttcgtcatttttggggacgcgcaccgtgccttcaatcgtgtcgcctgtgtgcaaattgaagcggcgaatttggttgggcgaaacgtaaatatcatcagggcaagccaaatacgatgtggcagcggaacgcaaaaagccatagccatcgggcaaggtttctagcgtgccagaacagatgaattcttgtccgtctttcatcaactcgcgcacaatagtaaacacaaggtcttgcttgcgtaggcggttggcgttttcaatacccatttgttcggcttgtgccaacagttcggtaatgtgtttggtttgtaattcagaaacgtgcataaagataatttttcagataaaaagcagcctacactttttgtgtgatgcaaatacgcggtgcattgggctgggttggaataatcaaaataaatatatagtgagataaatcggaaagttgtgcctgatttggcagagaacgtaaagtggcggattataagaataagtcgcaaaataagtcaagaaagcgtaaatgtgcaggctgctttttttgcttattcggtttatgatgccattttcagactttatcaaacagcacaatatgtcagaactaaaccacattttgcaacacaatcaatcgtttgtagacagcggcgcatacgaacactttttaaccaacaaatacccagagcgcaaattggcaattttgtcgtgcatggacacgcgcatggtggagcttttgcctgccgcgctgggtttgcgtaacggcgatgtcaagctcatcaaaaatgcaggcgcggtggtgacgcacccttggggttcggtgatgcgttcgctgttggtggcggtgctggaattgcgcgtagaagaaatcatggttatcgcgcattacgactgcggtatgcgcggactgaatgcccaagcctttcttgccaaagccgaagagcaaggcgttcccgaagaccgcatcaccacgctgcgccacgcaggcattgatttggacaactggctcacaggttttgatagcgtggaagacagcgtgcgccacacggttagcctgattcgcaaacacccgttgatgcctgccaatattgctgttcatgggctggtgattcaccctgttacaggcaaattgacggttgtggttcatggtgatgaaagttgcgcgatttagcataaaaagcagcctgcactttttacaaattgaaagtgcaggctgcttttatattatttgattattcccactcaatcgttgcaggcggtttaccgctcacatcataaactacgcggttaatccctttgatttcattgataatacggttcgacactttaccgagcaacgaataaggcaattccgcccaatgcgccgtcataaaatcactggtaatcaccgcacgcaatgccaccacataatcataagtgcgtccatcgcccatcacgcccaccgatttcacaggcaaaaacaccgcaaacgcttgacttgtcaaatcataccaagatttgcccgactgctcgtcaatcgtgttgcgcaattcttcaatgaaaatatcatcggcacggcgcaacaaatccgcgtattcgcgtttcacttcgcccaaaatccgcacgcccaaaccagggccggggaatgggtggcgatacaccatttcacgcggtaaacccaacgccacacccaattcgcgcacttcatctttaaacaaatcgcgcaacggttcaagcaatttcaatttcatgttttcaggcagccctcccacattgtggtgcgatttaatcgcgtgggcttttttcgttttcgcaccagccgattcaatcacatcagggtaaatcgtgccttgcgccaaccatttcgcgttggttaattttttctcttccgcgtcaaagacttcaataaattctgcgccgatgattttgcgtttttgttcagggtcggtaacaccagccaatttgcccataaattgctcagtcgcgtcaatgtgaaccactttcacgcccaaattacgcgcaaacatatccatcacatttttgccttcattcaaacgcagcaagccatggtccacaaacacacaggttaattggtcgccaatcgcacgatgaatcaacgccgccgccacagaagaatccacgccgcctgacaagcccaaaattacttcttcattgccgacttgttcacggattttcacaatcgcttcttcgatgtaattcggcatcgtccagctcggtttcgcgctgcaaatatccaaaacaaaacgatttaacaaagccttaccttgtttcgtgtgggtaacttcggggtggaattgaatgccgtagaattgtttttccgcgtgttccatcatcgcaatcgggcaagacggcgtgtcgccaattacggcgaaacccattggcaatttagacactttgtcgccatgactcatccacacgtccaacacgtttggcgtgccgtcatgaatatcgcgcgtgagttcgcaatcaatcgttttcacttgcgcgtaaccaaattcgcgctgattgcccgccgacacttcgcctcccaaatggtgcgccataaattgcataccgtagcaaatgcccagcacaggcacgcccaaatcaaacaaacccacgtccgcttgataatccgattcgtacaccgaattaggaccgccagataaaataataccctttggattgaatgccttaatttcgtccaaaggcatatcaaaagaatgaagttcgcagtaaacgtgcgcttcacgaacacgacgcgcaatcagttgggtaacttgcgagccgaaatctaaaatcagaattttgtcttggtttgtcataagtattgatattggtcaaaagtcaagtgaaaaaaacggttattccagcatttcctagaatacagcgactcaaaagcgtggtaattttaacacacttttcttcctaaaaagtacttggtattaatactcaaaattaaagataatacctttcattataaacatagttttttgattattcgatagaatgtacactccaaataaaataaaaattgatatttttcctttccaatcatgattttcctaatcagaaagactaattttgcatctgaaatgcagctttactattttttttgagagatttataattcgaaccagtttctaggcagcaaaacaagtcagtaacaaaaggctggcaagtgggaacctggtaaccgtttggaaatacctatttcttggttttacgagtcaccagttttgactcaaaagtattttttgttatttttaggagcttttagaatgaattacgataaaaccgtatcagaaatgttgaacgttgatggtgctttggctgctgctgtagtagactactcaagtggtatgttgttggcaggcggtggttctgctgcaatcgatttggaaatcgctgctgctggtaacaccgaagtgatgcgtgcaaaaatgaaaactatgggcatgttaggtttgaaagacaatatcgaagacatcttgattactttgggtaaacaataccacttgttgcgcccattggctaaacacgatggcttgttcttgtactctgtgttggatcgttctaaatctaacttggctttggctcgtcgttctttggttgatgctgaaaacaatttgaactaatcactcaacttaatcttaaccgcgctgggttttttaatctggcgcggtttttgtttcactatatatttacacaataatcgcatcaacttgtgccgcgcaagccaatgcccacaaggtttgcttgtccatgtggcgatgtgcaagctggctaatgtttgccaacacaggcaaatggctcaattttttggcggcgactagcgcatcaacgtccaatctcaacggctcgccatgcaaactcaatgtgcctgcatcacccaaaataacgtgttgattgccgcgcaacacgatttgttctgccgccaccaaccaatcgcgaactcgatgatggttgtctttgcacacaatagttgggatatttaggctgccgacttcttgcaacaagctgcggttggcaagcaattcgccgcccaaatacagaatatcggcttggacggataaggcgacttccaagtgtgcgctgtctcgaatccgcatgacgatgattttgttattttgccgacagatttggctgatgtcgtgtagcgtttgcgtggtgttttccagcgaaaagcagcctgcacgcgcacaaggattagctggcgtgtaaaaagggtcaaacaaagcggcatcgctgtcggcatttaggtgcaggctgcttgcgtctgtttgcgcgattgcttgaattttgcgtatgccagaatgtccgcccaatgccatgccgcgcacggtgatttgtgtgtcttgcgcccatgcttcgcggctgatgatacgccaatcttgcacaatgcgaatggcgcgttctacttgtggcaaggcttcgatttgagcgatgtcaaacacgcgctcatcccccactgcaccgataatggtgcattctttgccgcgcgaaatgtgttcgctcagcccttgttgacgaatggtttgcacgactctttgcacgtcttcgtcttgcgcggtggcttgcatcacaataatcatgttgatttctttctgcttaaaaaaatggacggatacgaaatccgcccaaaaatggagtgcttactgttgattaaaatgggatataggtagttggattgactgctttgccgtctgaacggacttcgaataacaatttattgctgcctaaggttgccactggctgaccgcgcaccactttttgaccattttgtaccaaggctgatgcaatctgtgcataagcggtcaaatgctggtcggagtgctgaacaataagcagattgccataattacgcaatgcaccaatatgaatcacttgaccatcggctgcggctacggcatttgcgcctttgccatcaatcaacataccgcgatttgtgccaaattcctgcgtaacgctaccgtttggcaaaggactttgccacacaatgccgtctttggtttgtgtacgaacactggcaacgacaggcgtaggcgtagcgacaactgctggggttgtagcggttgttgtcgcggctgctgtgttagtggtagtgactgcggcaggtgcaggctgcttggctggtacataaggcgcggcagcagcggttgtagcagtgcttgttgctctacccgattggcttacgcgcaacacttgtcccaactgaatattgttgccgttcaggttattccattggcgcagttgttcttggctgatgccgtagcgtttggaaatattgtaaaccgtgtcgcctgcaaccactttatgttgcgaacctgtgccagttttagctgctgttacaggtgcagcatttgtacggctgctgctaccaactggctttacccgcaaagtttgtccaatagaaagggttgtaccagacaagttgttccattgcattaactgctcttggctgatgccatagcgtttggaaatgttgtaaaccgtgtcgcctgcttgaactcggtgcgtgctggcatttttgtccacaggtgaatagttggggataaatgtgctgcctgttgatgcagttggcgtgtacgcagtgccagtcgctggggtataaggtgcagcagttggggttgtggttgctgctggggtatacggtgtagcagacggagttgtggttgctgctgaggcataaggtgctgtattgtaaggattattagccgtatcggttggcgaaccagtagtgccataaggtgtattgactgtgccgtatggtgtggtaaccgtgccattgtcgtagccatagccgcctgtatttgtgccagatacgactggtgcaggtgcttgttgtgcagaactacacgccgacaaaattgcagcggcaactaaactcaataataaacaagctgtttttttgttcgtgttcatgatatttcgctttcttaaatcatcattcaaagtgcaggctgctttgcgctgcaatcggctgaatcataccgttttatcggcatcacgacaatgctttacgggcattcttgcaggcgaaaatcttgccaagcagcctgcaatttgtctatttgattatgcgcggtcaaatccatttgcaaaggcgtgatgctaatccaacctgcatcgcacgcggcaaaatcggtgtcggcttgattatcgcgtacttcgcctgctgggcctatccaataaatcggtgcgccgcgtgggtcggtggattcaattacgttttgttcgtggtggcgcaaacccagtcgcgttactttaatgccacacaaatcttgtaccgctacggctggaatgttcacgttccacaacacgggcgatgtgggcggctgctgcataatgtgcgacaacacgctccacacagctttttctaccgtttcggtaaacaaatcaaagcgatgtgaattgagcgaaaacgctacggctggaatgcccattaaatacgcttcggtggcggcggcaactgtgcctgaatacacggtgtcatcgcccatattcgcgccgtggttcacgcccgatagcaccaaatctggtttaaaatccgactgtgccaaaacgtgcataccaacgtgaatgcagtcggtgggcgtgccgtttacaaattgaaagccgttgctggcggtgcggattcgcaacggtttgtctagtgtgagcgaattgcttgtgccacttttatcgcgctctggggcaaccacgcgcacattggcaaattcgccagccagtcgcgccaacagggcaatgccttgtgataagtaaccgtcatcattggaaatgagaatattcattgcaggctgcttttttgtgtgttgaacataagggtggcattgtagcggaatattggattttctgcgaaaccattgaatcactgcaaatctattccctctcctttgggagagggaactgggttgctgaacatgacataacctacgagcatcatcatgaccctaaatctccctgtttacgcatggaacgtgtcacctacttggtcgcaagtcgtgcaatttgaacaacacaatccacacgaaaaacatgtggtttggtgcgtgttgcctgattccgttccgcactacgaattgacatcgccccaaaatgaatacgaaagcagcctgcacttggcgatacaaaacgcgctatcgtgtgcgaccacgcaagcggtgcattgcgttccgaatgcttggcagaacacacatttgtggttgataccgcagtcccaagcaagcagccttcacgcgcatttttctgtgccgattcaatggcaaaccgaagcgattgcacctgcgcccgaagtcgcgccaaaagcatggcaaacgccacccgccgccgattatctcgacccaagcagcctgcacattttgattattggcgcaggcattgcaggcgcggcaacggcgtatgaatgcgcgattcgtggcgcaaaagtaaccgtgttggaagcgcaatcgcaagtggcgcaggcaggcagcggcaaccgtcagggcttgttgtatgccaaaatttcgccccacgccaccgagcaaaccgaattgctgttgtcgggttatggctacacgcgccacttgctgcggcagttgttacccgaacaagccacttggcaagcgtgtggcgtgttgcatttgaatcacaacgccaaagaagccgaacgcaaccgcaaattggcgcaacaaacgcaacacgcgcatttgtatcgtgctgtgtcggcgcagcaggcgagcgagttggcaggcatttgcattgagcaggacggtttattttggcaacaaggtgcgtggctgaatcctgcatcgttggtgcaaaaactgttgtcgcacccgaatattacgttgcacaccaaccagcgtttgattcaggcggactacgatgacgcgatgtggcacgttcgcagcaacacgcacacttggcagggcagtcatttggtgttttgcacaggcgcaagcagcctgcacacaccgattgcgcagactttgccgttgcagattattcgcggtcaaaccagtttggttgcagcaaacaaaagcagcctgcaactcaaaatcgccttatcgggcgcgagttacatttcgccagcgtggcaaggcgaacattgttttggggcgacttttgcgccaaattgcgcggacgatacttggcaaagcgcggacgaacagcacaaccgaaatgaattggctcaactaaataacacgctgtatcaatcgtttagcacattatggaacgaaccaagcagcctgcacgaatcatcgcacggtcatgcggcgttgcgttgcgattgtcatgaccatttgcctgccgttggcgcgttgggcgatgccgatgccatgcgccgtgtctatgcccaatacgcgctggacaaaaattaccgcatcaacacgccgtgtccctatttaccgaatgcctacatcaacaccgcgcacggttcgcgtggcttggcaaccgcgcctttgtgtgctgccaacatcgccgcgcaaattatgaacacgcccagattattgtcgctacgattgcgccacgcgctcaatccaaatcgcttgattattaaagaattggtgcatgggaaggtgggtgcgaaatcgcaataaaaagtgcaggctgcttttcgtgttactgaaaaagcagcctgcactattcatcacaaaacgatgcccgctaaaaaccgaaatttttaggaggcagagcgttacgaatttcttttcagaacttcttattgtagcaacgtttctcatttcgcaatgcaacaatagcaagaatcatacaacacaatgatttcactgtcaatctaatcatttcatgttacaaaaatatttttgtttacgattgccagagtagccatttttctttatattttgtccttggcagcgaggacaaattaaagttatttctgttttcacacactcaaatatactctgttttcgctgcttttttattgcttattttttacagcacacttttcaggacaccaccaaatattttttaaacaggggtaatacatcatggctgcaaaatcattaaattacattttgggtttggatttggggattgcgtcttgcggttgggcggttgtggaaatggacgaacaagaaaatccacttcgtttgattgatgtgggcgtgcggacgtttgaagaagccgaaaaccccaaagacggttcatcgttggcggaaacgcgccgattggctcgcgctcaacgccgtttaatcagtcgccgcgctaatcgcatgaacaaattgtgccgtttattgaaacaagaaaatgttttgcaagccaatgattatgatgaaaaaggtttaatcatcggtttacccaatcaggcgtgggaacttcgcgcacaaggtttggacagaaaacttgaacccaaagaatgggcagcggtgttgattcatttggttaaacatcgcggctatttgtcgcagcgcaaaaacgaaagccaaacggcggataaagaattgggcgcgttgctgtcgggcatgaatcacaatcatcaattattacaatctcaatctaatcaatatcgtacgccagcagaattggcgattaaacaatttgccacgcaagacggacacattcgcaatcaacgtggcgcgtacacgcacacatttaatcgtttggatttgcaaaatgagttaaatcaattatttgacgcgcaaacacgtttgggcaatccgcacgtttcaggcagcctgaaaaccgcgattaatgatttattgatgaaccaaaaagctgctttatcgggcgatgcgattctggaaatgttggggcgttgcacgtttgaaccgagcgaatacaaagccgcaaaaaatacatacagcgcagagcgttttgtgtggctggggaaattgacgaatttgcgtattcaagacaatggcttggaatctgctttatcgcgtgaacagcgtgaattgttattgaacgagccatacaacaaaacaaaattgacctatcaacaagttcgtaaattgttaaggctgcctgaaaccgcatttttcaaaggtttgcgttatggaaaagacaatgccgaatctgccactttcatggaaatgaaatcgtatcacgccattagaaaatctttggaaaacaaatcgttgaaatcagaatgggaaaagctgaaaacgcagcctaaactattagatttaatcggtacggcattttccatttacaaaaccgatgatgagattgcaggctgcctgaaaaatcaattacccgaaaatgtgataattgccttgcaagggcagttaaatttcagcaattttatggaattgtcgttaaaagcgttggaaaaattgttgccgttaatggaacaaggtttgcgctacgatgaagcgtgtacgcaaatttacggtaatcgtcacgaaaaaattgccgataaaaccgaaaaattcttgccgaatattcctgccgataaactgcgaaatcctgttgtattgcggacgctcacgcaagcgcgaaaagtgattaacgcgattattcgccgatacggttcgccagcgcgtgtacatattgagacaggacgagaagtcggtaaatcattctctgaccgcgataaattaaaaaaacaacaagaagaaaatcaagaacaacgccgacgcgctattgatgaatggaaacagtttttccccaatgcagcgcatgaacccaaagcggtggatattttgaaattgcgcttatatcaattacagcagggcaaatgtttgtattcaggtttgccaattgatgttcgcaggctgcctgaaaaagggtatgtggaaattgaccacgcgctgccattttcgcggacttgggacgacagtttcaataataaaatcttagtgttggcttcggaaaaccaaaacaaaggcaatcaaacgccatacgaatatttacgtggtgcggacaacagcgagagttggcggttatttgtggaaaatgtgcaaaattgccagttttcgcccaataaaaagcaaaaaatcatggcaaaacagcttgatgaaaaaggttttcttgaacgcaatttgaacgacacgcgctatgtttcgcgctttttgtgtcaatttatcagcgagcatttgcatttaacaggcaaaggcaaaaagcgcgtgtttgccagcaatgggcaaattaccgcgttgttgcgtgggcgttggggtttgagcaaaaatcgtgaagaaaatgaccgtcatcatgcggtagatgcggtggtggtggcgtgtagcacggttgccatgcagcaaaaaatcacgcaatttgtacgttatcaaaaaggcaatgtgttcacaggcgaacgcattgacaaggaaacaggcgaagtgatttcaatccattttccaacgccttgggaacatttccgtgaagaagtgatgattcgtgtatttgatgataatccgctccgaacgctgcctgaaaaattaccaaaccgccccgaagccttgcatgaatacgttatgccgttgtttgtgtcgcgtatgccaacgcgaaaaatgactgggcaaggacacaaagaaaccattaaatctgccaagcgtttagacgagaaaatcagcgttttgcgcgtgccattaacgcagttgaaattgaatgatttggaaaacatggttaatcgtgaacgtgaacctgctttatacgaagccttgaaagcgcgtttggaacaatttaaaaatgaccctgcaaaagcctttgctgaaccattcttcaaacaaggcggacagcaagtcaaagccgtgcgcgtggaaatcgtacaaaaatcaggtatgttgttacgcaaaatcaatggtgtggcggataacggttctatggtgcgcgttgatgtgtttgagaaatcaggaaaattttatcttgtgccaatttatgcgtggcaagtggcagaaggcattttgcctaattatgccgtagtggcacataaagatgaaagcgattggattttaatggacgaaagctatcattttaaatttgctttgtataaaaatgatttgctagaagtgcaaacaaagaaagggggcattatgggttattttgcaagtttagaccgtgcaacaggtgcaattaccattcgtgaacatgaccgtgataagaaaaaatgtaaagatggcgaacatcgaagcattggtgtgaaaatggcttcatcattcaaaaaactgcaagttgatgaattaggtaaaaacattcacgaaacacgtagcagaaaacgcccaaatattggctaaacccaatcccccaaacgatgatttaaagtaatattaaatcatcgtttgggggatttttttcaaggagcataaaaatgagttggcgaagtttgttaatcagcaaaggcggtaaattatctttacacaacaatcaattattgattgcacaacaagacggcagccacaccgtaccattagaagacattgccataattgtggtggaaaaccgcgaaaccgttttgactgcgcccttgctatcggctttggcgcaaaatgggattggtttattgacgtgtgatgagcaatttttgccatgcggtcaatggttgccattcgcgcaatatcatcgcccactcaaaacgctgaatttgcaattaaacgcgactttgccgcagaaaaaacagctttggcaaaaaattgttcgtcaaaaaatcatcaatcaatcgtttgtgttaaatgaaatgggtgcggacaaagccgccgagcgattgttgcattttgccgaaaaagtcaaatcgggcgacagcgacaatcaagaagcgcaagcggcggcttattattttcaggtagcttttggcgatgaattcacgcgccaacaagaaaacagcctgaacgcgcatttaaattatggctacaccattttgcgttcggcggtagcgcgagcgttggtgcaatatggttggttgccagcgttgggattgcatcatcacaacgagcaaaatccgtttaatttagctgatgatgttattgagccgtttcgtcctttggtggatttatgggtgcataccaccacgctttcaggcagcctgcaagatgaattaacgccacacaataagcaaaatttgattcaattattgcattatcaaatgcgttggcgtgggcaaattttcactacattgggcgcgatagaccgttcggtagcgagtttgcaggctgctttgaaagaaaaagatgcacaaaaattgacgctgcctgaattattgtctttaaaagaacataactatgagtgagaaccaatttatgcgaatcatcgtcttttttgatttacccgtaaccagtcgcgccaaacgcaaggcggctaatgattttcgccgttttttggtaaaagacggttacattcggttgcaattatcggtttatacacggattgtacgtgggcgagatatgttggaaaaacaccacaaacggctttgcgcgaatctgccaaaagaaggttcggtacgctgtttggaagtaacggaaaagcaatttgtcgcgatgaaagtgctgcttggcgataaaccaacgcaagaaaaacgggtgaatgcacagcaatttttgctgttttagcgtgattttttgaagtgaaaaaatgcccgaaaccttgaatttatcagggcttcgggcaggggtattgtagcattgcgaaatgagaaagggaactacaacgtaagcataaagcttatcatcaccacgagtattgtagcattgcgaaatgagaaagggaactacaacttattaccgactgcgatcgttttgtttgcaattgtagcattgcgaaatgagaaagggaactacaaccggcgtacacaccatttcatcagctcggtgattgtagcattgcgaaatgagaaagggaactacaactaggtgtcaaggcgcggttaaaatcccttgattgtagcattgcgaaatgagaaagggaactacaactgttctaactgaaacctatccgaaaatttcattgtagcattgcgaaatgagaaagggaactacaactgctgcgagtgtgaaatgagcttgaattccattgtagcattgcgaaatgagaaagggagctacactctcaaactcaattgaattaaataaaaagtgcagactgcttttcgtgttactgaaaaagcagcctgcactttatttacaacgatttacttgccttcttcgctatccaagaagctcttcaatttatccgagcgcgttgggtggcgcaatttacgcaatgctttggcttcaatctgacgaatacgctcgcgcgttacatcaaactgcttgcccacttcttccaacgtgtggtcggtattcatgtcaatgccaaaacgcatacgcagcactttggcttcacgcggcgttaggctttccagaatatcggaagttacttcgcgcaagctcgaatacatggctgcatcggctggcgcaacgttgttcacatcttcaataaaatcgcccaagtgtgaatcatcgtcatcgccaatcggcgtttccatagaaatcggctctttggcgattttcatgattttgcggattttgtcttcgggcatctccatcaattccgccaattttgctgaatcgggttcttcgcccgtttcctgcaaatactgacgcgaaatgcggttcattttgttaattgtttcaatcatatgaacagggatacgaattgtgcgggcttggtcagcaatcgagcgcgtaatcgcttggcgaatccaccaagtcgcataagtcgaaaacttataaccacgacgatattcaaacttatccaccgctttcatcaaaccaatattgccttcctgaatcaaatccaagaattgcaagccgcgattggtgtattttttggcgatagaaatcaccaaacgcaagttcgcttgaatcattttttgcttggcggcagcggtttctttttcgcttttcaccatgtttttgctgatgtcttttagctcggcaatcgaaattcgcgcatgggcttccaacgccgccatttcggtttgtttttccaaaattgcgtgtttgaaacgccccaaagcctcgctccacacgcggtttttggcgacttcttcgtcaatccattccaaataggtggcattgggcataaattgctcaataaagtattctctgtccatgcgaacgcggtctaggcaaatatcgcggatttcgcgttccagcttgcggatttgttctacacgactacgcaagttatcgctcaatttttcgatttgacgcgtagagaagcgcacttccaacaatttttgcgcgatattattgcggtgttccaaatatttggcgtgtttgctgtcgtttttatccagcgcacgaatcatcaagccgtagcttttttcgatttgcttgaaatgctccaacacttcggctttgagctcttccaagttttgttgattgtccatgccgcctgcatcaccactgtcgctgtcgtcgtcttcgtccgactcgtcgctgctgtcatcgctatctgtggcggcatcgttatcgctttgcaggctgctttctaaatgtcccaaacccaattcgttgagcaacacttcgttggggtcgataatcgcttctaccacttcatctacgcggatttcgtcttttttgatttgctcaatcaattccaagatttcgccaaccgaacctgggcaagcggaaatggcttgaatcatgtttttgagtgcgttttcaatctctttggcgattttgatttcgtcttcgcgcgtcaaaagttccacttgacccatttcgcgcatatacatacgcacggggtcggtggtgcgcccgaattcggaatcggcttgcgacaaggcggcttcggcttcggcaaccgcgtcgtcatcagtgatacctgtgctgttgtcgttcatcagcaaggcatcggcatcgggtgcttcttcggttacttgaatgccaaggctttgaatcatattgacaatgccgtcaatttgttcggcatcggacatatcgtctggcagggagtcgttgatttcggcataggtgatgtagccgcgctctttgcccagcataatcaaacggcgcaaacgctcgcgctgttcttcaggcgtgagtggacgtgagtcgtccaatgtgttgtcatcggtatcgttgtcttgaaaatgttgatttgacatgatatttctcgttattgcggataaagtgcaggctgctttgaaatattaatagcgcgttattcagaaatacggttgggatttttcccattcaaaagcagcctgcacttggtgtttaacctgcaatagccatgttttgggctttcaggcaaaaagtaaaacaaaacggtgtggctcccaatataagggcaaatgttgagattgcaatccttatttgcggatttaggggcgcgattatagcaaaaaagcagcctgcacttttatttatcgcatcacaagcgcatcacgccactcacgcctttgacttctgccagcgatgccaacacgcgcggcaattcatctacttttttcacttccagcgtaaagcgcatactggcttccaagtcgcgcgtttgtgtatgcacggcggttacgttcactttgtggcgagccagcgcatcggacacatcgcgcaataagccgttgcggtcttgggcgcggacttcgatgtctatcgcgaacatttgtcctgcgtctatgcctgcccagcttgctgtcatcactttttcgggcgattgcgttgccaagtgttcaaaatcggcacagccttggcgatgaatcgacacgcctttgtcgcgcgttacaaaaccgacaatcaaatcgggcggtgcaggtttgcaacatttggcaagattggtcagcaaaccgccttcgccgcccaccaacacgccatttttgccgcctgattggattttggattttttaacgatgctggtttcgctaatcggcacaggcggcggttcgttgagcacaccagcggctttttgtatggcgtgtggcgacacttcgccctgcccgactgcggtaaacaaatcgtccaaatgtttaaaaccgagcttttcgcacaactgttgatgattgggcttggggttgattttggcaatcgctttatcaaactgatttttgccgtcttcacgaatcgcttcggcgttttgttggcggatataagcgcggattttgctaatcgctttgttggatttgacccagccttcgtgcagccagtttacagacggtacgccttctttggcggcgatgatttctacgcgctgaccgttttccaatggcgtggacaacggcacgatttgtccgtttacttttgcgccgcgacaacggtctcccaaattactatgcaaggcgtaggcaaaatcaatcggcgttgcgcctgctggcaacgacaatactttgccgtgcggtgttaaaacgtaaatggtgtcgttgaacaattcggttttgaacgcggcggctaaatcttctttgccgctttctgccatgttttcgcgccaatctagcaactgacgcagccacgcgattttttgttcgtatgccgaatcacctttgccgccttctttgtatcgccagtgcgctgccacaccaaattcgttgaattcgtgcatttcgtgggtgcggatttgcacttcaatgcctttgtcttctggtccgacaatcacagtgtgcagacttttgtagccgttgcctttggggttggcgatgtaatcatcaaattcgcctgggattggctgccacaggctatgcacaatgccgagcgtggtgtagcactccgacacgctgtttaccaacacgcgcacggcacgaatgtcgtacaagccgtcaaaatccagctttttcttgaccatttttttgtagatggaataaatgtgcttgggacggcctgccacatcgcattgaatgcctgcttggtttacggcggtttgcaggctgcttaaaaattgttcaatgtattccaaacgctcggtgcgtttttcgtccaacaatttggcgatgcgtttgtattcttcggggttgtagtgacgaaagcccaagtcttcaagctgccatttgagttgccatacgcccaaacggttggcaagcggcgcaaaaatatccagcgtttctttggcaagggcgcgtttttgtgggctgtcgggcgtttgcgataaatattgcatagagcgtgttcgcaacgccaatttaattagcaccacgcgaatatcggacaccatggcaagcaacattttccgcatcgtttcggcttgattggcgcgttcttcgggcgtggcaagtgcatctactttggcaaaatgcgtcagtttttgtacttcgtctatgcctgctactagcgtggcaacggcttgtccgcattgctcgctcacttgcgttttccaatcggtgcaataagtggaaatatcggttaaaagcgtggcagcaacggcttcggcaagcaaatccatatcgcgcaccatcaaagcagcctgcaataaatgttgcaacaaaggttcgtgcgccgatgtggttacggcatcgtctggataatgggtttgcgccaattttaaagcagcctgcaatagtttttgttcgggtgcaggctggttgttggcatagtccaaataatcttgcaaatgggctgggttcattttggcttccttttttatgcaacaacgagaacagtaaagtttgcgattatacaaagtattgttttattttgtgctacaaaagttcacacagccaacaaaaatagttagaatccaaatatgtggatatttaacatttcttggcattaacttaacaatcgaagattcgactgtccgccttaattgatgacttgatacactaggagtaacaactatgcgtttgacacattctgcactcgcacttgcattggctttttcttttggcaactttgctcacgccaacacgctggcatgtagcaacagttatggttttcgcgttgatgtgtcgggcaatactggcgcaacagtctgctccaatacttctagcgatttgattgatttggttaaagatttctctctatccaatagcggctacacgcaatcttctgctgcctttgccgttggacgaattaacgatgtggactttaccgcgtcgtatgccgccaattcgaacgatttggtttttaatgcaccagacttgggcattgaaaacaaagtgttcactggtgcaacccgtaaaaaagcccaagatgcttttgaagattgggtcaaacacagtggcattattggcgacatgatgcgctaccaatctaaacattctgccgccagccccatcacaggtgcagcagggattatgcccactatggcagccaccgatttcaatactgaaattcaatcggttagcaatattgccaccacgccgtctagcagcacagacaacaaagaaagcaccaccaatgccgatgccactcctatcaacaatctcatcggaacaggtgtgagcattggttcgttctccaacaatggcgagcgcatcaattcttataccctgccgttgtcgtattcgattggaacgggcgacgattcgcgtcagcagcttattattagcgtgcctttaaccatgtacaccattggtaaagcgaaaggttatcatgcgggtgttggtatcgcacatcgcttccccattacccaaaattggacgctgacacctggtgttcgttatgccctaacaggctcagttgaccgcgcaacgattgcatcggtaaccagtgccagcctaaccagtacctatcatattccttttgagcagtttgatttgaatatcgccaatatgattggccactaccgcacaggcaaattcaaagcaggcgattattcatttgacccaaatatcaaacaaacgatgttacgcaatggtgtgatgctatcccaaccgattacgctgggaagccaacaattagccattgaatattcattgattgacacgcgctatattggcggacaaaaaccgtttatgcgcgatatgcaagaatttggcgtgacattaggcacgcatcgcaacaacaatagccaccaatcgtttttacgcgcaggcgttagctatgttcgcgccaaagacaataatggctttacgttcaactttggctattggttttaatatagcttaaccatttcaaatcaccaatatagtgaattcaattcaaccgaataatcaacaagccacagtgtgcctaaatcacacaaaagagcattgtgccttgaattgaattcactatctattttcacgctataatcctaccctttccaatcaaccaaacggaacaatcatgagtcgcatcgcacaaacttttgttcaactgggcaagcgcaaagccctgattccctacatcaccgtgggcgaccccaatcttgccaccactgttcaactgatgcacagcatggcgcaagctggcgcaagcattttggaattgggtgtaccgttttccgaccccatggcagatggcccgaccattcaacgcgccgtagaacgcgctcttgccaaccacgtttcgctgcacgatgttttgaacgtggtgcgcgaatttcgtcaaagcaaccaacacacgcctgtggtgttgatgggctacttaaatcccattcacaaaatgggttacgaagcctttgcccaagccgctgccgaagctggcgtggacggtgtgctaaccgtagatagcccgattgaacacatcgcgcccttgcaagaagccttaaaatcgcgtggcgtagactgcattttcctgattgcacccaccaccaccgaagcgcgtatgcaagaaatcgccaaacgtgccagcggttttgtgtactatgtttcgctcaaaggcgtaacgggttcagcgcagctagacacgcaagccgttgctgacaaaatcgcggtattgcgccaacacattcacattccgattggcgtgggctttggtattcacgatgccaacagcgcggcgcaaatcgcccaagttgccgatgcggttattgtgggcagttgcattgtcaaacaaattgaagaacacggcagcaacgcaccgcaagccgtgggcgatttggtgcgcgaattggttgccgcgatttaaatcatgccaactcaatacgctcccttttcggttttgatgtcgctatacgagcgcgagcagcctgcatttttaaaccaatgtttaagcagcctgcacacgcaaacttgccttgccgatgaaattgtcattgtgttagacggcaacattacgccccaattgcaggctgctttggacgattgggcaacgcgattgcctttgcgcgtattgcctttgtcgcacaacgtgggcttgggcaaagcactcaatcacggcttggcacattgtcagcacgattgggtgtttcgcatggacacagacgacattgccgcgccgcatcgctttgagcgacaactggcgtatttagccacgcaccccaatgtggcgttactgggcgcacaaatcgccgagttcacgcaatcgcccgaacaagcacacggcaatcgccgcgttcccgaatcccatcaacagattcaacaattcgcacaaaaacgcaatccattcaaccacatgactattgcctatcgcaaaagcgcggtgcagcaagcaagcggttatcaacatcattggtttatggaagactacaatttgtggctgcgaatgctggcgcaaaatgtgcaggctgctaatttgcccgatgtgctggtttacgcgcgaacaggcacaaatatggtgcaacgccgccgcggttggcaatacgtccaaagcgaatggcagttatatcaactcaaacgccaactgcacctacacaaaccgctcgccgccgcgttttgcctgctgcaacgcaccttgccgcgcctgctccccacttttttattgcaacacctttacacttggctacgccgaacatgaaacccacgccttctctttttattcgcttgctcacaggcattgtattagccgccatcaccacagaattgtatttatttttcaaagacatcaatccgctcaacagcaaagtcatcaacagcaatttgattagcctgcttgcctacacgcttgccgccatttccatcaacaaactgctgtattttcctggcaaacaaagctggctgcacattttgcccgccgttggcttgtcatacagcagcgtgtttggcatgagtgccgtgttttttgttaccttttccaacagctttgtcatcaccaacggcattttggcgaccgcgttttttgtgggcgacttcattcgccgcaaccgccacattccacacattgcctatattccaatcggacgcgccagccaagcccagcaaatcccccatgtaaactggatagaactgcaacaacccgttttgcc

SEQ ID NO: 3170 - DNA, 23180 bp, synthetic construct
  source 1..23180: mol_type = other DNA
  misc_feature 1..23180: note = Synthetic
ggtagaaggttcttggccatatcaattaagtggctattggccgctaagttgcttttgcccgccaacacatctaaagggttgccctcaagactgacatttttgatcagatcaaagagattagatgccccatccttgcttcctgcctgctgggccataccacccaagaccatagaaaggcccttggttaaaagattgccaccttgctcgtgtgaaagaccaaatttattggaaacttggttgaggataagctcacgcacagggccttgaagtagttgggataaatcgaaattcataacattccttatggtttttaacaaaaaatggctgataacagccgaacccaaccattgtaggccttatatgccacaagcaacacaatctttacagacttttatactctgccatcaaatgtaatgaaatataaattgttgaacttatgctatttagtcctttaaaagcggctcataacgctcatcggtcaaggttttcaaaaaggcttcgagggcctcaatgtcctcatcggtcaaggccctggccttgagtttttcttggggcaggttctctgcaaagggcagtttttcccagggcttgccggtttcagggttgagggctcgggcagggttgttgaagtgatcgatgtactcaatcacagtgcgcagctcacggaagatgccattgtgcatatagggggcagtgacagccacattcctaagcgtgggggttttgaacttgtacttggccgcctgctggtgttcaggcttaatatgcgggttttccgccaagcccaagtcctcaaaatcggcaggcaggccattgtgttcaatcacaaagagattgcggggcacttgcaggttatggtagcgaaaatcggtgaaaatctctttttccccctgcgattgatggcagtttgagcaactggttttgctcttgtcgaaaaaaagctccctccccttctcttctagggctgtcaggctggccttgccctccagaaccttatcatacttgctatcaaagggggccaggaggcgtttttcagtttggaaggtggccagtgcatcttccatggctgcataaacgccctcataagactgccagacctcctgcccataaaattgagtgaagagctggcggtacataggcaggctatagaggcgtttggccacctcaagctggttgggcatgcccatttcgagcggatcaagtggtggcatgcccgactgctgggctaaattcttggcccgaccgtcccaaaattggccgccgacatattcttgggcaacttcatcaaaatgaaaatcgggggcaaacttagcataaagcatggtgggtgaatttctccgcccaaatttgcttggatcatcgccttgggataccatctgctgggctgaagtttcccgcagatccacaaaggccgtatctggactgtggcaagaagcgcaattttggttgccatggaaggacaggcgatcatcaaaaaagaggatctggcccatcagagccttgtccatcccgcccgcaggcatggtgcgggcctccttttcaagggcaaggaggggggtggaagttagcatcaggcagagggtaaaagcagttttcatacaagcgggacaaaaagtcaaaatatttgcaaattttacgccaaaacccaccgcttgtaagacctatttcgaggtaatttgctggccatcttgtggcctcaggcaggaaagcagggccaaaagcactagcccgaagcctgctacactcacaaaggtggcactgaaggcctgctcaagtggcagctggctggctcggagggcatttaagataaccgaggccacagcaatgccgatcccaatgccgacctgttggatcacacttaaaaaggtggcacctgcactggcctggctgtcgctcaaatctgacacggtcagggtgttgatacaggtaaacataaaggagttacacacaccgcataaaagcaggatgaggcagataagccagaggggcgattgggcatgaaggagagcgagacttgcgatggtcaggctcatggccagggcattggcctgcaaggtgcgtttataaccaaaacgcttgagggtaggtacgatggctcgtttggctaaaattgcccccagtgccatgggtgccaccagcaggccagccttatcggcactgtagccataggccagctgcaacataagcggtaccaggaagggcacgcccgcattgcagaggcggataaagaggttggccaacatactcagcccaaaagtgcgaaccctaaagagcttaagcggcaggatagccttggggctataatgatcatgcagagcatataaccccataaaggctaggccaagtgctaataataggagggcttggtttatcttggccatctcttctgccatcatttccaagcccagggtcagcaaaaccaggctggctgcaaagagcataaaaccacggccatcaaagctgatagcctctcgggttaagttgggcatatagtgacctgaaatcagcaggccaaagaggccgatggggaggttaatcaggaagatccagtgccaagaggcgtgggtggccagccaaccgcccaccataggccctaaaatagggccaaccaggccggctgtggccatcaggttccaagtggcaaccaactgggccttgggcacgctgcgaataatggctaacctggccacaggcatcatcaaggctccgcctaggccctgcaaaatgcgggcagtgatcaagctgtttaaggaataagaaagggcgcaggccaacgatcccagcacaaaaagcccaatggccagacgaaaaatcttaagcgtaccgaacctatctgccaaccaaccgctaagcggaattaaggccgccaccgtgagggcatagctaataatagccatctgcatattcaggggcgaggtattgaggctctgggaaatggcaggcagggcagtgttgagaatggtgctatctagggcctgcataaaaaaggcaatggctgccacccagcccagtccccgataatcggtcttatctacgctcataggtttccttatcaagcgacctaaatttggcaaaaagctgcaaaaactgaccgcttgtccgccctatcataacgaaacttggcacccgcataaagccttgggccataacttgtgctaaactttaggcagtttttaaccagaggacacacttatgaaattatatggcttaaatggcgcctgctccttcgtgccacacactgcactggagtgggccaaggctcgtcaaaaccaatcctatgaatttgaggcagtcagccgtgaatttattaaatcacctgaattcttggcctttaaccctcgtggagcggtgcctgtgctggtcgatggtgatttggttctatcccaaaaccaggccattcttcactacctagatgaatgcttcccagaggccaaactttttggtagcaccacagtgcgtgacaaggccaaggcctcccgttggttagcctattttaacggcgatgtacataagtctttcgttcccctcttccgcctgccaagctatgccgagggcaatgaggaattgaccaaaaccattcgccaacaggccggtctacagattctagagcaacttgctgtcgccaacgaacatttgcaaagccatgccttcttcggcgaaaccctatgcgtggccgatatttatctctataccatgctaaattggtgccgcaaactgggcctagactttagccatttagaacaacttgagccctttatgcagcgagtcgaggcagatgcgggtgtggatgctgtacgagtgcaggaaggattgaaaggataggttcaccaagcggttgggatttgtggttttcttgcaaatctcaaccgcttgtcttaagtctagatagcaaaaaaccgctaaagcctgtgctctagcggttctctcggtataaaaccctgatggtgtcctactctcacatggggaaaccccacactaccatcggcgtgactgcgtttcacttctgagttcgggatggggtcaggtggtgccacagcactatggccatcaggaaaattcttttctctgttgttttttgtttgttcttttttgtaatccaagctgaatacttttgagttttgtcttttcgtttcttgtcgtttctttctttgttttttaaaaacgcttgagcgttgtatagttaagcctctcgggcaattagtatcagttagctcaatggctcacaccacttacacacctgacctatctacgtcgtagtctccaacaacccttactagcttatagctagggagaactcatcttaaggcaagtttcgtgcttagatgctttcagcacttatctcttccgcacttagctactcggcaatgcgtctggcgacacaaccgatacaccagcggtgcgttcactccggtcctctcgtactaggagcaacccctctcaattctccaacgcccacggcagatagggaccgaactgtctcacgacgttctaaacccagctcgcgtaccactttaaatggcgaacagccatacccttgggacctacttcagccccaggatgtgatgagccgacatcgaggtgccaaacaccgccgtcgatatgaactcttgggcggtatcagcctgttatccccggagtaccttttatccgttgagcgatggcccttccattcagaaccaccggatcactatgacctgctttcgcacctgctcgacttgtctgtctcgcagttaagcttgcttataccattgcactaacctgacgatgtccgaccgtcattagcaaaccttcgtgctcctccgttacgctttgggaggagaccgccccagtcaaactacccaccagacactgtccgagagcgtgttgccactcttcgttagaacatcaaacgttaaagggtggtatttcaaggacgactccacaagcactagcgtgcctgcttctaagtctcccacctatcctacacatcaaaattcaatgttcagtgtcaagctatagtaaaggttcacggggtctttccgtctagccgcgggtacaccgcatcttcacggcgatttcaatttcactgagtctcgggtggagacagcctggccatcattatgccattcgtgcaggtcggaacttacccgacaaggaatttcgctaccttaggaccgttatagttacggccgccgtttactggggcttcgatcaggagcttctcttgcgataacaccatcaattaaccttccagcaccgggcaggcatcacaccctatacgtccactttcgtgtttgcagagtgctgtgtttttaataaacagttgcagccagctggtatcttcgaccggttcaaccttcatccgcaagggattacaatctacgccggcgcaccttctcccgaagttacggtgctattttgcctagttccttcacccgagttctctcaagcgcctgagtattctctacctgaccacctgtgtcggttttcagtacggtttagataaacctgaagcttagtggcttttcctggaagcgtggtatcagttacttcagtgccgtagcacctcgtcatcagttctcggtgttaagagagtccggatttgcctaaactctccacctaccgccttaaacagacatccaacagtctgctaacctaaccttctccgtccccacatcgcagtttatccaagtacgggaatattaacccgtttcccatcgactacgcttttcagcctcgccttaggggccgactcaccctgccccgattaacgttggacaggaacccttggtcttccggcgaacgagtttttcactcgttttatcgttacttatgtcagcattcgcactcgtgatacgtccagcaagcctctcgactcaccttcatccgcttacacgacgctcccctacccaacaatgtttccattgatgccgcagcttcggtgctatatttgagccccgttacatcttccgcgcaggccgactcgactagtgagctattacgctttctttaaatggtggctgcttctaagccaacatcctagctgtctaagccttcccacttcgtttcccacttaatatagacttggggaccttagctggcggtctgggttgtttccctcttcacgatggacgttagcacccaccgtgtgtctcctgagtatcactcttcggtattcgcagtttgcatcgggttggtaatccgggatggacccctagccgaaacagtgctctaccccgaaggtgtccgctcaaggctctacctaaatagatttcggggagaaccagctatctcccggtttgattggcctttcacccccagccacaagtcatccgctaatttttcaacattagtcggttcggtcctccagttagtgttacccaaccttcaacctgcccatggctagatcaccgggtttcgggtctataccttgcaactagacgcccagttaagactcggtttccctacggctcccctattcggttaacctcgctacaaaatataagtcgctgacccattatacaaaaggtacgcagtcaccttgcggctcccactgcttgtacgtacacggtttcaggttctatttcactcccctcgctggggttcttttcgcctttccttcacagtactggttcactatcggtcaatcaggagtatttagccttggaggatggtccccccatcttcagacaggatatcacgtgtcccgccctacttgtcgtaagcttagttccacaataaggctttcaagtacggggctatcacccgctatggcccagcttcccagctgattcctctaacctcactgctataacttactggctcttccactttcgctcgccgctactcacggaatctcggttgatttcttttcctcggggtacttagatgtttcagttctcccggtttgcctctattgcctatgtattcagcaatagatagtaggttcttcacctactgggtttccccattcggatatcttggattaaacgcttcttatcaactcatccaagcttttcgcagattagcacgtccttcttcgcctctgattgccaaggcatccaccgtgtacgcttagtcacttaactatacaacctcaaacgctcttctaagttcgcttcgttttatcttagcttcactttttcaaacacttaggtctaattaacaactagacttgaacgcttttgttcgttcaagatttttactactcagactttttcttatccttttgatatgttgatttctcttcatatcggacttgaaagtctcttcagtttttcagcttgtttacaaatttttaaagaacaatcagacaaggtctttcgaccatcatcatttttcaatgttttagcttacatcatttggcgcttgcaaaaatttcgcattttcactacgcttgtaaaacattcaaaaatgatgacttggtggagataagcgggatcgaaccgctgacctcctgcgtgcaaggcaggcgctctcccagctgagctatatccccaaacatctttccttccggtttttcactcttcacactcgctttgttttacttcgcttggcttgagtggtgggtctgagtggacttgaaccaccgacctcacccttatcaggggtgcgctctaaccacctgagctacagacccaaaaggatgctttgtcttttcctatatcaaacaatctgtgtgaacacttgtaactgctcgtctttggtaaggaggtgatccaaccgcaggttcccctacggttaccttgttacgacttcaccccagtcatgaatcataccgtggtaaacgccctcccgaaggttaagctatctacttctggtacaacccactcccatggtgtgacgggcggtgtgtacaaggcccgggaacgtattcaccgcaacattctgatttgcgattactagcgattccgacttcatggagtcgagttgcagactccaatccggacttagatgcactttctgagattcgctcaacgtcgccgtctcgcagccctctgtatgcaccattgtagcacgtgtgtagccctactcgtaagggccatgatgacttgacgtcatccccaccttcctccagtttatcactggcagtctcctttgagttcccatctttacatgctggcaacaaaggataagggttgcgctcgttgcgggacttaacccaacatttcacaacacgagctgacgacagccatgcagcacctgtctcatagctcccgaaggcacagactcatctctgagtccttctatggatgtcaagagtaggtaaggttcttcgcgttgcatcgaattaaaccacatgctccaccgcttgtgcgggcccccgtcaattcatttgagttttaaccttgcggccgtactccccaggcggtcgatttatcacgttagcttcgggcaccaaggttaaaccccaatccccaaatcgacagcgtttacagcgtggactaccagggtatctaatcctgtttgctccccacgctttcgcatctcagcgtcagtattgtcccaaggggctgccttcgccttcggtattcctccacatctctacgcatttcaccgctacacgtggaattctacccctccctaacatactctagctacccagtatgaaatgcaattcccaggttaagcccggggctttcacatctcacttaagtaaccgcctacatgccctttacgcccagttattccgattaacgctcgcaccctccgtattaccgcggctgctggcacggagttagccggtgcttcttctgtgactaacgtcaattgctatgtctattaaacacaacaccttcctcatcaccgaaagaactttacaacccgaaggccttcttcattcacgcggcatggctgcatcaggcttccgcccattgtgcaatattccccactgctgcctcccgtaggagtctggaccgtgtctcagttccagtgtggctggtcatcctctcagaccagctagagatcgtcggcttggtaggcctttaccccaccaactacctaatcccacttgggctcatcttatggcatgtggcccgaaggtcccacactttactcctaagagactacgcggtattagcgacagtttcccgtcgttatccccctccataagccagattcccaagcattactcacccgtccgccactcgtcacccagagagcaagctctcttgtgctaccgttcgacttgcatgtgttaagcctgccgccagcgttcaatctgagccatgatcaaactcttcaattcaaaaagtttaatcgctcaataaactgcttaactaaagtttacatataaatatcaatccaaaagaaccaatatctaataatgaatttctagtttaagcacctattaagactttaatcaaaattaaaaatattttaacaagtcaatcaacaagtgcccacacagattgtctgatatctttttaaagagcaaaaaagaacgacgcacttgcagaaaactgatttgcaactgtgcgtcgttgcgatggggcgtattatagagattttggaaatctacgcaagcggtttttgcaaaaaatttcaatttttttaccgcttgattaagaaaaatccacttaggctaaattttaggatctttcttgttggtttttcatctttcacctttttaattcttagtagagaagtctattttaacccactctcaaaaacgatgcccctgaaaaccgaagtcttcaggggcagagcgttacgatcttctttcgaagttcttattgtagcaacgtttctcatttcgcagtgcaacaatcgcatttattctgaccatatcagatcaaattgtcaacaaatttttctttacaagcgctaaatttagatcaattctaggcttgccttttgccatagtaaagaacaatcccttcatgctagatattttcacataacctctcttatttggaagcatcaagcattgcattgtcgctccctttctcaactcatttcgcaaagcgatttcttttctgtgataaaaggcatatcgtccaattttttatggagaacccttatgcaacatcttaattatatcctcggccttgatttaggtattgcctccgttggctggtcagtggtcgaaatcgataaagaagaaaaccctacccgcctgattgatttaggcgtacgaacctttgaacgggcagaagtgcctaaaacaggcgaatcccttgcccttagtcgccgtctcgcccgctctactcgccgtttaatcgcccgccgtgccaatcgccttcttaaagccaaatgcctcttaaagcaagaaaacctacttctgccggaagattttatcgatcgccgtaccctcaaacccttgcctaacaatgtctggcaactacgggtagcaggtcttgaacgcaaattagaacgtcttgaatgggctgctgttctacttcacttgctcaaacgccgtggttatttatcgcaacgcaaaaatgaaagccaaggggcagataaggaaaaaggggctttgctctctggcattgccaccaatagtgaattgttggcacaggcagactaccgcacgcccgcagagcttgccctaaaaaaattctatgaagaagagggccatatccgcaaccagcgtggagcctacacccacacctttagtcgcctttccctgcttgatgaattacagcaactttttgcccaacagcgtcaattgggtaatcccttcaccagccagcatttagaagaacaactttctgaactgctactttggcaaaaacctgccctttcaggtgaagctatcttaaaaatgctgggcaagtgcacccttgaacctgaacactataaggctgccaaaaacacctattccgccgaacgctttgtttggctaaccaaactcaacaatttacgcttacaagaaaacggttcggaaagagccttaactgacgccgaacgccatttattgcttgaacaaccctatcaaaaggctaaactgacctatgctcaagtgcggtcaattttagacctacccgatacaaccatctttaaggggctacgttatcagctcaacgctgaaagcgatgccgaaaaagcaaccctgatggaactcaaagcctggcataccattcgtaaggtgctggaaaaggctggtctggaaaccgaatggcagggactgaaaaccaaacctgaactgctcgatcagatcggcaccgccttttccctctacaaaaccgatgaagatatttctgcccacctagacggcaaactgccacctgctgttttggaagcccttttgggtggactcaattttgataagtttatccagctctccttgcaaagtttgggcaaaatcctaccgcttatggaaaagggactacgctatgatgaggcctgccagcaagtctatggcgaccatttaggaaagcgtgaacagaaaaatcaccagctcctgcctgcaataccggccgaggaaatccgtaaccccgtggtcttacgcaccctttcccaggctcgtaaggttatcaatgctatcgtacgcctatatggctcgcctgctcgggtacatattgaaaccgggcgtgaagtgggtaaatcctttgatgagcgacgtaagatcgagaaaaaccagctagaaaaccaagccaaacgccagcaagcggtacaaaaattcaaggaatttttccctgactttgtgggtgaacccaaggccaaggatattctggctctccgcctctatgaagaacaacagggcaagtgcctctattcaggcaaggcgttagatttacaccgcttacgagaaaagggctatgtcgaaatcgaccatgccctgcctttttctcgaacctgggatgacagcttcaacaataaagtactggtgctggcaggagaaaaccaggccaagggcaataagaccccttatgaatggctggatggtgaggcgaacagcgaacgctggcggctttttgttgccctggttagcggaagccgttttagttataccaaaaagcaacggattctgaccaaaaaactggatgacgagggctttatccaacgcaacctgaacgacacccgttatgtggctcgtttcttaatgaattttattgaagagcagatggccctaacaggacagggcaaaaagagggtctttgcctccaatgggcaaatcactgccctactgcgtggacgctggggcttgagcaaggtgcgggaagaaaacgaccgccaccacgcccttgatgcggtggtggttgcctgcaccacacgggcaatgcagaagaaaattaccgattttgtccgctacaaggaaatgaacgcctttagcggtgaacatattgatcgcaccacgggcgaaattcaaaccattcacttccctgagccttgggcctacttccgtaatgaagtgatgatccgtgtttttgatgaggatccacaaactgccctctcccaccttttaccaagtcgtccacaggcacaacacaaatttgtcgcaccgctctttgtttcacgttcgccaaatcgtaagatgacaggccaaggccatatggaaacggttaaatccgccaaacgcttgagtgaaggggtaagtgtgcaacgtgtgccactaaccgcccttaagctcaaggatttagagtccatggtcaaccgtgagcgtgaacccgccctttatcaagccttgaaagatcgcttagaggcctttaaggacgatcctgccaaggcctttgcccaacccttctttaaggcaggtgggcaagaggtgaaagcagtgagagtggaacgcgtgcagaaatcaggcgtattggttcgccaaaataagggcgtggcagacaatgcctcaatggtgcgggtcgatgtgtttgaaaaggcaggcaagttctaccttgtgccaatctacacttggcaggttgctgaggggattttgccgaatagggcgatcattcaaggtaaggacgaaagtgaatgggaagaaataactgaagcccatacttttaaattttccttatttgctaacgatcttgtcaaattgacgactaaaaaaggtatcaccttcggttattatgctggtttagatcgagcgacaggtaatataaccattcgagaacacgacctagaaaaatccaaaggaaaaaatggcgagtaccgtagtttaggcgtcaaaaccgccctttcctttgaaaaataccaggtcgacccactaggcaaaaatatccgcccctgcaaaacaactaaacgccaaggcgtaaaataaaaccaatccctgccacctcacccgagggcagggattttttgtcacaagcggttgattttttattaaattttacaaggagaccctatgagctggcgaagtattctaattagtaaagggggaaaactctcactaaaacagaagcaaatgctgatttggcaggaagagcaagaatttagtgtgcccctggaggatattgccattattgtggtggaaaatcgggaaaccgtgatcaccacgcccctcttatccgccctcgcccttaatggcattacgctgttgacctgcgacgaccagtttcttccctgtggacaatggttaccctttgggcaataccaccgccagctcaaaaccctcaaattacagctagaaatgagccagcccctgaagaaacagctctggcaacagctggtacaacagaaaatccgcaatcaagcctttgtactagaacaggcgggagaaatcagtacagcccaacgtctgctggcaatggcaaatgaggtaaaatcaggcgacaaggataatctggaagcccaagccgcccaatcttattttatccaactctttggcaaagcctttcatcgcaagcaggaaaaccaaatcaacgcccatcttaattatgcctatatggtattgcgaagtgcggtggctcgcagccttgttctgtatggttggttacccaccttggggctaaaccatcatagcgaactcaacccctttaatcttgccgatgattttattgagcccttccgccctcttgtggatttaaaggtctgggaactggtagaaaaggacaaacttgattatgggctaacccctagcaccaagcaaaacctgattaaactgcttaaccatcaaatgagccttaaccagcaagcggtgagtgttctcacggctattgatcgcaccgtagcttctctgcaagttgccctgctcaacaaaaatgccaaattgctaaaactgccccaaatgttaccgcttgcggagcaccagtatgagtgaggcaaaatttatgcgtttaatcgtcttttttgatctaccggttaaaaccaaattacaacgcaaaatagccaatcaatttcgcaaattcctgcttaaagacggctaccaaatgttgcaattatcggtttacgcacggattatccgtgggcgagatgcccttgaaaaacacagcaaacggctgacccaaaacctgcctgaagatggctccattcgttgtttagaaattaccgaaaagcagtttgctagtatggcggtgttactgggtgaggtgaaaccacaagagaaaaaggtcaatagcgatcaactactgctcttttgatgtaaaggatttgctccattttagtcttttaatcggctcatccacaccccacacaagacagttcaattgctgatttaataggcaaatcaactgttcaagcgctctatttttagacagtgaatttgaccttatttaggcttttttggccaccacaaccctacaagcggggcaaaatttcaaaaaatctacatcttttcgccataaaaaaatgctggaatttcctaaattttaagaaattaccagcattttttcttacctttaacatgcgataaaccctgataaatcaaggttctagccgatcggtattgtagcactgcgaaatgagaaagggagctacaactaaccgggggcatatagcactgatagcgatattgtagcactgcgaaatgagaaagggagctacaactagccaatgaatcgggccctaaagagcctcattgtagcactgcgaaatgagaaagggagctacaacttttgtgaaaactaccgctaccgctaccgcattgtagcactgcgaaatgagaaagggagctacaacattaacgtttccgtactagatgaggttctaattgtagcactgcgaaatgagaaagggagctacaactttatggacaccctaccaacagccgcaaccattgtagcactgcgaaatgagaaagggagctacaacgggtagggtaaagttcacatcttcggataaattgtagcactgcgaaatgagaaagggagctacaaccaactacatacgccataccagggccgtcaaattgtagcactgcgaaatgagaaagggagctacaactcaataggttacaagcgtatgaatggggatattgtagcactgcgaaatgagaaagggagctacaacccgataagaagcttaaacatataccttacgattgtagcactgcgaaatgagaaagggagctacaactatttaacattccctgaatgttagcggggcattgtagcactgcgaaatgagaaagggagctacaacgcatggtcttgatgaccgcaggattggcaaattgtagcactgcgaaatgagaaagggagctacaaccgatatccgttccgaaggcgggatacttgcattgtagcactgcgaaatgagaaagggagctacaaccgtgcaacattgcaaaaagcggaacaatcgattgtagcactgcgaaatgagaaagggagctacaacttgctcttacaaagcacgcaaccttgcaaaattgtagcactgcgaaatgagaaagggagctacaacataaatgtttcaccataagctttatcatttgattgtagcactgcgaaatgagaaagggagctacaacagtacaaatttaaattagtttaaggtttagattgtagcactgcgaaatgagaaagggagctacaactttgagttctgaccaagttggttatacaccattgtagcactgcgaaatgagaaagggagctacaacttttagagctaaaaatacaacccattctatattgtagcactgcgaaatgagaaagggagctacaactctgagttccgttctaataggtaattcttgattgtagcactgcgaaatgagaaagggagctacaactctgaggtctgatttaatgggatataccccattgtagcactgcgaaatgagaaagggagctacaacctgtgttagggcgatggttgaagtgaggttattgtagcactgcgaaatgagaaagggagctacaacgtacatcatcacctcgcattgcggggtgttattgtagcactgcgaaatgagaaagggagctacaaccaatttgataactttatcgttaatttcgaaattgtagcactgcgaaatgagaaagggagctacaactaacctcaatttaaacgccttggtgagcgaattgtagcactgcgaaatgagaaagggagctacaacatttaacttaatcgcaaaacgtgatggcgaattgtagcactgcgaaatgagaaagggagctacaacatcacgcccaaaaatcagatttaaccataacattgtagcactgcgaaatgagaaagggagctacaacaccgacaaccacattacccgccgcctgctcattgtagcactgcgaaataaggaaaatcatccaaaacaaaaaagcaggctttcacctgctttctcttaccgtgttagtgccaccgcctcccttaccaacctaccaatctcctgccagttgtgctccctgattaaggatttctccacaaaccaagaaccaccgcaggcaataacattagggatggccagatagtccttgatattctgcacgcctacgccacctgttggcataatctgcaacatagcataaggggcgaccagtgccttgatcatcttcactccgccactagcctctgctgggaagaatttcaccgtttcaatccccatatctaaagccgcttcaatcgccatcgggttattgaccccaggggtaatcggcaaattcagatcttggcagagctggacgattttagggttaaagcctggggtaacaatccaatctgcgcctgcattcttggcctgcaccacctgctctgcggtcaaaactgtaccagctgcaatcaagaaatcagggcgagcctgacgaagctgtcgaatagcctcttgagccgcttctgaacgaaaggtaatttccgccacaggtaaaccattctcggctagggtctctgcaagcggtagaatatcctcggctttttccaaggcgataacggggacgattttaagctggccaagtttttcgaccagttgggctgtggtgtacgacatagttcttcctttgatccgcttgcttatcccaagaaagcctcctatgttaagcaaaattacgctttgagtagccttggtggtttattgcttgccaagggccaggttaaagactggctaaataacatttcaaaaaataacccagttaaatctcttaactaggttatttttataatgatcttagttctttatttactaagctttggcctgggctaacttcttccgctctaatctcaatacgcccaaatgggtcatatagcaacagaagatacaaccgactactgcaaagaggaggaggtagaagcctgcatcccagccaaaacgctctgccaaaataccaaagagggccgtgcctgagaagctgcctaaaatgtagctcagaaggcctcgtaggccggtggctgaacccgctgcaaatgaaggcactagctcgatagtttggagggaggagaggaacatgggcacataaatcaagcaaccaataataccggccccaatggtcacggtgagcagatcggtcccgccccagtaggcaaacatggcggcccctacacccaccagggtgataatggccagcggcatacggcggcccttgaaataggtgtcggttagccagccggccaagagggtggacggaatagctgcccattcaaaaatagcgaaggcggtggccatttgccccttggagaagcccttggtttctaagagatagagaggcaaccaggtcaatacgccaaagcggatcatataggtaaagacatcaataaaggacacaaaccaaacattaatatccttgaggatatagtcacggaagatttcccaggtgcttaaactgacgttttcatccttagtaaccaccagttcttcttgctctgtgcccagaattttactggttggtggtaggccctcgttataggtgcggcctgtgccaaaaatatagaagataatagccacgagggttgcaagggcggttggtaccacaaagtgggcagcctgccaatgttcctggcccaaccaggcgatactggcccctgcaatcggcgccaccaaaccaccgcccacattatgcgaaatgttaaacatggcagtggtcacaccacgggatttgcgggggaaccagctggccaagaccacataggccggcccagcccccatcccttggaagataccgttgagaatacagaggaagagaaagacccagaaggaggcactaaagcccatcattaagttgactagggctgacatcatcagaccgaagatcataaaatgcttagggttggacttatccgcaaaggccgacatcacccccttactcaagccataaacaatgagcatggtgccggaaataaagccgatatccttcttggtaaagccaaactcgctaatcagctcaggtgaggagagcaagaagttattgcgtaagatatagtaggcggcatagccgatgaagataccaaagagggcgtgccatctgaggcggttataacgatcccgaatttctgcttctggtacgggcgtgccaggttttgattttaaaaatggaagcattgcttatccttcttatagtgtcatgataggttaaccatttccctaagtgaaaatgggtcgctatgctaatctatctggcctcaattccaaatagcttaaagcatagcgagatcaaataaagacacttgtttgctgaaatttaagcaaatactagggcttacctagatcctctcccccacttcaaaccaatccccccgtccattcaggaaatcctgcactgtcatcggtttcttaccctgtggctgtaattgagtgatattcagcacgcctgctgaggtggcaatttgcagccctttgcgatcaaaggccaatacagtccccgcctctttcgcctgatgtggcaagacctcagccccataaaccttaacccgctcttccttgccattgacctccacagtcaaataggccacaggggccgggttgaaggctcggatattgcgttcgagctgctgggctggcaggttccaatccaacttggcctcttccttggttagtttttcggcataattggccagctcatcgtcctgtttttcaggcaggaacttgccgctttctaggccgtttaagacctcaagcaaggcaggtggggccagctgggccagtttgtgatagagggaggcggaagtttcagtaggctcaatcggggttgtcaccttatgcagcatatggcccgtgtccaagcccacgtccatctgcataatggtaatgccggtttccttgtcgcctgcccaaatggcccgctgaatcggggccgccccccgccagcgaggcaggagggagccgtgcacattgaggcagcccaagcgtggggcattcagtacggcttcaggcagaatcaggccataagccactaccaccatcacatcggccttcaaggcagccaattctgcctgggcctcttccttgcgtagggatttcggctgatagaccggtaagccatttgcttctgccaagagtttaaccgggctagcctgcaatttattgcctcgtcctgcaggcctatcaggctgggtgtaaacggcaatgacctcatggtctgaatccaagagggcctgaaggtgggtggccgcaaaatcaggcgtgccagcgaaaataattcttaacttgttcattcaatcttctcgtttcatttataatggccttattgtaccctagtgcttttaaaagaccaatctgaggcctaccatgtcagaacaaaatttactccaaaccctgtcccagctcattactgaacaacgcaatcctaatagccaacatctagatcagctttccgccctggaaatcgtaaccctgatcaaccaggaggacaagctggttcctttggccatagagaaagccttgccccagattgcccaggcggtggaaaaaattgtggccagctttgaggcaggtgggcgtttggtctatgtgggagcgggtaccagcggccgcctaggtgtgctggatgcctcggaatgcccgcctacctttggggtctcgcctgacatggtcaagggcctgattgcaggtggcgaccatgccctccgccacccgattgagggggctgaggacaagaaggaggccggccaaaacgacctcaaggccatcaactttggcccgcaagataccctcgttggaattgccgccagcggccgcaccccttacgttttgggtgccatggaatatgccaagggcctgggggcgactgtggtttccatcgccagcaacccccaatctgcaatggctcaagtggctgacattgccattgataccatcgtcggccccgaggtgctgaccggatccagccgcatgaaatccggcacggcccagaagctggtgctcaatatgctgaccaccgcctccatggtgctcatgggcaagtgctaccaaaacctgatggtagatgttcaagccagcaatgaaaaactcaaggcccgagccattcggattgttatgcaggccaccgattgcagccgagaagaggcccaaaccgccctacaagcggctggaaatcaggcaaaacttgcaattatgatggttttgacggggttaaataaagatgaggctcaagccttattggataaaaatcaaggaaagttacagaaggccatgctataaaaaatggcacgcttcgagcgtgccatttttgcttttaagccttattttttcttggctttggcatttggaaggtcagtaatggagccttcaaacacttctgccgccaagcctacagattcgtgtagggttgggtgagcatggatggtgagagcgatgtcttctgcatcacaacccatttcgatggccaggccgatttcgcctaagagttcgccgccgtttgaacccacaatggcaccacctaatacacggtgggtgtctttgtcgaagatgagtttggtcataccttctgaacattcagaagcgatagcacggccagaggctgcccaagggaacttggccacttcgtagttgaggccttcttgcttacactctttctcggttttacccacccaggctacttctggctcggtgtaggcgatggatggaatcactttcgggtcgaagtagtgtttttggccggcaatcacttcagccgctacgtggccttcgtgtacgcccttatgggctaacattggttggcctacgatgtcgccgatagcgaagatgtgtggcacgttggtacgcatttgtttatcaacagcgataaaaccacggtcgtccacattcacgccagccttgcctgcgtcaatgagtttgccgtttggtacacggccgatagcaacaagcaccgcatcatagcgtttggtatcgttgcaagccttaccttccatagacacatagataccgtcgtctttagcttcaacagcggttaccttggtttcaagcatgagcttgaattttttctcgatttgtttggtgtagatggctaccacgtctttatcggctgctggaatcacttggtcgaacatttccaccacttccacttctgaaccgagggagttgtaaaccgtacccatctctaaaccgatgataccgccacccatgataaggagttttttcggcacttctttgagtttaagggcgtctgttgaatcccatacacgtggatcttcgtgtggaataaatggaagttggattgggcgtgaacctgccgcaatgatagcgttgtcgaacttgatggtggttgggttgccatcacggtcacgagcaacaagggtgttggagtcagcaaaggtcgctaagccttctaccacggttactttacgctgtttggccatgcctgccaagccgcctgttaatttagctacaaccgcttctttacctgcacgaaccttatctaaatcgatggttggctcgccaaaggtcacgccgtttttctcagcgtgtttggcttcttcaattactttagccacatgaagaagggcttttgatgggatacaacccacgtttaagcaaaccccacctagggttgggtagcgttcaacgatcacggtttctaagcctaagtctgcacaacggaaggccgccgagtagcccgcagggcctgcaccaagtaccaccacttgggttttgatttctttgctcatagagtttccttagtagggtgcgttcgcacgcaccgttttttgtacatttggtgcgtttacacgcaccctacgcttttatcaaaagcggtcggatttgcagattttcttgcaaaaacgaccgcttgtggattacatcactaaacgacgaatgtctgctaagacgccgttcatgtagcttaagaatcttgcgccgtccgcgccatcgatcacacggtggtcgaaggagagggaaacaggcaacattaagcgtggctcaaactctttaccgttccaaactggtgccatttcagacttagacacaccaagaatggccacttcaggcgcattcacgattggggcaaagtgggttgtgccgatgccgcctaggctggagatggtaaagcaaccaccctgcatatcagaggctgttaatttaccgtcacgggccttcttagacacttccatcaattcacgggaaagctcgataatgcctttcttgtttacgtttttgaacacaggtacaacgaggccgtttggtgtatccaccgccacgccgatgttgatgtattttttgagcgtgagtttttggccatcttcagaaatagagctgttgaagcgtgggaaggcttcaagtgccttggctaccgctttcataatgaagaccactggggtgattttcacgtctaatttttgtttttcagccagtttgttttgctctttacggaagttttctaaatccgtaatgtcggtgcggtcgaaatgggtaacgtgcgggatcatgacccagttacggtggaggttag

SEQ ID NO: 3171 - DNA, 23180 bp, synthetic construct
  misc_feature 1..23180: note = Synthetic
  source 1..23180: mol_type = other DNA
taacatgatccatcggatctaaatattgatattcaccttttttatgtcctaaaatttctaacgctaagtttgccaccacttcgttggtgttcatattaacagaggttcccgcaccgccttgatacacatcagatgggaattgatccatacatttaccatccaccaaaatcgcatcacaggctttaacgatcgcattagcaatatcttccggaatagcgcctaattccccattggcaagggcggtcgcctttttcaccatcaccataccgcgtacaaattcgggaacgtctgaaatagtgacattagaaatattaaaattttccaccgctcttaatgtgtgaattccccaataagcctccgccggcacttcgcgttcgcccagtaaatccacttcttttcttgttgtcatcatatatctcctttcactagatggataaatttgcagtaggtgacattataggcaagtgactgagcaaaaaacgtgatcccgatcatattttcaaggtcgctcaccgactttaattttatgctattcattagtttttttagggctaactctcttgaaatttagaaataatcccccataacgaacaacagtcttattgaaataggaataactcatgccgctactaattttgtgcttgatcgcctttacttttatttatgccgaactgtccattatcgtatggttcggatccacattgggcatcatcaacgtgattttattgctggttttatcctcctttttcggcttatttttaattcgtacccgtggctggtacaccttgtttaacgtgcgtcaacaattagcacaaggcgaattaccaaccgtctccttgctgaaatccggttgccggatcttcgccggcattttattttttatccccggatttcttaccgacattttagcgttgttattattaagccctgtcggtagcggattggtacagcgttttatcagcaaaaaaacgggagcatttcgttccaaattcttctttaaaactcaccgcacttattactccaactacaccggacaatctcaaaacagcgagatatttgaagcggaatttgaacgccgagttgatgaagataaaagagttaaataattttacttttttcccttgaaaggcaaaaaatatcccccatatagattttgcttttcgctaattttaactttaagaaggaaattaaaatgaatattcgtccattacatgatcgtgtgattattaaacgtgaagaagttgaaaccaaatccgccggcggtatcgttttaaccggttcggcagctacaaaatccactcgcgccaaagtattagcagtcggtaaaggccgcattttagacaatggaagcatacaaccattggatgttaaagtgggcgatacggtcattttcaacgaaagttacggtgtaaaatcagagaaaattgacggtgaagaagtcttgatcatctctgaaaacgatattttagcaatcgtagaataatcataggcacacaacctgtgtctatcaatctcatataaatttaatcacggacgccatagtgtgtccctacagaaatagaggaataaatcaaaatggcagcaaaagacgtaaaattcggcaatgatgctcgcgtaaaaatgttagcgggtgtgaatgtattagcagatgcagtaaaagtgactttaggtcctaaaggtcgcaacgttattttagacaaagctttcggcgcaccaaccattaccaaagacggtgtatctgtagctcgtgaaattgaattggaagataaatttgaaaacatgggcgcccaaatggtgaaagaagtcgcttctaaagctaatgacgctgcaggtgacggtacaacaaccgcaactgtacttgcgcaggctatcgtcaacgaaggcttaaaagctgttgccgcgggcatgaacccaatggatttaaaacgcggtatcgacaaagcagttgccgctgttgtcactgaattaaaagccctgtcaaaaccttgcgaaacctcaaaagaaatcgagcaagtaggtaccatttcagcaaactctgacaacgtcgtgggtcaattaattgcgcaagcaatggaaaaagtgggcaaagaaggggttatcactgttgaagacggtaccggccttgaagacgaattggacgtagttgaagggatgcaattcgaccgcggttacttatccccatacttcatcaacaaaccggaaaccgcaaccgttgaattagacaatccgttcattttattagtggacaaaaaaatctctaatatccgcgaattattaccggtattagaaggcgttgcaaaagcaggtaaaccacttctaatcattgcggaagacgtagagggcgaagccttagcaaccttagtggtgaacaccatgcgcggcatcgtaaaagttgcagcagtgaaagctccgggctttggcgatcgtcgtaaagcaatgttacaagatatcgcgattttaactgccggtaccgtgatctctgaagaaattggtatggaacttgaaaaagccaccttagaagatcttggtcaagcaaaacgcgttgtgatcaacaaagataatacaaccattattgacggcatcggcgaagaagcacaaattaaaggtcgtgtggctcaaattcgtcaacaaattgaagaaagcacgtccgattatgaccgtgaaaaactgcaagaacgcgtagcgaaacttgctggcggtgtggctgtaatcaaagtgggtgccgcgactgaagtggaaatgaaagagaaaaaagaccgcgttgaagatgcattacacgctactcgcgctgcggtggaagaaggggttgttgccggcggtggcgttgctttaattcgtgctgcaactaaagtggctgcaagcatcaaaggcgataacgaagaacagaacgtgggtatcaaacttgctctacgtgcaatggaagcaccattacgccagatcgtggcaaatgcaggtgaagaagcgtcggtggttgcaagtacggtgaaaaatggcgaaggaaacttcggttacaacgccggtaccgaacaatatggcgacatgatcgaaatgggtattttggatccaactaaagtaacccgttcagcacttcaattcgctgcatcaattgccggattgatgattaccactgaagctatggtcactgaattaccaaaagaagataaagcagacctcggtgcagccggaatgggcggcatgggaggtatgggcggcatgatgtaatttcgcctaactgctcaaagcgcttaaaagtgcggtggatttttaaaatattttaaaaagtcaccgcattttttatgaattttattcatgtaaaataaaattttttttcacgcccttatttgttgttcaattcgtaactggctttgtgcacttagatttttgtgtataatatcgaccgtacttttcatctaggaacacagcaaatatgaaaaaaaatcttattaccaccacaattcttcttaccacaactccatttatcctcgcgcaaaccgattctacgacggaaaatctatccacgattaatgtctattccgcttatgcaacgccggtaaatcaggataaaaccgcttcttccgtgacggtgttaacggaaaaagagtttgccgctcgtaatgcctcttatgtaagtgatgtactgaaaaccgtaccgggtgtagcaataggggcaaatggtggacgaggttcgctaaccagtttatttctacgtggcgctgattccaatcataccaccgtcattattgatggcgtgagagcaaatccaattaatggggatggctttgattttggtggactgagtttaagtcatattgatcgaattgaaatattgcgtggcgaacaatccgcactttggggaagtaatgcattaggcggtgtcatttacattacgacaaaaagcgggctttataaagataagccatttaatgtcgattttgacctaggtacaggctcccatggtacttatgatggttctatgacactttcaggttatcacaacggattttattattctctccatggagatagccaccgtactcgtggaatttccgcatttagtgaagatcaatttcgctatatgtcatcagatgggaaaaaagagattgttacaggcagcgcaactgaacgagataaattccatagtgataatatttcagcccgttttggctacgctgatgaacaaaaagggcttgagttattagcttcacacaccagcaaaactggacattttgatgataccgcaaatggtcgggcagaaaccgcttatgacgattatacccgaactcgtaacgggttatttaaattgaccggctatctcggcaatacaaaacaacgctttaaacagcaattcagtttaagccgtttaaagacagatattgatactttcgcttatagcttaaactataatacctctcaatttgagaatatgaaacgcgccaatgatgcaaaacgccttagtgcaaattatcaattagatattaattttgatcgtgaaggctcgctcactcaagcaatcagtctcttagcgaattatgagaaatcaaactatgatgccaataattatattgatgagaaaaaactcattgagaaaagtgctgcattggaataccgtttatttagcgaaaatgatcatagtttatccattggtgggcgttacattgataattcgcaatatgaaaatgcgtggacaggtcgaattgcgggcgcttatcgtttatctcaaaatttccgtactcacgcaagttttggtaaagcaattcaaaatccaacgtttattgaatattttggctattttgggaattttatcggaaacccaaatttgaaaccggaaaaaagtattggtggcgatcttggtttattcattgaatccacagataaaaaacacagcctggatattacttattttgcacggaatgtcgaaaatttcatttcaacaaatgccgcttggacacaagccattaatcttgatgggaaaaccaaaattaaaggcgtggaaatggcttataacggtcaattaaccaataatctcaccgcttatgccaattatacttacacaaatagtcgcgatagccaaaaccaagatttgctacgtcgcccaaaacatatggcgaatgccggtctcgcttaccaagtaaccgaaaaactgggatccgatatcaatatttcccatgttggcaaacgcaccgatacttattacgacgaagcaactcggacatcatatcgcgcgaaaatgccatcctataccttagtcaatttaggggcaaattatcaagtgacgaaaaacctcaatgtttatgtcaacttaaataatctctttgataaaaaatacgaaaatgtccttggctatgggcaagacggtcgtaatatttacgtcggcttaaaaggcagcttctaacctggaaaaacggtgggcatttgctcaccgtttaattttaagatgaaaaaaactttcccttttttgaccgcactttggcttttttctgcaacagttgaggcgaacacggaacaatttgtttcactgaccttgtgcagcgatcgcttgctgatagaaatcgcacgcccagagcaaattgccgccatgtcgccttactcaacaaatcccttgatgatgttggataaaattaatcaagataaaccgacgcttgaaccgcgattaagccaattattgccctatttggacaaaacgattctgattaacgagcgcttttatccgcaattggttaccgcgttaacgcaacttaaggtgaaaatactgccgattaacgatagcccccaaaccgcagaacagctgtttaagctgattttgcagctggggcagctcaccgataaccgtgacaaagccgagcaattggttgcgcagttgaaatcgaaaaatttccaattaaatcaaatggtaaacgacaccttaattttagcggataccggcgttgtggaaagtaatttgccaaattatcaaacccttttgcaacttttaggcttaaccccgttaaaaacatccctgaccgcgcaaaatttttccttagaaaaaatcttattaagccaacccaatcggttaatttccttaaccgataaacaaggctacagccaacaagcagagttattccatcatcctttgctaaaaaatttatttaaaaatcaaaaaactgcaactattcctttaaaatatacctactgttttgatcatggtatctggcaagctgccgcaaagatttatcagcaactcaatcaagataagtagtacactatagggcagcttttagataataaaaattagaatatcaaatgaaaataatgccatttaacaccgcacttttactccttttactggcaaccataggcctagccagctggtacgatctgcatcaattttctgccttaaaaaatgccgagggcgtgctaaccgatatgcgcccgctggtattgtgggatattcgtctgccgcgcattttgttggcagtattcaccggagccagtttagcgatagccggcaatgccatgcaaggagttttccaaaatccgctggcaagcccgggcttgctaggcagcgcgaatggcgcaacaaccgccagcgtatttatgctgtattatttttccgtaccgttttcattactcttaatcgccggcgtcttaggcgcgttattcagctttctgccggtttactggatagcgagaaatcgaggtaccaccatgatgattttaagtggcattgcaatcaatatgctgttgggttcggcgattgccttattactctctaacgccgaaagtccttgggcgctagcggagctttatcgctggttacaaggctcacttgcttgggcaaaattagataccctattcatttccgtccccattgcttcagtcggtttattttgcctttatcaacaacgacactatcttgatgtattaacctttggcgaagaaactgccgccaccatgggcatgaacctcaaacacagttttttcatcactactttcggggtcgccttattggttggcactaccattccgcaaaccggcaccatcggatttatcggtttaatcgccccgcacgtagcgcgcattatcttgaaaaaacgcccatcacaactatatttaaccggcgccctgattggcgcgctgttgcttttgatagcagatctatgcattttgtatctgccttttttttcccatatttatatcggcacactcacctccattatcggcgcgccatttttaatttggattttactcacgcaacaacggagaatggcaaatgattaaattggaaaacgtcaccctcgcctacggtttgtcccacctcaattgccaaatcccaaaaggcaaattaatcggtattatgggcgctaacggagcgggaaaatctaccttactgaaaagtatcgctggcattttgtcgctgaacgaagggagaatttggctggcggataagctcttatctcaaatgagtgccaaacaacgcagtgaacaactggcttatcttgcacaaaatataccgatttactgggatttatccgtttatgatgtcattgccttaggcttaccttacccactaaaaacagtagaagaacaacaaaaagtgcagtcaatttctacgcaattttcgattactcatttactaaaaaagccttttcaacagctctccggtggtgaaaaagcccgcgtacaattggcacgttgctgtatcaaaaacacaccgttgttactggcagatgaacctatcgcgccgcttgatccttactatcaaattgacatcatggaacaacttaaatccctcacgccgaaacaaacctgtattgtcgccatccaccacctttcccttgcttaccgtttttgtgatgaaattatcctgttagaaaaagggacaatcatcgcccatggcgcaacggaatacgtattaacaccagaaaatttaatgcgtgcgttttccattcaagcagaaattgatcgggaaaaaagggaaatttatcagattaaaaaagcgcatttttctcaataaaatgcgctgtagttaatatgattactaccgcaacgcaactaataaatgtggaattaccgcttgtacaacatggaaaaagcttggtttattttaaccgtgcgtttcactccgtataatttggcgccattatcaacatataaaaaaaccttaaaaccacgaagattttaaggttttttatttctctttgttaacatgagcaaaagtgcggtcatttttaaccgcacttttttgttgattgcattaacttagtgaataaatacaaaataaactgcaatcgcgacgataaaacggtaaattgcaaacggaataaacgaaattcgtttgataatatttaagaacgttttaattgcaattaatgccacaataaatgctgtcacaaatcctaccgcaaacatcggcaaatcagccagtgttaaaaaacttaaacttttatacaaatccaatacggtcgcccccaacatcattggtactgctaacataaaggaatattctgccgccgcttggcgcccgacgcccattaacaacccgccggaaatcgtcgcgccggagcgggaaaatcccggccacaaggctaaacattgaaataaaccgatgctaaaggcttgtttatatgtcatctgatccacgctgtgtgcagtcactttcgggcgcattttttcagcaataattaataaaactccgccgacggtcaacgaatacatcaccatctcagggctaaataaggatttgatatttttatgaaaaatcagcccaagcaccacagcaggaatcatccccaacaaaatatgcactagctttaagtgcggttgagaataatccggtttttgcccaaaatggatgccgattaaaccaaataatttacgccagaacatcacgacaaccgcaagaatcgaccccaactggataatcacttcaaaggttgccgcttttttcccttcaaaccctaatagatgaccgacgataatcatatgaccggtcgatgaaaccggtaaaaattcggtcaatccttccacaatccctaagattgcagcaattagtaattcagacatagtgttcctcaaaaaaatgaaaaaatcaccgtacttttgtgccaagcacgataaatacgggcgccattttatctgaatttggcacgttcttcaccataaatccgttaaattttgcacgatacggtcgcttaactttctcaacaatccaaccaaagtgtgtacattaaatgctttattttcaatatgataaaatggttatactttgctattgtttaattagaaataaaatctgaaattgtctttcattcgacttttcgtgacaacggaaaatagctggttaaatacccgtttcaatattgtggtaagtaataataacggtgtcatgcttgatgctaacaacatcattttagggctgtagtagattagcatagctgatactacagcccccaaagaatttatccggtctgaaatatagattttcagtagcctagttcaataatgtttaaaaattgagacattctttacacccaataaggagatcaatacctatcatatttaaatatccctgccctaaaggacggggatatttaaaataaaaaaactcactgaaaaggcaaaaggaaaaattgataagttaattctttataaattaaaaatgaaacattagctaaattggcacaaagagaaaggggagctttacataaaattgattacagaactttcttttctccgctatttggcgtatggttaaaaaaaatacacatttatcactaaaataagcttaatgaggctgctttgagttgggatttaggacagataaatgatgccccggcaaccgaaattacaaggggcagagcattgcggtcaattcttttcagaaaagccttattgtagcaacgtttctcatttcgcagtgcaacaatatgtgggctattctacgaatctgaataaaacctgtcaatatttcctttaaattgtggtaaaaataacagtattacttcattttattaaaaggattattcaaatgaaaccattaaattatattttgggtttagatttaggaattgcctctgtcggttgggctgtggtggaaatcgatcaaaatgaaaatcctttgcggttgattgatttaggcgttcggacatttgaacgagcggaagtacctaaaacgggagattctcttgcgttggcacggcgtttggcgagaagtgggcgacgtctggttaaacgccgggcttttcgtttgttaaaggcgaaacggttattaaaacaatcgggtgtgttgtctgcaggagattttatttccgcttcaaccttaaaacctttgcctaataatccgtgggaattgcgcgtgcaaggtttaacgaaacgactaaatcgcacagaatgggcggcagtactgttgcatttgttaaaacatcgtggctatttgtcgcaacgtaaaaatgaaagtaaaacggataataaagagtttggtgcgttgttaaaaggtgtaagcgaaaaccgccaacttttgcaaaatcatcaatatgccacaccggcggaaatcgctatcaaaaaattccaacaagaagaaggacatatccgcaataaacgaggcgcttacagccatactttcgatcgcaaagatttactcgcagaattgaccgcactttttcaagcacaacgcacgttaggtaacatttataccgataaatcgttggaacaggcttttgcggaattattgatgtggcaaaaacctgctttggcgggtgaagcgattttgaaaatgttgggcaaatgcacctttgagtcaacggaatataaagcgccgaaaaacagttatagtgcggaatattttgtttggttgacaaagcttaataatttgcggattttggaaaatggtagtgaacgagcattaaccgttgatgagcgtaaccaattaattaatcaaccttttgaaaaagcgaagttgacttatgctcaagttcgcaaattgttggagctatcggattttgcgatttttaaaggtttacgttatggcaaggagaatgctgaaaatacgaccttgatggagatgaaagcgtggcacgctattcgcaaagccttagagagcaacggcttaaaaacggagtgggacgggttgaaaaccaaacctgatttactggataaaatcggcgtggcattttcgatttataaaactgatgaggatattagccaatatcttgatggcgaactgtcgcccgttgtcttgaatgcgttgttggaaaacttaaatttcaataagtttattcagctctcgctgttaagcttaagcaaaatattaccgcggatggaacaaggtttgcgttatgacgaggcatgtaaacaggtttatggcgatcattatggtcataaagagaacaaagaactgcggttcttacctcaaattcccgctgctgaaatccgtaatcctgtagtactgcgcacgctttcacaggcaagaaaagtgattaacggtgtggtacgattatatggttcgcctgcccgtgtgcatattgaaaccggacgagaagtgggaaaatctattagcgaacgccacgacatcaccaaacgccaagaggaaaatcgcaatgaacgcgaaagagcggtacaaaaatttaaagaattttttccggattttgccggtgagccgaaagcgaaagatattctcaaaatacgtttgtacgaacaacaacatggtaaatgtctttattcgggcaaagcgttagatgtaaatcgcttattagaaaaaggttatgtggaagtcgatcacactttgccattttcgcgcacttgggacgacagttttaataataaggtattggtacttgctaatgaaaaccaaaataaaggcaagcaaacgccttatgagtggttacatggtgcggacaactcagatgcgtggagggaatttctcgcacgagtaaacggcagtcgtttttcttatcacaaaaaacagaaaattttgaccaaaaagttggatgatgagggttttaaagagcgcaatttaaatgatactcgttatgtggcacgttttctttgtggctttattgaggaaaatatgctgttacttggaaaaggcaaaaagcgggtatttgcgtcaaatggtcaaattaccgctttgttacgtcaccgttggggtcttaaaaaagtacgtgaagataatgatcggcatcatgcggttgatgcgattgtggtggcttgttctacgtattcattgcaaaagaaaatcactgattatgtgcgttataaagagatgaatgtgtttagcggtgaaagcattgatcgggaaaccggagaagtgattacgcttcattttccacaaccttggcgatatttccgtcaagaagtggaaattcgcgtttttagcgaaacacctgcggaagatatggtgattgcgttacctgatcgccccgaagcaaatcatgaatttattcaaccgctctttgtttcgcgtgcgccaactcgcaaaatgagcgggcaagggcatatggaaaccatcaaatccgcaaaacgtttagatgagggtttgagtgtttctcgagtaccattaacgcagctgaagctaaaagatctggataatatggtcaatcgtgagcgagaaaaagcgctttatgaggcattaaaagcccgtttggagcaagccaataatgatccggcaaaagcctttgctgaaccattctacaaaaaaggtgggcaaccggtgaaagcggtgcgtgttgagcaagtgcaaaaatcgggtgtactggtgcgtcaagaaaatggggtcgcggataatgcttcaatggtacgcgttgatgtgtttattaaaggcggaaaatacttccttgtgccaatttatacttggcaagtcgcaaaagggattttgccgaataaggcggtagtagcaaagagagatgaagaggaatgggaagtaatggacgaaaaagcgcaattccagtttgcactttatccaaatgatttagttgaagttgtaacgaaaaaagagcgattttttgggtattatgcaggtttagatcgggcaactggagctattaatgtcaaagaacacgatttagaaagctcaaaaggcaaggctggattgcatcgtggtattggtgttaaaacggcaatttccgttcaaaaataccaagtagatgaactcggcaaaaacattcgaccttgtcgccgaatgaaacaacgtccacctgttcgttaatcccaatccctgttttccgttgaagacagggattttttgtcattcaaggagaaaaagatgagctggcgaagtattttaattagtcatggcggaaaattatctttacaacgccaacagatgttaattcaacaggacgaaaatgaatttaccgttcctctggaagacattgcgattatcgtgatagaaagtcgggaaacggtgatcacggttccattattttctgcccttgcacaatacggtatcacgttgctgacctgtgatgagcaatttttaccttgtgggcaatggctaccttttgctcaatatcaccgccaattaaaaacactcaaattacagcttgaaatgagccaaccgcagaaaaaacagttatggcaagtgattatccaacagaaaattcgtaatcaggcatttgtgctaactcaatcttatcatgtaaaagaagcaaaaatgctttatgctatggcaaatcaagtgaaatcaggtgataaagataatatcgaagcgcaagcggctttactttattttcaaactgcctttggtaaagatttccgtcgccggcaagaaaaccggattaatgcccatctaaattatgcctatactgtattgcgttctgcggtagcaagagccttggtgcaatatggctggttgccgacgttggggttgtttcatcataatgaacaaaatccattcaatcttgctgatgattttattgaaccttttcgtccgttagtggatttaatggtatggcgcttatggcaagagggaaaacttgaagatggcttaaccccggcaacgaagcaacaattgatccgcttattgcattatcaaattggcatcaatcagcaaacgttcagtgttctggcggcaattgatcgtaccatttcgtcttttcaaatcgcattaataagccgcaatgcccaacagttaaaactccctgaaatgctaccacttgaggaacatgaatatgaatgaggcaaaatttatgagaatgatcgtcttttttgacttaccggttacgaccgcagcaaaacgcaaagctgccaatcaatttcggcaatttttgcttaaagatggctatcaaatgttacaactttcggtgtatgcccgtattgttcgagggcgagattcgctggaaaaacaccacaaacgtttatgtgaacatttacctgaagagggcgccatccgttgtcttgaagtaacggaaaagcaatttgccggtatgacgattttgttaggcgagttaaaaattcaagagaagaaagtaaatgccaatcaaatgctacttttttagcgataaaaatagtatttgttacaatttatgcctcatttattttgagcaaaatttaaccgctcacatgatttgattaactattttatagacagaaatttttactaaatttcagcaaaaacttctttttttacacaaatcttttcaaattttaaccgcactttttgctaaatatttcacgaaaaaggcatattttgaaataatttcctcgatttttttactaacaaaaatgcgctggcgccttgaataataaggcaccagcgcatcggaattgtagcactgcgaaatgagaaagggaactacaacacattgcgcacttatatgctaatcgtgaaaattgtagcactgcgaaatgagaaagggaactacaacaaaacaaacagatagagcgggcgggggagattgtagcactgcgaaatgagaaagggaactacaacgccattaccacgcaaaagccagctaatgtcattgtagcactgcgaaatgagaaagggaactacaactgcgaggtgagaaatgattatttgtttagaattgtagcactgcgaaatgagaaagggaactacaacgcagtgtctggtgaataatatacccatcttattgtagcactgcgaaatgagaaagggaactacaacccacgaaagtgtcggcaagacgtagtttgcattgtagcactgcgaaatgagaaagggaactacaactgcttacgagtcttttgaaaatgcagtcaaattgtagcactgcgaaatgagaaagggaactacaactttttctttatccatagttaaatctcctttattatagcactgcgaaatgagaaagggaactacaacttgcaccatacattaaaacgcttggtaagcattgtagcactgcgaaatgagaaagggaactacaacaaacttaatcgattcctcccgccttaatccattgtagcactgcgaaatgagaaagggaactacaacaaacctattcgcttataacctgtatcttcaattgtagcactgcgaaatgagaaagggaactacaaccttgggcaatggttggtcgtgaataccctaattgtagcactgcgaaatgagaaagggaactacaacacttgcctttgacttgaaacagggcttagaattgtagcactgcgaaatgagaaagggaactacaaccttttttattacgttacaacacattacataattgtagcactgcgaaatgagaaagggaactacaatgcgaaacgcttatttaccaaacaacgacacgaaagggttatcactgttatgtgtcgaataaagcggtttgtgttaattgcccggccggacaaccttgtagtcaaagccaatccggtcaaaaactcattacacgccatatttatcaagcaagcgtcgatagagccaatgaagtaaggctaagcgaaaaaggaaaagtgatttatgcaagaggcaaagaaaccgtagaacgtagttctgcccaaaatatcaagaagatagcccttgttatccgagctattttatattgttttatggcttggataagggaatatattgaggtatatcgccgaatacttggaatgagcgttctaaaattagtagggcaagaatattagtttacaagccatcaaatacaaaacaactccactattttttattgattgtaaaaatagtgggggttgtcagcggtctgaggctgattactcagccttttcctcatctttctccagaaacttaacccgctcaactttggcttgcttaatcacgttatccgccacatccaaaatcgtaatacgcaatccatcaatttcacacaccgtaccttcatccgggatctcctccaaatgttccaagatcaatccgttaaaggtacgcgcctcttccgtttccaaatgccaatcgaacactttattcaaatcgcgaatattggcggaaccctcaataatcatagagccatccagctgcggcgtgacttcatcatcaatagagggcgcagtcgaggtcgtaaattcgccgacgatttcctccaaaatatcttccaaggtcaccaaccctttaatatcgccatattcatccaccaccaagccaacccgctctttattgttgcggaaatttaataattgcgcattcaacggagtaccttccggaataaaataggcttcatccaccgcgcgaattaaggtttctttagtaaactcatttttatccaacatcaagcgatacgcctcgcgcacacgcaaaacacccagcactttttcatccatactgcctttatacaacaccactttaccatgagccgcatgatttaactggcgcataatcgctttccagtcatcatcaatatcaatcccaccaatatcattacgcggcaccataatatcatccaccgtcaccgcttctaaatccaaaattgacaacagcatctcatggtgggcagcgggaataaattgcgccgattgattaacgatagcacgcaactcctccggacttagcgaatgcgctttcgcttccgggtttaaacggaataatttcatcaagccgcgaataatcaagttcataaagaacactaacgggcttaataatttcatcaatagcgccaaaaaatggctggcaaaaaacgccactctttccggatacagcgcagcaatacttttcgggaaaatctccgaaaaaatcagcatcacaaaggtcaatacaccggtcgcgatagctaccccaacatccccatataaacgcatcccgataatagttgccaacgccgaggcagaaatattgaccaagttattacaaattaagatcaaactaagcaaggtatcggtttttttcaataatttttccgcttttttcgcgccgcggtgtcctttttcggctaaaaaacgcatccggtaacgattggcggcaagcagcccggtttcagaacttgagaaataagcggagagaataagtaaaatgaccagtgcaatcactaacgagctaaggggaatcgtatccaaaataaagcaatcctatattgattaatcatcaaagcgcggtcatttttcgttgattttcaaccgcactttaccatagttatagggcaaacatgacccgactgccaaaataagcaacagtcagcagaatcatacctgaaatggtataaacaatcatcttttttccgcgccaatataatttccaatgtcccagcaacgcaatcccgaaaatcatccatgccattaacgatagccacgctttttgaatattctgcgtcgcaaaaaaatctgccaaataaatcgcgcctgaaactaaagtcaacgttaacagaatctcgccagtaagcaataaacggaaaaaatgccgttccacggtcatcaacggaggaataagcggcgaaagtgccatttttttactctttaattgataatcaatccaacgcaattgaatagcataaagcgtggcgataaagcaaagcgcataagcaaaaagcgccaacccgatatgaattaacaaccccgtattttgcgccaaatgttgcacaatcgatcccggcaataacgcttgcaaaattaaattgattatcgcaaaacaatacacaatcggcagcaatacccaaagggtattcacgcgaaatatcatggcaaccgtcgccaatcccgcaatgatcacactaagcaacgaaccaacgtccatcaaagtaaaacgttgtccgctgaataaatgatgaattaacgtatgcaaactgacaagatggcagataagggcgaaaagtgcggttaaaaaaaagacatattgcttacgtttctccattctcccactgctatgcgctttcaccaataaaggcacgatcaataaaatactaagtaaatataacaagaccgaaacgaaagcaaactccatctaattatctccctgaatataaattagcagtttattctagcgatgctctgctaaaatcgctataaatttctttcaaatgatgaaaatctaccgaatttcagtataatgagggcaattttatcgaataaagttaggatcaataatgtttgaaaatttatcagatcgcctgtccaaaactctgcgcaatatcacgggcaaaggacgcttaaccgaagaaaatatcaaagagacgctgcgcgaagtgcggatggcgttacttgaagccgacgtagcattaccggtggtacgcgattttatcaacaaagtcaaagcccgcgcgatcggcgaagatgtcaacaaaagcctcaccccggggcaagagtttctcaaaattgtgcaagctgagcttgaaaacgccatgggcgaagccaacgaacaattaaatttagccacgcaaccgccggcagtgatcttgatggcgggtttacaaggggcgggaaaaaccacatccgtcggaaaattagctcaatttttaaaacagcgccataaaaagaaagtcttagtcgtttcagctgacgtttaccgcccggcggcaatcaaacaactagaaaccttagcgcaagcggttggcgtcgctttttacccatctaatacccaacaaaaaccggtagaaattgcccaaaacgcccttgctgaagcgaaattaaaattctacgacgtcttgattgtggatacagccggtcgcttacacgtggacggggaaatgatggaagaaatccaacaaattcactccgcccttcaaccaatcgaaactctgtttaccgtagatgccatgacgggtcaagatgcagcaaataccgccaaagcctttaaccaagcgctacccttaaccggcgtgatcttaaccaaagtggatggggatgcccgtggcggagcggcgttatccatccgccaaataaccggcaaaccgattaaatttttaggggttggcgaaaaaacggatgcccttgagccattccatcccgatcgcgtcgcgtcgcgtattttaggcatgggagacgttttatccttgatcgaagatttgcaacgcaacgtcgatcaagaaaaagcgcaaaaaatggcagcgaagtttaaaaaaggcgaccactttacccttgacgatttctgcgagcaattggttgaaatgaaaaaaatgggtggcatgatgtccatgttggagaaattacccggcgcgaaaaatctgcccgcccatgtaaaaaatcaagtagatgacaaaatatttgtcaaaatggaagctattattaactccatgaccttaaaagaacgcgccaatccggaaattatcaaaggttcccgtcgtcgtcgtatcgctttaggttccggtacgcaggtgcaagatgtcaataaattactcaaacaatttgacgaaatgcagcgcatgatgaaaaaaatgcgcaaaggaggcatggcgaaaatgatgcgcggtatgcaaggaatgatgggaaatatgggcagcttaggcgggctcggcggactgtttaagcgttaataaatactattccaacaaaagaacgctctgttccataatcgttactttgaggaattttagactcaacttttcttaaaaaatcaaggcagcgtccattacagagtatagttttaatccaagcatagtagacaaaatagttgctcttaattatttagcatatcggacaaaacaaaacccaatcttatcaagacaagattgggtttttgatacattaactttgaaatattaacttactgaattttaaagctaattggcacattaattgcgctgctcatgcctttaggtctaggtccaatcgagcgcgcactttgaaccgcatttaacgcagcctgatccaaatcgtttgtgcctgagcttttaacaacgcgcacattgcttaaactaccatctgcgccgatggtgaaagcgattgtaacaatcccttggcgacgcatcattttagcgcgttttggatagcgtttatgtcgttctatctcgcgtctcaacgctgagcgataggcactaagttcatcagtattactaccgtttcctgtgagattcggatttagtgtcgtgacattcgcgttgccggagcgtaccgcatttatcttagcgtcagaatcgacaactcgatcgcttttcggtctatcatcttgttttttcggtttaggtttgtctttctttttttaggtttaactttttccttcggtttttccggtttcttttccggcggcgtttcttttttcggttccggttttattgtaggatcagcgacttcttctttagcaatcacttcttgttttgggtcgggctcgttttgcggttccggttcaggttcctccatcaccgttcccatcatcatttctattgaaatagatgtttgttcttcagccgcttgactgttggcgctatcctgattaacagtatagaaaatcgcaataatgagcgtggcatgaaagagcaaagagagaaaaaaaccaacccaagaataacgtttactgaccatttattttcctttttctttcatggtcacaatggcgacattggtaatttgatatttcgccattaagtcagtgatggttacaaaattttggaatgttgaacccgcatctacttttaatgtgactttttgtgctttatcccattgtgtcacttcttgttccaacttttccaatgaaatcggttgatcattaaaataaatatcaccgtcctcggttaccgttaataatttagctaaatcatcggatttgaaagcgaccgttgtactggctttagggacattaacttggattttaccttgagaaataaaactggcggtaattagtacaatggctaacagtaccaacataatatcaatgaaaggaataatgttgatttcatcaaactttttcaccttaggctcctacatttttttgtccgtttagtgctttccatttcaaacgattgacttctactttacgggttaatccgttataaaacaccattgatggaattgcgactaaaatccctaccgcagtcgcttttaaggcaagagataaattgagcataattgccgcggcatcaatatctccaccggaatttcccagttcataaaacgttagtaaaataccgataacggttcctaacaacccgacatagggcgcatttgaaccaatggtcgaaattgtcgttaaattacgcgttaaatcaatatccaattcatgaatattggtataacgggaaacttgaactcggcttaaaaagataaagcgttccagtgcaaaccataacataataaagctcatcaaaccgagcaatccgagaataatataatcaatatattcatgtaaaaaggtaaagaattgcgacatatattcgtcctagttgtagttaaaaattgacataaatttgaaattgagaattacttctaattgacagcgcattctaacaaagttcattccggtggtcaaaacatgttgctaaaaggcagctgcacaaacgctatctttttcataaattgtcctttaaacttagaaattaaataacagtataaaatgagaatggttatcatatttataatttaagaaatgtcaatataaatgagaataatttttgattttaaaagataggcaactaaatgttaccattcgattaaaaaggagcataaccttatttttgataccaaattttgttcacaaacaaggttacccgccccgaaggggtatgaacgttgacttcatcatcaatctgtttaccgataagtgcacgcgccaccgggctgtcgatagaaatccaatttttcgcaggatcaaattcgtcacatcctacaatacgatattgcttgcactcaccctcttcgttttccaattcgacccatgcgccgaaaaaaatcttcccttcttggcgcggatcataatcaactatttgcaagacttccagtcgcttgctgagaaaacggacgcgacgatcaatttcgcgtaaacgtcgtttaccgtaaatatattcggcattttcactgcgatcgcccaatgctgccgcatcagataccgcttgagttactttcggacgctcctctttccataaaaatttcaattcttgatccaaggcttgccagccgacgcgggtaatatagtttgatttagacataatttaatattggcttaggattttatatgaattgtaacatattgcataaaataccgtctattttaaccaattatgcaataactatttgagcaacggtactaaacacagtatgctataagatattttattttcatgataattcttttgattctatgttaaatcaacaattttctcagattattgccgcggaattaacggtacagccgcaacaaattgccgctgccattcaactgttggacgatggtaatactattccgtttatcgcgcgttatcggaaagaggcgaccggcggtttagatgatagtcaattgcgtcatttcgagacccgtttaatttatttgcgtgaattagaagaccgccgccaaaccattttgaaatccattgaagatcaaggcaaattaagcgacgaattacgtcgccaaattcaacaaacgcaaagtaaaaccgaactggaagatctttatctcccctacaaacccaaacgtcgtaccaaaggacaaattgcgattgaagcgggcttggcaccattagccgatttactttggaacgaaccgcaaaacgatccggaacaagccgcacaagcctatattgacgcagacaaaggctttgctgatagcaaagcggtattggatggcgcgcgctatattttgatggaacgatttgccgaagatgcattgttattggcaaaagtacgccgatatttacaacaaagtgcggtgc

SEQ ID NO: 3172 - DNA, 23180 bp, synthetic construct
  source 1..23180: mol_type = other DNA
  misc_feature 1..23180: note = Synthetic
atctttttgtaaactttgttcaccaatgctaatcgcccaattaaataattttttgcgagatggtgaggctttatctactttatcccaaatcgcagcatacattttttcatataaacgaggcactgcacacatcaaggtcggcttagtttcagccaatgcagaacgcacttcattggtatcttccaaatagcaaattactgcccctttatgcaacatataagcagaccacgcacgttcataaacgtgagagaaaggcaaaaaagcaagggaaacatcgtgataatcgataggaagtaaggctaaatcgtggctttggaattgatgagcaagattagaatgcgttagcattacgcccttcggctcgcctgtcgtacctgatgtataaattaacgtaaaaagatcatctaaatttttagttgcaagacgttgctcaaattcctgttgatcggcattttcacctaatgcaataaaatcttgccattcaataatcaagtcattctcagcatattgcaatccttctttcatcaacacaattttagttaatgcagtgcaattttctgccaccgttaaaatagcatcgagttgtggctgatcccccacaaacaaaatttcaacatcagcattattaaggatatattctgcctgctttggtgtattcgttgcataaattggcacggtaatcgcacgtaattgcaaggtcgcaatatctacaatcgtccaatttggcatattgtgagcaaaaataccgactttatcctgaataccaatgccttgattcagtaatgctaatgaaagctgatctaatttttgttgaaatttagcccacgaaatatcttgccacgtgttgttttctttaaaacgtaatgcacaacgcgtcgggtgactttccgcttgctgtcgtacacgattaacgatatggagatctaataaattcataatgttctttctactaaaattaaggacaaaaacgtttgcaatataactttttcttataaaaaaagcgagtaagaatttatttttgcaaaaaacaaaataaatcttaccgcttaatagtcaatagaatcaatgttttactaataacttattgaggtcgggcaagctgttattcgttaatttttgaatgatatagaacaaaatcgttgccccaatcgctgcaacgcttaaatcaacaaaaagcgtcactaaaatggtcaagacaatcaaaggaatatcttttttagacaataatgctttacgccctaacataattttccataactctctgatcacgacacgatccaatacatcatagccgactttaaacagcacgccgataaagaccgcttttggaattaaactgatccaatcaaggaatacaaagatttccacaatcacaaaggccccaactaaaatccctgcaaagcgtgaggttgccccctcttttaaaataagcacagaacggatagttgcctgagcccccggtaaaccaccaagcaatgcggctgccgcattagcaataccctgtgcgacgagttcacggttacgctgagtgtcctcgccactgattttatcaatgaccaatgccgtcattaaggtatccaaatagcataataaggctaactgaaacgccaatggcgcagcaaacagcaacaattcaaaagagatatgggttggaatttgcgactgtacccattcaccgatagaaaccgaaaggatattactatcaatattgatcgtttcaattggaatattaaataaatgcactaaaatcgtcccaataataatcgccattaaagtcgctgggaagaacgctaaaatacgttgaaaggttttatttctgattttagggaacaacaggataatcgctaaggtaagcaatgcaatacccgaattcagcaatgctgttttatcaaatgtccaaagatcatcaaccacaaaaagttgtttaatttgcccaatccaaattaagatcgcaatccccgacataaagcctgaaatcacactgtttgggatccatttaattaaattaccggcacgaaacaatgcggcgagtccgagcattaaaccgcttaaaatcaccgtaaaattaaagagttgattgattgtcattccatcaagctgactcgcactcaactgctctgctgaaactaatacggcaatcgccaccgccgacattggggcagtcggaccagaacattgaatacgtgttcccccaaataacgaagtaacaaaagcgatcacgcccgccgcaatcatacctgataacgcaccacgtccagataacaaaccaaaagacgcacctaaacttaacgcaacaaaactcaccacaagggcagccattatgttggtgtacaaaccagaaattgaaaaattatttttagataaaggtttcataatagtcaaatgttataaaataaatgaggaacagtgaaaagattgaaatttaatcacaagagtgcgtattatacgcttaaaaagtatgaaaaaaagtgtatttctgatttttacataaaaacgagataaattgttttacctcaacagtaagaatccactaaatttgcaaattttcgatcaaatatgaccgcttagtttattaaaaaatggataaaaaaacgtgttaattccaatttggattaacacgtttttttatattttatactgagaaaatattaaggtttgtaaatgatttctacgccttcttcatcttcctcagaccaatcatcgtcccagtcatcttcagtgataggattttgcattgcttgattatgataatcttcccatttgaattcaacttcggttttcgcttgttgttcttcttcaacttcacgagggttagcttcaataaagtccataatattattggttagtgctgatacattatgccctgttgcagctgaaataatgtagtaatcgccttcccaaccgagtttttcaacgatttctttagcacgttgttgggcttcttcttcgccaatgacgtcacatttattgaaaactaaccattgtggtttatccgctaatttttcgctgtattgatatagttctgattcaataatagcgatgttatccgctggatcggtctcatcaacaggcataatatcgacaagatgtaataatacacgacaacgctctaagtgttttaagaaacggatacctaaccctgttccttcagacgccccttcgattaaaccaggaatatctgctaccacaaaactacgatcgccactaacacgtgccacacctagacttggtactaaggtcgtaaatggataatccgccacttttggttttgcagcagagacactacgaataaacgttgatttacctgcgtttggtaagccaagcataccaacgtcagctaatagcatcaattcgagcattaaatcacgtttctcgccttctgtaccattggttttttggcgaggagtacggtttaccgatgatttaaaacgcgcgtttcctaaaccgtgaaaaccacctttggcgatcaataatttcattccgtgtctggttaaatcaccaatcacttctttggtgtcgttatctatcgctctagttcctactggtacacgtaatgtgatatcgttacctctagcacccgtacagtttgcactgcgtccattttgcccacgttcagcggcatagcgttttgtgaaacgatagtcaattaaggtatttaagttttcatctgcaattaaataaacatcaccaccatcaccgccatcgcctccatcaggaccaccttttgggataaatttttcacggcgaaaactcacacaaccgttcccgccatctcctgcttcaattcttacaagagcctcatcaataaatttcatttttactcctaaaattatttaattctattctttttgattagtttatgtcctagtactgataaaattgtacctgaaacaacaataaatgcaccgacataacttaaaaaattcatttcaggattttcaaatattgcagggaaagaataatacccaatatttgaaaataacattgtgaagattgggatcaacacagttatcgcactcacttttgaggcgtcccaattatttagtgcttctgcgtaagcaccataaccgattaaggtgtttatacagcagaaaataaaacaccctaatgtaaatccatctaattcaccaaattgacttggtgtggcaaaaccactgaatactattgcacaaccaatataaataataaataaaatttgttgtgagctaaatcgagccaataatagtttttgtgaaatgccgtaaagcacccaaatagacgatgcacctatgccaaataatatacctaacgcataatcgccgagttgtaatatttcttcaaactgctgatgaaagaaagtaactaaaccaacaaccaataatattaacccaattttttgatgtaaaccaaaactttctctgaataataatacgctgacaatcatcattataaaaggggacaattgacttaaaacttgggtggttgttggggaaatatattgcaatgcggaactgaataagaaaaagttaccagaaagccctagaataccgaataaaatccacttatattgtctaaatgatagattggtgagtttaggtaatttttttgttagccctaatataaccaataagcctaaacctgcgactaaaaagcgataccatacaattgtagttggatccagcacagttaagactttttgtactgcaataggtacagccccccacattgatgtggcaagcaatgctaatgaaaagccgagtaaaggtctttgtttcatattatcttttcttaaatcctataaaaaaaccccgctaagatgcggggtcatttattctttactttgaaaattactctgcgtcaatactcacgtatttgcgatttttgtcgcctttaacttcaaatttaactttaccatctgctgttgcaaataatgtatggtcacgacccatacctacgttagtaccagcgtggaattttgtaccacgttgacgaacgataatgctacccgctaatacagattcgccaccgaaacgtttaacaccaaggcgtttagcttcagaatcacgaccgttacgagttgaaccacctgcttttttagttgccatctacttgatctcctctgaaattatgctgtgatcgtagtgattttcacttctgtgaaccactgacgatgaccttgttgtttacggctgtgtttacgacgacggaatttaacgattttgattttatcgccacgaccgtgagaaacaacttctgctactactttgctaccatcaacgattggtgcaccgattttgatatcttcaccgttaacgaccattaacactttgtcgaattcaactgtttcaccagttgcaacttcaagtttttctaaacgaattacttgaccttcgcttactcggtgttgtttgccgccactttggaaaactgcgtacatatatactccgctaaattatgcgttcacattttgtctaattaactttgctactaacatttttaatacattaaaataggtcgccaattctacgcaaaaaatgcttgacgatcaagcgtgtttttgaattatttttgtaaatctctaaaataatcaaagaaactgaaagatacgttattttgtcactgctaaattaaattttttaatgatgaagcttaataataaaccataaagtggtaaaaataacgccatacttacgctaatttttactaaataatctactacacctaagccaaaccaatgcgttgctaaataaggatcagcacattgataaaaagcaatacaaaagaaaacaaaggtatcaattaaactaccaaatagtgttgacgacgtaggtgcaatccaccattttgccgttttgcgaagtcgattaaatatgatgatatccataaactgccccacaacataagcggcaaagctcgctaaggcaattctaaaaacaaagaaattaaactcccccagtgcagaaaatccttgaaactgggtttcaaaaaaaatcactgaaatcacataacttatcactaatgccggaaacattactgcaaaaataattttgcgagccaattgtacgccaaatactcgtaccgtgagatctgtggccaaaaagataaaagggaatgaaaatgtgccccacgtggttggaatttgaatgtccgttaacggaatttttacttcaaaagtcagttgcaccaaataattacttatagtgagaataaaaatatggaataaagaaagtaaaattaacgaacgtcgcttttgacgatcagaaaaatcgatattgagaaacatattgtatcctttttataaaaagagctggggttagggaacccaaaatttaatgaggtgcgtatcttacttattttgattaaaaatacaatacaaccttaatattaagcggtgtgattttattaaaaatttaccattttttcctcaaaattaagctataatgtgcgaccgatttttttaatttaattcacgatttaacatgaaccaagacaaccataatgttgaagatctgatcaaaatttttaatgatactttttttgaagaatataatgtaaaacttaattttggaggcaattatcctatctatcttcccgcatttttagatgaggggggcaaaccaagtgagcgtgattataatatcattttgtttgcaagaggctattacagcagtgcattacacgaaattgctcactggctaatcgctggaaaagaacgccataaattagaagattttggctattggtatgaacctgatggacgttcagctgagcgtcaaagagagtttgaaaaagtagaagtgaaaccacaagcaatcgaatggattttagccgttgccgcaggatttcgttattttgctagtgcagataatttaagtggaaatacaggcgataatagtgcttttaaacaagccgtctacgaacaggtaaaacaatatgcttcgcaaggtttatcagaaagagcggaaaaattacgtcacgcattaagcgagttttatcaaacccctgattatattgatcttaatcgcttttatttggaaaaaatctaattaaattaaaggctattttttattctaacgcacgataaaagatagcttttcactctttttttcactataatgctttcgcttttcgcattatccccccatagctcagttggttagagcagtcgactcataatcgattggtcactggttcaagtccggttggggggaccattttccattcttttcttaaactccagctcttttcgattattacatatctatttttatcattttttgatttataacattagaaaaaaatctaaatttagttcatttttacgatctagatcgcaaaatttaatgaattttttatatataagttgcttatagtgtatattttagactttttagagtttaggagagcaaaagtgaataaagtaagtgcaaatacagcagagataagaaatgtattagagccactggtgggacttatcgccataaaaacgtatttttcctattatggtttgtttgtcgataatatcatgtttggtttgtataaagacggtcagttttatttaaaaataacggaagatttgattgaaaaatataatatatcttttacgaaaggcaaccctattctagtacgtgattttcatttttttgataaagatagattttatcaattctcccaaaataattttttatctgatttaattactgatttaaaacagaagcaagcaacaaataaaatagaaaaatcaattagacatttgccaaatatgaatatcaatttagaaagattattacaacgacacggcatcaacaccattgatgatttatataatttaggcgagatacaagtatttgtaaaattgattgaacagggcgtggatgttgcagaagtgtttctgtttaagttacacggtgctttgcataacaaattggtttatattcttaaagatgagcaaaaacaatctttgctacgagagactgatgccgcattatatgatgctggtttaagaaagcgtttttctcaaaaaataaaaaagtcttaaaatgagattataaaagagtgtcgtcttattgaaggttgaaatgatacagccctagattataccgtttgtggaaaatgttatttttatccattttttgataaaacaaagcggtcatatttgatcgaaaatttgcaaatttagtgaaaaaaatgaccgcttatcaataacgttgtattgttaattattactccgacaacgctgctaactgatccgcttggtattccgtaataatcggttggattagctcttccatcttgccattcattacttcatctaaacggtataaagttaaattgatacggtgatctgtaacgcgtccttgtgggtagttataagtacggattttatcactacgatctcctgaacctaacaggttacgacgcgtatccgcttgctgtgccgcttggcgttcttgctcagcttgaacgatacgagacgcaagcactgacatcgctttggctttgtttttgtgctgtgaacgttcatcttggcactcaaccacaatacctgttggtaagtgagtaatacgcaccgcagaatcggtagtattaacgtgctgaccacctgctcctgacgcacggaaagtatcgatttttaaatcagacggattgatttctggcaattctgattcaggtaattcaggcataactgccacagtacaagccgaagtatgaatacgcccttgcgattcggtttttggtacacgttgtacacgatgaccgcccgattcaaatttcaacttaccataaacgctatcgccactgattttcacaatgatctctttatatccgccttgctcactttcacttgccgacatttcttcgacacgccagcgttggctttctgcatagcgagaatacatacggtataaatcccccgcaaaaatccctgcttcatcaccacccgttcctgcacggatctctaagtagcagttatattcatcatttggatcttttggcaataatagaatttgtaattgctgttcaatttcaggaatttgtgcttcactttccgcaatttcttcttctgccatttctttcattgttggatcgtccaacaagatttttgcttcttcaatattttcttgtaattgttgccattgtgaaaaggttttaaccacatcttcaagctgtgaatattcttttgaataagcacggaatttctcttgatcgctgataatatcagcgtcgcctaacaacgcttgtaattcttcgtagcgttctgttagggtttctaattttgtaataattgattgtttcataattttatttcagctattttttgtaaaatttaatataaaaatgaccgcttattgtaacggaaaataatctaaattgcttgtataatattgctttttactgtggataaaatcgaaaatgaaccataagccttgcccttgccaatcacacaaaagttacgccgaatgttgccaaccttttcatcaacacaccgcgacaccactcaccgctgaacagctaatgcgttcacgttacagtgcttatacgctgatcaacattgattatattgtagaaaccaccctaccgagtcagcagaaacatttagataaacccgcaatgcaacagtgggcagaaagtacaaaatggtgtggtttagaggtcatcgcccataatcctaaatttgccaaaaacagagcaacagtggaatttaaagcctattttgaaaccgaacaaggaatggctgaacaccacgaattatcgctgtttgtttataaagagggaaagtggttttttgttgatccgaatgtgtaggaaatagataaaaagatgctccttaacaccgaagtattaaggagcagagctttacgaaattctattgaatctcttattgtagcaacgttttctcatttcgctatgcaacaatacttataataataaaaaattttaaattaaagtcaatgtttttttatgcaatttatgctaaaaatatatccgtttctttttattaggtaatttaggtggatttatgtcaacaatgtcatatattttaggattagatttaggggtcgcatctgttggttggtcagttattgagattgatgaaaatgaaatgccaattagattagtagatttaggcgttagaactttcgaaaaggctgaagtgccaaaaacaggagagtcattagcaaaatcaagacgtgaagcaagaagcataagacgactaatcgctcgcagagtaagacgcttattattagcaaaaaaagcactcttagaggaaggtattttaacccaaaatgattttttaactaaaagtatcataaaagatttacctatcaatgcttgggaattaagagccaaaggattagatcataaattaacctcaaaagaatgggcaacggtattgctacatttagttaaacataggggatatttatcacaaagaaaaaatgagagtgatacagcagataaacagctcggtgcattattatctggcgtaaaagaaaatcataccctattacaagaaaacaaatatagaacaccagcagagcttgctatttgtaaatttgaaaaagaagagggacatattcgcaatcaaaatggtgaatatatccatacgtttgatcgattagatttacaagcagaattgcatctcctctttgaaaaacaacgccaatttaataatccttatgcttctgccaaattagaagaaaaaatggattatttattgatgtatcaaaaaccagctttatccggtgaagcaatcctaaaaatgttgggcaaatgctcttttgaaacacaagaatataaatgtgcaaaaaatacatatagtgccgagcgttttatttggttaactaagttaaataatttaagaattttaactcaaggatcagagagagggttaacagaatctgaaagagcattattattaaatcaaccttatcaaaaagcgaaattaacctatacacaagtcagaaatattttagaactatcagaatcagaaatttttaaaggcttgcgttatggaaacgtagaagataaaaaaatgattgaaaaagaaacgcttatggaattaaaagcatttcatcaaattcgcaaagtactggaaaaagcaaatttaaaaacagaatggcaaggtttagcgacaaaacctgaattacttgatgaaattggcacgatattttcattatataaaacagatgccgatattactgctcagttacaagataaaatatcagccccaattttaaatgcattattatcaggtataaactttgataaatttatcaatctatctctagtagcactttccaagattcttccattgatggagcagggacaacgttatgatgaagcttgcacttctatttatggtgatcattacggtgtaaaaacaaaagaagaacatctatttttaccttcaattgataaagatgaaatacgtaatcccgttgtattacgttgcctttctcaaacaagaaaaattatcaatgccgttattcgtttatatggctctcctgcgagaattcatattgagacagggcgagaagtaggcaaatcatttaaagagcgtcaaaaaattgaaaaaaatcagcttgaaaataaagcaaagaaagaacgtgcaataaaagaatttaaagatttattcccttactttatcggggaaccaaaatcaaaagacattctaaaaatgcgtttatacaatgagcaacaaggaaaatgtttatattcaggaaaaactatcgatatcaatcgattacttgaaaaaggttatgttgaaattgatcatgctttacctttctctcgcacttgggatgatagttttaataataaagtcctcgtattagcgaatgaaaatcagaataaagctaatcaaacaccttatgaatggtttgatggtaaaaataatacaactaaatggcaacaatttgttgctttagtatggggaagccactttaattaccataaaaaacagcatctgttgctcaaaaatttacctgaaggttttatgaagagaaaccttaacgacacacgatatgttgctcgctatttaatgaattttatcaatgatcatattcaattaacaggtaaaggaaaaagacgtgtctttgcttctaatggacaaattacagcattactccgtgctcgttggggattgatgaaagttagaggagataatgaccgccatcacgccttagatgctattgttgtggcctgcacaactccttcaatgcaaaataaaattactgatttcgtacgtagtaaggaaatgaatattttcagcggtgaatttatagatagaaataccggtgaaattaaacagattcatttccctgaaccatggaactatttccgtaatgaagtgatgattcgtgtatttagtcatgatccattattagaattggaacagcaattaccaagtcgtcctgaagcacgacatcaatatgttacgccattatttgtatcaagaatgccgactcgaaaaatgacaggacaagggcatttggaaacgattaaatcagcaaaacgcttggcagaaaatgaaagcgtgcaacgtattgcactcacatcattaaaattaaatacgttagaaaacatggccaataaagataaagaaaaagcactttatcaagcattaaaagaacgattagaacaatttaataatgatcctgtaaaagcctttgctgaacctttttataaaaaagggggacagcaggtgaaaaaaattagagttaaacaaattcaaaaaacaggggtaatcgtccatcaaggaaatggcgtagcagataatgcttctatggttcgtgttgatgtatttgaaaaagctaacaaattctatcttgttccgatttacacttggcaagtggctaaaggtattctgcctaataaagcggctatagcaaacaaaaatgaagatgaatggcaagaaatggatgaatcttttacctttaaattctcaatccatcctaatgatttaattaaagtaactacgaaaaaggaagtttattttggatattatgtagctatggacagacatactgcagcaataaatatcagagagcccgatttagaaagatccaaaggtaaagatggattacatagaggaattggtgtaaaaacagctctttcttttgaaaaatacgatattgatcctttgggtaaaaatatcagaccttgtcagccgaaagctcgacaacctattcgttaattattacgctctatttgtttaacagatagagcgtttttattaagaggtaataagattatgtcttggcgaagtatcttaattagcaagggtggaaaattatcattaaaacagaatcaactttgtatttggcaagaggaggccgaatataccgttcctattgaagatattgctattatcgttgttgaaagtaaggaagtggttattactgcccccttactttctgctcttgcactcaatggtgtgacattattgacctgtgatcaacagtttctaccttgtggacaatggcttcccttttcacaatatcatcgccaattaaaaatattaaagcttcaaatcgaagcaaccactcctcagaaaaaacaactatggcaagaaattataaaacaaaaagtactgaatcaagcctttgtcttatcacaagcccaatgtgaaaaagaaagtgctaaattacacattatggcaaaacaggttaaatcaggcgataaagagaatattgaggctcaagcggcattactttattttcaaactttattcggaaaaacttttcataggacagatgatgataatatcaatagccacttaaattatgcttacactgtattacgttctgcagtagcacgttgtttagtttattatggttggttacctagcttaggaatttttcatcatagcgagttgaatgcctttaatcttgccgacgattttattgaaccttttcgcccgcttgtcgatttactagtatgggaattatggaaacaaaataaattagataaaggcttaacaccttataccaaacaacaactcattaaaattttacacaaacaaatacaatttcaaaatgaaacattaagtgttctaagtgcaatagatcgcacaattgcatctttaaaaatagcatttatcagtaaaaatgccaaacagttaaaattacctaacatattacctttagaggaatatcattatgagtgaggcaaaatttatgcgaataattgttttttttgatttacccgtcaccacaaaatcgaaacgccgagctgctaatcaatttcgtcagtttttgttaaaagatggctatcaaatgttacaactatcggtctattctcgaattgttagaggaagagattcgttaattaaacatcacaaaagattatgtcaaaacttacctgaagaaggctctattcgttgcttagaggtaacagaaaaacaatttgcaagtatgcaattattattaggagaattaaaaattcaagaaaaaagggtaaacgcgaatcaaatgcttttattttaaacagctgtcgttacaaaaatactatttttacgtttttttaatcgctaaatattaaagtttttatcagaaaaaatcataaaaaaacacgaataaatagtgatttactcgtgttttttatgaatcaaaatcgtattaacacattgttttaaaaggttttaacacgataatattgtagcatagcgaaatgagaaagggagctacaacacaattatcatttgaagagacaagagatgaattgtagcatagcgaaatgagaaagggagctacaacgaaaatgctatgtttttgctatgttttataattgtagcatagcgaaatgagaaagggagctacaacgatatcacatggcgaagaagggcctaaaggattgtagcatagcgaaatgagaaagggagctacaacaagccattgatacgatttcagcagaattttattgtagcatagcgaaatgagaaagggagctacaacaaagtttttagccgtattttgtggtttacaattgtagcatagcgaaatgagaaagggagctacaacagggcttaaagagttcgttcacggttacaaattgtagcatagcgaaatgagaaagggagctacaacgaaagcaaaccgctatagagagcgcatttcattgtagcatagcgaaatgagaaagggagctacaacgtatttcatctgctctttggggaaagtaggattgtagcatagcgaaatgagaaagggagctacaacggttttgcttttcttaggcttcttaaatgcattgtagcatagcgaaatgagaaagggagctacaacttctggtttagtcgtagtattactggaagcattgtagcatagcgaaatgagaaagggagctacaacttcgataccttgcaggatacgtgcagtgcaattgtagcatagcgaaatgagaaagggagctacaacactaaactacatctatccgatgacccaatgattgtagcatagcgaaatgagaaagggagctacaacattcgatcactcatcctacattatcaatcaattgtagcatagcgaaatgagaaagggagctacaactattgttgcagtgctttggttttacccacaattgtagcatagcgaaatgagaaagggagctacaactttctctatttccgattgttgtaattttgaattgtagcatagcgaaatgagaaagggagctacaacaaacactaaaagggataccaaatggctttaattgtagcatagcgaaatgagaaagggagctacaacccaatataaatccctgcgtggttaggtacaattgtagcatagcgaaatgagaaagggagctacaacgctcgaatatgtcttccctcaatcgtcccaattgtagcatagcgaaatgagaaagggagctacaaccgtacggtttagcacgctgtcataatgtaaattgtagcatagcgaaatgagaaagggagctacaacatgtgatcatagattatgttaatattcgagattgtagcatagcgaaatgagaaagggagctacaactgatcaccctgtttatgcaaatgttgatggattgtagcatagcgaaatgagaaagggagctacaactttgaataaggcgttatttttatctgagatattgtagcatagcgaaatgagaaagggagctacaacgttgtgaattgagcattacaccatctccctattgtagcatagcgaaatgagaaagggagctacaacgtaacttcggttttgttggcgtttgtttggattgtagcatagcgaaatgagaaagggagctacaactgaaccaaataacaataatacctttgatatattgtagcatagcgaaatgagaaagggagctacaactatttccaagagcatcagcaatagcttttgattgtagcatagcgaaatgagaaagggagctacaacaaatcattgagcatatcgaccaaagtggcgattgtagcatagcgaaatgagaaagggagctacaaccttactgccaccttttggatcaaggtttatattgtagcatagcgaaatgagaaagggagctacaacaaatcagatgttccttcagcaccagctacgattgtagcatagcgaaatgagaaagggagctacaacgcgattgatgatacattagggaaattaggcattgtagcatagcgaaatgagaaagggagctacaacaatagaagccattgccaccacaggctcggcattgtagcatagcgaaatgagaaagggagctacaactgtggttcgctatcttctccggtggtggtgattgtagcatagcgaaatgagaaagggagctacaaccaacacaattctatccgcttatctctctagattgtagcatagcgaaataaaacgtagctcttgtaaaaattcaagtataaatattgtattttatgcttctttatattattgtgcatagtatatattttaaactaaacatatcgttccaataaaataatcacactcttcataatagtttcagaaaatacatgcttaaatcaatgtgtattccaattttagtgctaaaaaatttttaatttacttaaattataaagggagattcatctatgaaaatcaataaattatcctatttaatttcactttctttgatcggtgctcttaactcttccgcagaagcctgctctgctcttatcgttggtaaatctgccagtaataatcacagtatgtttatcgcaaggaatgaagattttggcgataataactgggcaaaacatttggtttatcatccctcagaagagccaacagcgaaagagtggaatcttggcgatggtttagttatccctatgcctaaaaagctctacgcttattccgcactgccagactgggatgccaaagaatcaaataaagaagggaaatattttgaagagcgtggcgtaaatgaatttaatgtcgccctttctgcaactaacagtgctgacgttaatgaaaaagccaataaagttgatccccttgttaaaaatggcttatccgaagcattgattccgagcattattttgccacaaatcaaaaccgccaaagaaggcgttgagttgttaggaaaataccttaaagattatggtgcatccgaaggaaatattctctattttgcggatgaaaaagaaatatggatgatggaaatcggctcaggacaccattggatcgcagtgaaagtgcctgatgatgcttatgtgatggttgccaatgcgttaagaatccataatgtcgatttagactcgcctgatgttttacattcagaaggcttatatgaatttgtggagaaaaataaattactcgataatccgaataaaaaatcatttaattttgccaaagcctttggtgtattaggagatacttacaacactcaccgcgtttggttaggtcagaaaatgctgtctccttctatcaaacaatctgaaaatgaggctatctatccattattccaaaaacccgattctccgattgatattacaaaaataaaacaggttttaagtgctgattttaacggtacaattcttgaaaaggatggtaaacgaccaatgagagtcgaacgtcaattagaaacccatattattgaaatacgtccagaaaaaccaaaagcattgcagatcgtcacttggcaaagtttaggggttttatccgaatcattagttgttccactttattcaacgatgacgaaataccctaactcatttgtgatgggaacagaccaatatgatccaaattcagcctattggcaattccgtagtttaaccacgttggcaaatacaaatgctcaaaaatattatccttttattcataaaaatcttgctgtggaacaaaaagatatcatagaacgctttaatcaagttgataaacaattatcagcaataaaagccgtaccaatgatgaagacaaaatcagcggatttttcagtcaaagaattaaatcacgcctatgattttgcaaaatcattaaattccaaaataatgacagatttaacaaaaatgagcgaggggaaaaaatatactgaaaaagaacagaaagccattttgacactgcctaaagaataaaacacccacaaaggcaaccttctggttgcctttccctaacaagatgattgccgttactttgcattcaataatagaaatattctcttccttacgccactttttaaaagattactgtaaataaaaccactttccccttttacattcccctaattttccttaaaatcccccccaacaagcggttaaatttttataagaatttgcaaaatgaataatgaattattagacggtgttcccttaaccgcattagcgggagtgggggcgaagattgcggagcgattgagtaaaattggaattaacaacgtgcaagatttgttatttcatttgccgtttcgctatgaagatcgcactcgcattacaccaatttgtgacgcacgtcctgaaagttatgtgacggttgaaggctatgttcaactggctgaaattcaatttggacgacgcagaatgttgaacgtcgttatttctgacagcaccagtaaaattaccctaaaattctttaattttaatatgggaatgaaagcaagttttgcactcggagcaagagtcaaagcttttggggaagtaaaacgtggacgttttatggcagaaattcatcatcctgaatatcaaattatctataataatcaacctgttgtgcttgcggaaagtttaacccccgtttattccaccaccgaaggattaaaacaaaatgcgttgcggaaattaacggatcaagcattggcattgttggatcgtgtcaaagtatccgaattgttgccagaccaatttaatccacaccaatacagtttaaaagaagcactgaaattattgcaccgcccaccgccaagtatctctgccgaagagttagaaaaaggacaacaccctgcccaaaaacgcttaatttttgaggagttattggcacataatttggcaatgcaacagcttaaagtgggagcaaaacagcatttagcggagagcttacattaccaaagtgatctcaaacagcgatttttggcaagcctgcctttctcaccgaccaatgcccaaagtcgcgtcacccaagagattgaacaagatttggcaaaaccacaaccgatgatgagattggtacaaggcgatgtgggatcagggaaaaccttagtcgccgcattagcagcattattggcgattgataatggcaaacaggttgcgttaatggcaccgactgaaattttagcagaacaacacgccatcaattttgcgaattggctcaatccttttggcgttgaagtcggttggctcgcgggaaaagtgaaaggaaaagcacgtaaagcacaacttgaagccataaaaaatggcgaagttcagatgattgtcggcacgcacgcactgtttcaggatgaagttgaatttgctgatttaagtcttgtgattatcgatgaacagcaccgttttggggttcatcagcgacttaccttgcgagaaaaaggcacgaaaaccatcaatggtgaaaatgtctatccgcaccagctaattatgaccgcaacccccattcctcgcaccttagcgatgacggtttatgcggatttggatacttcaataattgatgaacttccaccgggacgaaccccaattaccactgtggcaatttccgaagatcgccgagcggaaattgttcagcgtgtttatcaagcctgtaaaaatgaaaaacgccaagcctattgggtgtgtactttgattgatgaatcggaagtattagaggctcaggcggcggaatctatcgccgaagatttaatccgagctttacccgatttacgcattggtttagttcacggtcgaatgaaaccccaagaaaaacaagccattatggcagaatttaaagacgcaaatttagatttattggtggcaacaaccgttattgaggtgggggttgatgtgccaaatgcaagcctgatgattattgaaaactccgagcgtttaggcttagcccaactgcatcagttgcgtggacgtgttgggcgtggagcaactgcctctcactgtgtgctgatgtacaaaccgccactgggtaaaatttctaaaaagcgtttgcagatgttacgagatagccaagatggttttcttatcgcggaaaaagatttagaaattcgtggccccggcgaagtgttgggaacgaaacaaacgggcgtggctgaatttaaaattgccaatttaatgcgagatcgtaaaatgattccgttagtgcaacattatgccaaacagcttattttacaagatcctgcgattgctcaacagctgattgaccgctggcttgatgatcgcaccgactacggaaatgcataagcggtaaaatcttgaaaaaatttgaccgcttcattgcattatattagaacaacgttgctaacgtttcgtaaattaactgcatatttaagataacaagcaccaccgttgaaataacgccaagaatagtcacaatttttgagtttacatactcgcccatttctttcttgcttgatgtgatcttaataagtggaatcatagaaattggtaacgctacacataaaaagacttgtgagtaaataagtaacgactcaaccacatcgccacgatcaccccaaaccataatacagatgataacaggcaacaccgcaattaaacgagtgacaatacgacgaacccacattggtacacgtaagttaatgaagccttccattacgatctgaccggttaacgtccctgtgatagttgcattttgacctgatgctaataatgccactgcaaataatgacgctaatgtaccacttgcgattgggccaacaatttcaggatttttcaatgcatcatataactgtgtgaatttacccaattgctccggatcatttccgaagaataatgatgcaccaagtaataagagtaagcagttaataatgaaagagaaacctaattgaatatttgagtcaatagttgcaaatttaagtgcatgtttaagatctactgggtcatttctatcgtattttcttgtttgtacgatagatgagtgtaaatataagttatgtggcataaccgttgcacccacgatacctaatgcaattactaatgctgaatcctgccctgcaacgtgttcagtaaagatactggtttttggcataaagccatttaaggttgcagctaaatcaggctgagccaaagcaacttcatacgcaaaaatagtgaaaattgtgagaataagaataaagacaaaagcttcaatttttctaaatccaaaacgcattaacactaagagtaagaatacgtctgcaatggtaattaacacacccattaacaatggaatatcaaataataaattcaacgcaacagcagaaccgataacctcagcaatttccgttgccataattgcaagctcagtagttacccataaaacttttgccatttttggaccaaccattgctttggttgcttgggctaaatccatcccttttacgatacctaattttgcacacattgcttgcaacagcattgcgattaaacttgaaagcaagatcacagaaagtaataaataaccgtaaaccgatcccccttgaattgaggtaatccagttaccgggatccatatatcccacagcaactaatgcgccaggtccagaaaatgccataaggtttgaaaagaaaccttttttacgacttggaatagaaaccgtattattgatctcttcaagacttaaattaaagttgtcattttgattcatttttgtttacacacccttaaatgataatgattattgattgagaaatgaattttaattagattaggatttattgtcaataaaatagacaaaataaacaaataaaaaccagttcaatttattatcttttcccttgaattcctcaaatctgttattatattgaataagattttaaacttaatttaaaggatataaaatgaccaacaaaactgaaagcacccaagaaaacaaccaagttgagcaagaaactgacattcaagaagaattacaaacagaacaaaccattgaaattcaagacgaaccaaacttagaaattgatgaattaaccattgctcagactcgtattgctgaattagaaacttatatcgcagaagctgatagccgtgaaagagatattttattacgtgccaaagcagaaaatgaaaatattcgtcgtcgtgcagaacaagatgttgaaaaagcccataagtttgcgttagaaaaattctcaaaagaattattaaatgtagtagataacttagagcgtgctttgactactttagaaggtgcggatgaaagcgtaaaaggtttagcagaaggtgtacaattaactcataaagaattgacctctgtattaaatcgtcacggcgtgcaaggttttggggaagtgggcgaggctttcaaccctgaaatgcaccaagcaatttcacaacagcctgctgaaggcattgaatcaaattgcgtaagcgttgtattacaaaaagggtataaattaaatgaccgcgtcattcgtgatgcaatggtaatggttaccccttaaatttgattttttctgcccccttcaccgcaagggggcttttgtatttttaaaaggataggaaatgtctttacaacttaatgccatcgctttacttctagcggtgcttatttttctcggattatttagccaaaacagcccagtgactattt

SEQ ID NO: 3173 - DNA, 23177 bp, synthetic construct
  misc_feature 1..23177: note = Synthetic
  source 1..23177: mol_type = other DNA
tccagtgttaatggggtcagcgacaccgagtttagaaagtctaaataatgttcataatggcaagtatcgccatattattttatcaaacagagcgggtaatgctgcattactacgtcattctgtgatcgacttaaagcaacaagttgtgcgtaatggcttatctgaagcgttgttacagcgaatggaaaagcacctacaaaaaggtaaccaagtgttactttttttaaatcggcgtggttttgctcccgtgatgttatgccatgaatgtgggtggattgccgagtgccaacattgtgagaaaccttatacttatcatcaacatcagcgtgctttacgctgtcatcactgtgcggcacaaaaaccgattccgcggcaatgtgagcattgtgggtccacacatttgatcaccactgggttgggaactgagcaattagagcaaactttagcaagtcgttttccacaatatcaaattacgcgtattgatcgtgacagtacggcacgaaaaggcaaattagaggattatctcaccgatattcaacaggggaaaagtcagattctgattggtacacaaatgctcgcaaaaggacaccattttcctaatgtgacgttggtggcgttagtgaacgtggatagtgccttattctctttagattttcgtgcagaagagcgcttggcacaactttatgtacaagtggcaggtcgtgcaggtcgtgtggagaaacaaggggaagtgctgctacaaacccattacccagatcatccattattacagcgtttgttgcagcaaggttatgcagattttgcagagtacgcgttacaattacgacaaaaaatgggcttaccaccgtttagtgcacaagcattgtttaaagcacaaagccggcattcagaagacgtcgagcaagtcttgcagcaagttgctgagtatttttacacttggaatcaaagctcgcagtgtgcgatacaaattttaggaccgattgcggcacctttcagtaaaaaagctggtcaatatcgttggcaattattgctacaacatccttccagagcccagttacaccatgccttatcggcatttcaagcaacatcaacgattaaatttggttcagtacgttgtgtattagatgtggatcctattgatttaaattagcttgtgtttgagttataagggatttttcagtagaattgtgccaatttttatgaatgtttttaggaataggttttagcgtggcaagacgaaattatgccggtcgtggcagtagaaagaaaaagaaaggaacaagcaaaatggtattattactgttagtgggggtaatcattgccgttttcctatctgtgttgatgttgatgaaagagaaaacgccaaaggaaattgtggcgcttcctaaaagtgaaaatcaatcaacgaaaagtgtactaccaaatcgtccagaagaagtgtggagttatattcaagcattagaaacgcgtactgtacctgttacggatgatccaaaaatcttagataagaatatgcgtttgacagaagagcaacgaaaaattttattggcgatggaacaagaacaaaaagcagcagaacaggcgcgtttaaaacaacaagaagaacagcgtaaaatagaagagaataaaaaagaagagagtaaaaaagacaatagcgcaacgctgataaaaacaaacgaaacccaaaatgggcaagctaaggcagtcaataaaccacagactacacctgctgtgattgaagtgaaaaagggagagccggtgaaagaggtggttaaagtggaaccgcctaaaaaagtcgaggttatcaatgcgacaccgagtgagaaaaaatatggcttacaatgtggtgcatttaaaaacaaaacgcaagcagaaaacttgcaagcgcgtttagcaatgttagggctcaatgcaagggtcaattctaatcaagaatggaatcgagtagtaatcggaccggtaggtgatcgtgcctcaaccttgaaagctcaagaaaaagcgaaagcaatcgcacagtgtgtggtgattggtatgtaaatgtggtgtatgtaaaaaaacgtgggattctcccacgttttttgtttttacacttgcttaaatattaaaaagtcttaaaatgaacgatcgttcatttcagaaatacagatctgtttctgactttttatttcattcatttagtgaacttattatgcgtcaatctgatatagatatgactgagcatatttttatagcaatcgatcacctgatggcgaaagaagggttacataatctttctatgcataaaattgcaaaggctgccaaaatttcaccagggaccatttatatttattttaagtgtaaagaggaattgctagaacaatttgctcagcaagtattcgcacgttttcagcgtgcattagaaaagaatcatgacgaccgtcagccattctttgaacaataccgccaaatgtggtggaacatttggcattttttgttggaaaacccaaatattttgttaaatatgcaccaatatcaatccctgcctgggtttgataaggtgattaaatcgtgggatcgtagccactggacattgttttgcgaaagagcacagcaagccggtgaggtatgtgatttacccaccaatattctttttgcacttggactagaaagtgcaataaaaattgcttggaaacaaatttattttaaagaaacgttctctgttgagttgctggaatctgtgattcaacggacatggtgtgctattcaaaaataatttatcttttaattttacggagtttttgtatgagtgtgactcaagcaaatcaaccaaaacgatctcattcgattgccatgaaaatcattctcggcgttattgtcttactttttgctggggtcattatttttaatgtgatcaaaggcaaaatgattgaaaaatttattgcgggtgctggggaaaaaatttatcccgtaactgcaatgactattcagcctcagcaatggacacccgtgattgaaaccactggcattgtgcgtcctaatcagggcgcgatgttaagtgcacagacatcaggtacagtacagcaagtcttagttcaatctggacagcacgtgaagaaaggcgaggtgttagtggtattagacagttcagtagaactagcgaacttgaaagcatcccaagctcaacttttatctgtgaaagctacataccaacgttatttaagtttgtataaaaccaagagcgtgtcgcaacaagaacttgataatgcaaaatctgcctatgaagcattagagtcaaatatcgctgctttaaaagcgggcattgcacgtcgtcagattttggcgccttttgatggacaaaccggtattgtgaaagtcaacgtcgggcaatatgtcaatccaggaatggaaattgtacgtgttgaagacaccagtagtatgaaaattgatttcgccctttcacaaacggaattggaacacttacatgttggacaaaaagtgacagcgactgctgatgcgcgtagtggtgaaacctttgcggcaaagattactgccattgaacctgcgatcagcgcaacaacagggttaattgatgtacaagccacctttgaaccagaagatggacgtaaactcctttctggtatgtttactcgcttacgggttgctttgccgacaaaatatgatcaagtcgttgtgccacaagtcgcgattaattacaacatgtatggggaaattgcttatattcttagcgaactttctgcagaagagcgtgaaacattagtcgcacgacaggatttcgaccgcgaaaaaattgacaatgcctatcgagttaaacaagtcactgtatttacccaagatcgccaagggatttatgcccagttaaaaggggaagaaattaaacccggtgataaaattgtaaccggtggacaacaaaatttaagtaatggcagtttagtactcgtcgctgataaagccggggtgggaaccatgcaacctgctgtaaaaaataacctataaagtgcggttccaaagaggaaaaatttgatgaactacgccttattattaaaacaacttgaacaaattctagaacctgaaacctatatcatttcaagaatggcaaatacgtcagcttttttgtatcagcacatgccggaattaaactgggttggattttatcttgtcaaagacggggtactcaaagtcggtcccttccaaggtaaagttgcctgttctgatattggctttggtaaaggagtatgtggttatacttggcaaacgggcacaacgactgtcgtagatgatgtacatcaatttgcggggcatattgcttgtgatagcgcatcacaatcagaagttgtagtaccgatttttcaagggggagagatgattgctgaattggatgtcgattcacctcgtttagcccgtttttccgcagaagatgtagcctttttagaaaactgtgcgacacttatctgtattaaggaataggaaattaccatgcgatttaccgatatttttattcgacgccctgttttagcggtttctattagcttgctgattattattttaggattacaagcgattgcgaagttagctgtgcgcgaatatcccaaaatgactacaacggtgattaatgtttctacggtgtacccaggggcagatgcaagtcttatccaagcgtttattacttcaaaactagaagaagctgttgcacaagccgataacattgattacttatcttcaaaaagtagcccaaataactcgttaattacaattaaaatgaagctaaataccgaaccgaacggggctttagcagacgtgttagcgaaagtgaactctgtacgttcgcaattaccacgggggattgatgatccggtcattacgtcttcgacggggggaacggggatgatgtacatccagtttagctccactaaactggatgctagtcaggtaacagactacattgaacgtgtgattaagccacaattctttacggttgaaggggtggcggaagtacaaatctttggggcatcggattatgcgctacggatttggttagatcctgccaaaatggccgcacagaatttatccgcgatggcggtcagaaatgcgttatcttcgaataatgtgcaaacggcggcggggaatgacaatggtttttatgtcacctataaaaataaagtggagacaaccaccaaatcagtggaagagctggggaatttgattatttcctcacaaggcgataagttagtgcgtttacgtgatatcgctgacgtagaattaaataaatcgagtgatagctcaagagcggttgctaatggttttgaatctgtggtgttagcaatcaatccaacctcttcagccaacccactcgttgtggcagaaaatgtgcgtccattgtatgagcaaattaagcaaaatttgccagatagcatgcaggcagaaattctttatgacaccacgatagcaattaatagctcaattgatgaagtgatcaaaaccattttagaggcgacaatcattgttttagtggtgatcacattatttattggttcattgcgtgcaattctcattccggtgattacgattccgatttctttgatcggcgtaatcatgctgttacaggcgtttgatttctccattaatttaatgactttacttgccttaattttggcgatcggacttgttgtggatgacgccatcgtggtgcttgagaacgtggatcgtcacattaaattaggcgaaacacctttccgtgctgccattattggtacacgtgaaatcgccgtgcccgtgatttcgatgaccattgccctcatggcagtttactcgccaatggcattaatggatggcattacaggttctttgtttaaagagttcgccttaaccttggctggtgcggtatttatttctgggatcgtggcgttaaccctttcaccgatgatgagcagtaagttgcttaaaccgcatactgacccaagtaagttggaacaatgcatcgaaaaaatgctcaccatcattaatcatggctataactatgctttaaatctggtgatgacaagccgtcgttgtatgctggcttttgcggcggttatttttgctacgctgcctttcttgtttaatgggttagcgagtgagttaaccccagcagaagataaaggggcgttcatggtgattggtcgtgcaccgtccaatgtcaatgtggattatgtacaagaagcaatgcatgagtatgaacagattttgaaagacacaccggaagtggatttttccatggtgatttcaggggcaatgggaagtaaccaatcctttagtgtggtgacattaaaagattggaaagaacgtacccgtagccaagcggaaatcttagcggagttaaataaaaaatcggcgcatattccagaagtggcgttgacgggatttaacttcccagaaatcaacacgggagagcaaggtccaccaattggttttgtgatcagtactgcgagtggctatgaagatttagccaatgtagcagaaaacttcctacaagaaatgaaaaaatccggtcactttgtttataccgcgttggatttaaaatttgatacggcgcagatgcggattaaagtcgataaagaaaaagcaggtacctatggtgtcacaatgcaacaaatcagtgccacattagggagtttcttgtctgcagccacgattgaacgagttgatattgatggacgtgcttatcgaatcatcatgcaagttaaacggggtgaacgtttgtcaccagaaagtttaaacaactattatgtgacggcaagtaacgggaaatcagtaccattaagcagtttcttaaccatgacgttagaatcacagccaacttctttacctcgttttagccagcttaattcagcggtcattagtgcagttcctctcccaaccaaaagtacaggtgaggcgattgcgtggttaaaaatggcagcgaaagagtatttaccgcaaggctataattatgactttactggtgaagcgcgtcagttagtccaagaaggcaatgcattagccgttactttcgtacttgctgtggtgattatcttcttggtcttagcgattcaatttgagtcaattcgtgatccgttagttattatgatttcggtgccacttgccgtgagtggggcgctattaatgctgaatttcttaggcttcttccgtattccaggaaccagtctgaatatttactcacaggttggtttaatcacgctagtggggttaattactaagcacgggattttgatgtgtgaagtggcaaaagaagagcaattacagcatggtaaaaatcgtattgaagcgattactgaagcagcgaaagtgcgtttacgcccgattcttatgacaaccgctgcaatgattgcaggtcttatccctctcttatatgcttcgggcgcaggtgcggtgtcgcgctttagtattgggattgtgattgtatcaggtttagcgattgggacattatttaccctgtttgtgttacctgtgatttatagctatattgcaacggaacataaaccactaccggaatttgatgaaagcataaaaccgttaacggataatagcgcacattaatttcaacataaaaaaataccgcacaaaagtgcggtattttttgcgtgaaaaacagaattaacgtgtatcttgttcggttgatggccatgcattcaccacagctttgactaaagtggctaatggaatagcgaagaaaacgccccaaaagccccataatccaccaaaaattaataccgcgataataatggttagagggtgcaaattgacggcttcagaaaaaaggaatgggactaataagttaccgtctaaaatttggctgatgacgtaggcagtaatgatataccaaaaagtaggagtgatgccaaattgcgcgacggcaacgagggcaataggaatcgtgacaaggacggcaccaatataaggcacgagcacggatagccctaccgcaacagctaacaataacgaataatttaagttaaagaagatgaaaatcgcgtaagtcacagcggtgacaatgatgatttcgaataatttaccgcgaatataattcgcaatttgttgttgcatttctttccaaacgctcgaggctagcgtacggttacgcggaaggaaacggcttacactggcgattaattctgttttatcttttaataaaaagaacaccattaaaggcactaaaaacgcataaatccctagggtgaccaggcttaataacgaggtcagggagaatttgagggcggattcaccaaagccaagaattttggagcggacagtacttaatacagaatcaatggtttggtaatccactagctcgggataatgttcaggtagagaaagtaaccactcattgagtttattaaacatatgtggcaaatcagtcactaaattcaaggtttgagtccataacgttggaatgaagaccaatacgataacgaggatcaatcctaaaaaaccaccaaaaataatggcagttgagagtaggcgtggaaacttgagtttttctgtgagaacgcgaattggccattccaataaataagctaatacaatagcgatgaggagtggtgcaatgaggtgactaaaaaaataaatggatataaaaccaaagagtaagatggcaaacaaccccatggcttgtggatcactaaaacggttgttataccagtttttcaacatttcgatcataagatatccttaatttaggcattttgagcgattataaggtaaaatctaataagatcatatcattaagcgaggaaattctatgtgcgtgactatatatcataacccacgttgttctaagagccgtgaaacgctagccttactcgaagcgaaatacggtcaaccgaaaattgaactttatttagaacaacaattctctgcctcacagttacagcaaattgcgcaaaaattaggagtaaccagtttccgagagatgatgcgcacaaaagatgaactctatcgtgatttaggcttagataagccggaagtcagcgaacaacaattgttggaagcattggttgcacatagtagtttgttggagcgtccaatcgtcattcatggtgacaaagcaaaaattggtcgtccaccagaatctgtacttgagattctgtaatttcgttttataatgacgcccgtttgtttcacacaaatgggcaattttttatcacaacttatgaggaaaaatatggctaaaaagcaaaaacagccacagagtgcacagccttatcagcacagccgtggtgttattcgcgataatgcaatttgtgcattattacatgatccgttgtttcgtcaacgtattgagaaaaaaaggaaaggaaaaggcagttatcaacgcaaagccaaacatgtagggaaatattttgaaaagcccgattataagatttttgatttgaaagattttataatcgggtttttcttaacgatattttacaacaatgcaactcatttaaactcagcgaggtaaatttatgactgtgcaaacggaagtcctttttagtaataattggaatgttagaatcagcgatccgggcgaagaaggggcacatagccatttctttgaaactatttatattaccttagtcgcccatattgatggctcgaatatttcttatgaatttacaagaaaggtcgaagaacaagttaaaattcaccgcacttttactgatttaagtgagcttttcaaattccttggtgattaccttgaccctgttagcatgggatttctagggattaaaatcgggaatttgggtgttaaagcctaaacgtactttccccaaaaacgatgccccttgcaattaagaatcacaaggggcagagcgttacggtcattcttttcagaagccttattgtagcaacgtctctcatttcgcagtgcaacaatatgtgatccactctacattattgtgtaaatttaatcaacacatttttatttttactttaagataagaaaaacaagtaagttaatcaagacaaataaggaatacatatgcaaacaacaaatttaagttatattttaggtttagatttggggatcgcttctgtaggttgggctgtcgttgaaatcaatgaaaatgaagaccctatcggcttgattgatgtaggagtaaggatatttgagcgtgctgaggtacccaaaactggagaatctttagcactctctcgccgtcttgcaagaagtactcgccgtttgatacgccgtcgtgcacaccgtttactcctcgcaaaacgcttcttaaaacgtgaaggtatactttccacaatcgacttagaaaaaggattacctaaccaagcttgggaattacgtgtcgccggtcttgaacgtcggttatccgccatagaatggggtgcggttctgctacatttaatcaagcatcgaggttatctttctaaacgtaaaaatgaatcccaaacaaacaacaaagaattaggagccttactctctggagtggcacaaaaccatcaattattacaatcagatgactaccgaacaccagcagagctcgcactgaaaaaatttgctaaagaagaagggcatatccgtaatcaacgaggtgcctatacacatacatttaatcgattagatttattagccgaacttaacttgctttttgctcaacaacatcagtttggtaatccacattgtaaagagcatattcagcaatatatgacagaattgcttatgtggcaaaagcctgccttatctggtgaggcaattttaaaaatgttgggtaaatgtacgcatgaaaaaaatgagtttaaagcagcaaaacatacttacagtgcggaacgctttgtttggctaaccaaactcaataacttgcgcattttagaagatggggcagaacgagctcttaatgaagaagaacgtcaactattgataaatcatccgtatgagaaatcaaaattaacctatgcccaagtcagaaaattgttagggctttccgaacaagcgatttttaagcatctacgttatagtaaagaaagcgcagaatcagctacttttatggaactcaaagcttggcatgcaattcgtaaagcgttggaaaatcaaggattgaaggatacttggcaggatctcgctaagaaacctgacttactagatgaaattggtaccgcattttctctttataaaactgatgaagatattcagcaatatttggaaggcaaactgcctgattcagttatcaatgctttattagtttctctgaatttcgataaatttattgagttatctttaaaaagtttacgtaaaattttgccattaatggaacaaggtaaacgttatgatcaagcctgtcatgaaatttatggtcatcattatggtgagaaaaatcaacaaatctctcagctgttacccgtcattccaacacaagaaattcgtaatcctgttgttttacgtacactttcacaagcacgtaaagtgatcaatgccattattcgtcaatatggttcccctgctcgagtccatattgaaacaggaagagaacttgggaaatcttttaaagaacgtcgtgaaattcaaaaacaacaggaagataatcgaactaagcgagaaagtgcggtacaaaaattcaaagaattattttctgacttttcaagtgaacccaaaagtaaagatattttaaaattccgcttatacgaacaacagcatggtaaatgcttatactctggaaaagagatcaatattcatcgcttaaatgaaaagggttatgtggaaattgatcatgctttacctttctcacggacttgggatgacagttttaataataaagtattagttcttgccagcgaaaaccaaaacaaagggaatcaaacaccgtatgaatggctacaaggtaaaataaattcggaacgttggaaaaactttgttgctttagtactaggtagccagtgcagtgcagccaagaaacaacgattactcactcaagttattgatgataataaatttattgatagaaacttaaatgatactcgctatattgcccgattcctatccaactatattcaagaaaatttgcttttggtgggtaaaaataagaaaaatgtctttacaccaaacggtcaaattactgcattattaagaagtcgctggggattaattaaggttcgtgagaataatgaccgtcatcatgctttagatgcgatagttgtggcttgtgcaacaccttctatgcaacaaaaaattactcgatttattcgatttaaagaagtgcatccatacaaaatagaaaataggtatgaaatggtggatcaagaaagcggagaaattatttcacctcattttcctgaaccttgggcttattttagacaagaggttaatattcgtgtttttgataatcatccagatactgtcttaaaagagatgctacctgatcgcccacaagcaaatcaccagtttgtacagcccctttttgtttctcgtgctccaactcgtaaaatgagtggtcaagggcatatggaaacaattaaatcagctaaacgcttagcagaaggcattagcgttttaagaattcctctcacgcaattaaaacctaatttattggaaaatatggtgaataaagaacgtgagccagcactttatgtaggactaaaagcacgcttggctgaatttaatcaagatccagcaaaagcgtttgctacgcctttttataaacaaggagggcaacaagttaaagctattcgtgttgaactggtacaaaaatcaggcgtcttggtcagacaaggcaatggggtggcagacaatgctcctggctctatcgttcgaacagacgtatttatcaaaaataataaatttttccttgttcctatctacacctggcaagttgcgaaagggatcttgccaaataaagctattgttgctcataaaaatgaagatgaatgggaagaaatggatgaaggtgctaagtttaaattcagtattttccctaatgacctcatcgaattgagaactaagacagaatgcttcttaggctactatattggaccagatcgccacaatggcagtattagcttaagagagcatgatagtgaaatatcaaaaggtaacgctggcgtttaccgtgttggtgtcaagttagcgctttcccttgaaaaatatcatattgatgaactcggtaaaaacagacgaatctgccggcctcatcaaagacgacctgtacgttaaattatattgtcccgattccctttatatggcaatcgggatttttttaggagtaatcatgagctggcgaagtatcttaattagtcatggtggtaaattatcgctacaacgaaaacaaattttaattcagcaatccgataacacattcactgtccctttagaggacattgctgtgatcgtgatagaaagtaaagaaacgatcattactgctcctctgctttctgccctcgcacaatatggcgtgaccttacttacctgcgatgaacaatttttaccctgcgggcaatggctaccttttgggcaatattacaggcaattaaaaaccttaaaactacagcttgagacaacattgccacagaaaaaacaactttggcagaaaatagtacaacaaaaaatccgtaatcaagggtttgttttagaacaagtgggttatgttaatgaaacgaaacgtctaaaccgaatggcaaatcaagtgaaatctggtgataaagaaaatgtagaagcacaagcagcattaatttatttccaaactctattcggcaaaacatttaagcgaagtgatgaaaataacattaatgctcatcttaattatgcttataccatcttacgatcagctattgctcgagctttagtattatacggctggttacctcagttagggatcttccatcgcagtgaagtgaacccttttaatctggcagatgattttgttgaaccttttaggcctttagttgatttgatggtatggcaactatggcatacaaaccaactcacttcaggattatcgccaaatatcaaacaaaaacttatcggtttgctacatcatcaaatgtcatttcaagaagaaactttcagtgtactcgcggcaatagatcgaacagttggttcctttcaagcagcccttaccactccaaatgccaatttactaaaattacctgaaatactccccctaaaggagcatcaatatgagtgagggaaaatttatgagattaattgtcttttttgatttacccgtgacaacaaaagcaaaacgtaaagcagcaaatcaattccgtcaatttttattaaaagatggttatcaaatgttacaactttctgtatatgctagaattattcgaggtcgagactccatgcaaaagcataataaacgactcagtgatcatctcccagaagaaggttcaatacgctgtttagaagtgactgaaaaacaatttgcaggtatgaaaattctattagggaagttgaaacttcaagagaaaaaagtaaacgcaaatcaaatgctacttttctaagtagactatttatatactctataaaaataaacgaaaagactattctatattctagcctagagtgactcagaaacagggggaacatacaacagatgctatctctattagacaaaatcaattgtttttttaagaaaaaatttctaaaaatagactactaaatatcgtaaatttaagtaatttttgagtattaaaaatgcccttatcccttgtgttataagggataagggcagaaacattgtagcactgcgaaatgagagagggaactacaactttaaacggtctgacaataatttgctcacaattgtagcactgcgaaatgagagagggaactacaacaaaaagatgatccttttgacaagcttaattattgtagcactgcgaaatgagagagggaactacaactatcaagcgcgccttttgtttcattgatttattgtagcactgcgaaatgagagagggaactacaacgagttgttcggatttattaaaggcgtggtgattgtagcactgcgaaatgagagagggaactacaacaaatattgcagtatttaaagcgtactaacaattgtagcactgcgaaatgagagagggaactacaaccgagaatttggttatgcatcagtgaatctaattgtagcactgcgaaatgagagagggaactacaaccaaataacaaaccttccataattctttgctattgtagcactgcgaaatgagagagggaactacaacaaccagtggtgaacgttgaagaaacgaagaattgtagcactgcgaaatgagagagggaactacaacgttttgcagcgatacttgcaagctctgttgattgtagcactgcgaaatgagagagggaactacaacaggacgtaaagcccaattaatccatgataaattgtagcactgcgaaatgagagagggaactacaacataccaacaagaccttccaattggtcatcaattgtagcactgcgaaatgagagagggaactacaacaagttgtgttgattatgctgttggttatgtattgtagcactgcgaaatgagagagggaactacaactaaagaatggctcactaacctgtttaacttattgtagcactgcgaaatgagagagggaactacaactgatcgtcattacgatacgccgccaaacctattgtagcactgcgaaatgagagagggaactacaacaaagacgggcgtttcccaacgatgattatcattgtagcactgcgaaatgagagagggaactacaaccgttgttaattgcttattttaataattctaattgtagcactgcgaaatgagagagggaactacaactaatctgcatgaacataccgatcatgtatttaataacttgaccgccctgtgtcatattttttgcgttaaagctcattttctaacctatctatcaaatcatttattctctaattttcatgttttttgggttcagtatgttgataattttttattcttcctcactacttgttgtaccatagatatttccctccatatcaacgccatgtctatttaatggcaatccatttatattcgtacggataaattgaggtttttctttttggttcaatttcttttgttcttcatttaatttatctaagaacaagctcaattttttcatgaaaaggattaatttctttaacatataaaattctcctatttcttatcatcatagattctattattttgtttttctatattggttgatacatctttgaagctgtcatgtattgctttattaaatccctcttttttcacatagccatatctaacttcttcattacttggattatttttatctaattgttcaatagtagattttagccctaactcctctggagttttcaatgtatctgaatttccaaatacattactattaactggggaataggttgcgccaccaattgtagcactgcgaaatgagagccacaaaaataacagtattattgcgctttgtggctgattaaaatcgtttcatttgagaattaactcaaccttgctttcgcttcagcgatggcttctgcaacacgaagtggtgatacgccacctttggcacagcgtttatctaaacaagattgcagagataggatctgatacacatcttcttcgacaacatcactaaattgtttaaattcagcaacgctgagtgcttcaagcgctttgtgctgttggatggcataaacaacggtttcgcccacaatatggtgagagtcacggaatggtacgcctttggcgaccaaatagtcggccagttcagtggcattggaataaccttttaaagcggcttctttggtacgttctacattgacttgaatgccgtctaacacaagagccgccatgtcgatacagtcttgccaagtatctagggcatcaaaaatcccttctttgtcttcttgcatatctttattataggcaaggggtaaaccttttaaggtcatcagcatgcctgttaaggcacccatgacacgacctgctttacctcgaattaattcacaagcatcggggttttttttctgtggcatcaaggaagaaccagaagtcacgcgatcggaaagctccacgaagttagattcaccactgttaaaaatgatcatatcttccgcaaaacgtgaaagatgtgccatgcttagtgaggcagtagaaagcagttcaacgatatgatcgcggtctgacacactgtctaaactgttgcgtgtggcaacgtcaaaaccgagatcgagggctaattgttcacgatcaatcgcgtaagcggtgccagcgagggcaccactaccgagtgggcagctattcatgcgttggtaagcatcggttaaacgggagtaatcacgatcaagcatttccacataagccatgcaccaatgggcaaaagtaatcggctgagctcgttgtaagtgggtataacccggcatcaccgcatgttggttattttcggctgtttcgacaagtttgcattgtaaagcgtgaagcgaagattgcagttcaatcacacgttgtttacaccacatcttaatgtccagtgcaacctgatcattacggctacgtcccgtgtgtaattttttacctaaattcccgactttatcgattaatttactttctacccagctgtgaatatcttcagcatcatcttgcaaaatcgcttgtggatttgatcgcacttcaattaagagagtattcagtgcactttctaactgttgttgttcttgtgcggtcaataccccaacgctgactaaagcttttgaccagccaatggaaccttcaatatcttgttctgcgagacgataatcgaaacgtaatgagtcattaaaatctttaaaacgcttatctgcggcttgtgtaaaacgtccaccccaaagtgccataacatcctcttatttttatggtttaattcttgtgccaatgatttcaccagcaaaaagtgcggtgagtttttctggatatttccaattggcgatatcgacgccctgatttaacattttagcagcgtctaatgcggcattcaccttgacaaccataccatcggtaatgacgttgtctttaattaattgttcaatttgcgtaccatttaattctggtaagcgctgtttgttggcatccaatacgccatcgacgtcagataacatgactaaatcggcttggatgagcgcggcgatagctgtggcagcttgatctgcattcacattcattaataagccctgtttatcgaccgcaattgagctaataataggcaagaatgcctcaccaagcaaattgtttaataatgcgggatttttaggaaccacagtcgccacatgtccaagttctggatctaattgcgttgcataggttaaattcccgtctgccaaacatagtccgacgggatttaaatgaaatttggcggcttgtgcaactaaagttttattggcaatgccggctaacgcacccgtaataatctcaatgtgatcacttggcgtgacacgcaaaccatttttcttttgtactggcaaatgtaaacgttgcatcaactcatcaacaatacagccaccaccgtgcacaatgaccaacgggcgatcaaagttttgttggtaatttgctaacgccgtaaataaattttccattgctgcaggtgtatcaagtaagacaccacctaatttaatcactaaaggtttcatttaaagtaatcctaatgtttcagtcaaaccataacgaatgttagcacattgtactgcctgggctgccgccccttttaataagttgtcttctgcgccgatgataatgatatgaccatttttagtcgcaaagccaatatcacaataaggagtaaattcgatggctttgatacttggtaaaccttgttcataaacacggactaatggtttgtcagcataggcgtgttgataagctacacgaatctgttcgtcactcacgccggtttttagttttgctgtgattgtcgctaaaataccgcgtttaaagttacctaagtgtggtgtgaaaatgacctctgtccccaaatgggtcgctatttcaggttgatgacggtgattaaacacaccgtaagcatttaaactgacttcacagaaactgcttgttaaggttgctttgcgaccggcaccactgactccgctgacggcattaatcacgggtaattgggttaaatctaataaattgtgtgcaattaagggtttaagacttaattgagagacggttggataacagcccgcgacggccactaaatccgtttgtttaatttgatgtgcattccattccgctaaaccatacaccgcttgtgtgagcaattcaggatgttgatgctcaaaaccataaaacatgcgataaaatgccgcattattcacacgaaatgcgccagataagtcaaagactttgcattgatgttgtaaaaaaacaggtgcaagatcatgactgacttcatgagcggtggcgagaaacaccagatccgcttgttgtgcaagttgagtcaattgttcaggcagtggctgtaaaggtaaatccacaagatgcttgagttgtggataaatttcactcatgcatttattggcatcttggctttggcgagagacgtacagtccggtgagctcaaacttggggtgtttgattaaaatacgagcaagttcagcccccgtataaccacttgcaccaatgataatcgctttttgcatattgttttgtgccttataataagataaattttttaaatgactaattatgctattattatgcataaatatttaaaaggcaatgtctttctatttatcaagggaaaaacgatgaaaaaaattccttcttttttgcaaatgtattccgcactgatcgcttcaccaacgatgagtagtattgatccacattttgatcaatctaaccgcaccttaattgaattattagcgaattggctgagttcccttggttttaaaacagaggttattcctctagagggaagtcgtgataaatttaatttattagcgacttatggtgaaggggaaggcggtttactcttagcgggacatacagatactgtgccttttgatgaggggcgttggcagtttgatccgtttaaacttactgaaaaagacggtaagttttatggtttaggcacggcagatatgaaagggttttttgcttttgtcattgatgcggtaagccagttggatttaacgagattgacaaaacccttgcgcattttggcgacggcggatgaagaaactaccatgttaggagcaagaacttttattcaacatagccatattcgtcctgattgtgcgattatcggtgagccaacatcattaaagcctattcgtgcgcataaagggcatgtaggtgaagcgttacgaattacaggaaaaagtgggcactcgagcgatcctagcaaggggattaatgcgattgaattaatgcacgaggcaacgggttatttaatgcaaatgcgagatgaattacgccagaaatatcatcacagcgcgtttaatatcccttatccaacgatgaattttggcgctatttcagggggagatgcggtgaatcgtatttgtgcttgctgtgaattgcattttgatattcgccctttgccgaatttacgtttaacggatctgaacgaaatgttacaagcaaaattagccccgatgtttgaaaaatggggggatcgcatttcgttacaagctttgcatgaccctattccaggctatgaatgtgcacattcggcacaagtggtgcaggtggtggaaaaattattaggtgagcaatgtaagacggtgaactattgtacggaggcgccttttattcaacagctttgtccgaccttggtattaggtccgggatccattgagcaggcacatcaaccagatgaatttttatctgctgaatttattgatccaactcgcgagttactgatcaaactgattgggcagttttgtacaggctaaatgctaggtcaagatcgaaaaagtgcggtctgttttaaaaaagttttctcaaacagaccgcactttgtatgcgtattttgagtagttattttaataaatcttcatttttcgcatgaatccatttaccgcgttttttatctatatattggaaatattcgttggtaaaggtgccttgtgaacaggtgagcttatctagacgggaattcacctctttattttctagtgctttgatcagcgtttcgggacctgttaagcaaaatacaccgccctcaatccgtttttgttcaatgttgctaataatgatttcaagcgtatcttttaagaaaggattgcctttggcactggctaaaaaaaagttggtataacgacctcggcgagaaatgaccacttcgctatcctcttcatcaataatgctgtcaaggcaccacactaagtgtccatcaatatccatataaataccaccttcatgatagagggtgaatatacgccagaaatccgcttgtgccgccccatcggtcagcttgctataagcgttaaaagtacgttcatctgcatgggttttgatgtagtctgcacgggcttccgtactgacatagcgataatcgtaacttaacgataataaacggttaaagagatagttacagtaaacgggtaatgtcactttattactgtaattggtttgccaaattacacgattaattttagtttttttatgggattggcgtttagcaggactaaattcgggaatggtgaaacgcattttaggaaataatgcatgaaaaggataacttaaagttttaacgatattcccgagtaggcgagtcataccattggttatcagaatgaggtgtttatttttaacaggtttatacatgacaaaagtccgttttctttaaatagagggaaatttgggatactttatcattttatgtaagaaagaacaaaaggcttgtatgaaatgaaaaaagatttttagagtaaaagtggtgggcgataccggtctcgaaccagtgaccccctccttgtaagggaggtgctctcccaactgagctaatcgcccacttgagacttaaaatattgggtgaattttatggattggaacaagtaaaagtggtgggcgataccggtctcgaaccagtgaccccctccttgtaagggaggtgctctcccaactgagctaatcgcccttcagattttgtctttttaacaggaaaaatgacaaagttatgaagcgttatttcaagtataagtggtgggcgataccggtctcgaaccagtgaccccctccttgtaagggaggtgctctcccaactgagctaatcgcccacttgagacttaaaatattgggtgaattttatggattggaacacataaaagtggtgggcgataccggtctcgaaccagtgaccccctccttgtaagggaggtgctctcccaactgagctaatcgcccacttgagacttaaaatattgggtgaattttatggattggaacacataaaagtggtgggcgataccggtctcgaaccagtgaccccctccttgtaagggaggtgctctcccaactgagctaatcgcccgcataaaattcaatcacaacattggacactttgttgaaaagtggtgggcgataccggtctcgaaccagtgaccccctccttgtaagggaggtgctctcccaactgagctaatcgcccaaatgttgtgaggtggcattataattattacttctattcagtcaacaagtttttacaaaaaaagcgttaattgttttaaaagtaggcataaaatcacattttttattcggaaatagggaaactcatagtacaatatggcacaaattttttgatgtaatttaaggtaagagaaaaggttataagatgaaagcagaagcattatttgatttagatcctggtgtgaaagtacgcacccgttttgcgccaagtccaacaggctatttacatgtagggggcgctagaacggcactttattcttggctctatgcaaaacatcaccaaggcgaatttgttttacgtattgaagataccgacttagagcgctcaacaccagaagcgactgctgccattttagaaggaatggcgtggttaaatttagcttgggaacatggtccatattttcaaaccaagcgttttgatcgttataaccaagtgattgatcaaatgatcgaacaagggttagcctaccgttgttattgttcaaaagaacgtttagaagatttacgcaacacgcaagaacagaataaacaaaaacccc

SEQ ID NO: 3174 - DNA, 23177 bp, synthetic construct
  source 1..23177: mol_type = other DNA
  misc_feature 1..23177: note = Synthetic
atgcttgaagtattacgtcaattcccacaattaacaaatcaatcaaacacgggggattttattcctcgccctgattttcgtccactaactaagtttgagcaacgaggacaaaaaatgggacatggcgtttgggatttatattttttaaaacagtagatttatctattacagaacaggagaagtaattatgactcaaccagcacgtaatcgcagacagcgtaaaaaaatgcaccttgcagagttccaagaattgggctttttagtgaagtttcaattcgcagaaggtacaggcattgatcaaattgatatgatcgttgatcgttttattgaagaagtgatccgtccaaatggattagcttacgaaggtagtggctatttacattgggaaggcttagtttgtttagaaaaatgcggtaagtgcgatgaatctcatcgtcaattagttcaaaaatggttagaagataacggtttagttgaaattgaagtgagtgatttatttgatatctggtgggatttacctatcaatgcatagtcgtgtgacgttgttgttacattgtgaagcggtaacttattgctaattttttgcaaaagaatgaacaaatcttaccgcttgtgttcctaactataagtatattaggtgtgagaagaaaggaattatatggacgttttagccccaattatttcgattgttattagcttttttggttttgtgttggtattacgcgcttggttacaattctgtcgagttgacccttacataccgatttcacaaacattaatgcgattaacaaatcctgcagtaattcctgtaagtaagctaattccgaccgtaaaaggtatcaatttcgctgcgttattaattgccgttggattggttacttttcagttcatattatttggtgtggacgtcccacgtgcagtattaattggtttattaagtgtagttaaaactttcgggcaaattttattctttactactttgattcgagctttaatgagctggatttcacaaggtaaccatccattagattatacggtggcacaaattaccgaacctgttttaaaatggattcgtaagattttaccgcgtactggtatgctagatttttcagtcatggtattaggctttggattgttactgatcaacagcggactttaccgagtgtttggtcaattatgggcagttgcttaatgcaggcagttgaattttctgaaaatccgtacggtatccgcctacggatttttttacagccaaaatcaagccgagatcagattgtgggtttacatgataatgagctaaaaatcgcaattactgcaccaccgattgatggcaaagcaaatgctcacttacttaaatatcttagtaaattatttaaagtacctaaaagcagtatcgtcttagagaaaggcgaattacaacggcataaacagatttttgtaccagagccgaaagttataccagaagaaattaatctactaattaaaggttgatagcatttatttttttgtctatctaatgaaatcctttgttctttatagccaaaaaagacgaaaactgataacgttgtatctagttaaaaactattcttatttatagagtaaccaatatgttatttgcgattttagccattgtggcgtatttaggtgcattattgtggattgtgccaacccttgctcatattgataccagtaaaatgctgaatatcaaagcggtattaggattgggatctgttgcggttatttttcacttaattaatttatctcaacttttcttcgttggcgaagggcaaaacttcactgttatgaatgtttcatccatgattagcttgagtttaagttttatcgctacattagcattacctcgttggaaaacagtttggttaccattatctatcatctacgcattaggtatcgtatccgttgctttatctagttttatatcaggttctgtggttaaacaattaaccgaaaatacaggattgctttttcatttatctattgccattttgtcttatgcattattctttatggcgttactctatgcgatagagcagaaatggttagattctcgcctaaaacgtaaaaaaatgagtttttcacctttactgccccctttaatgacagtagagcgtcatttctttatgttaatattaattgctcaagccttactcacagttacacttgtgacaggtatgatttatttacatgatttttttgcgccagaacatattcacaaagcaattttttcttttattgcttggatagtgtatagcattttacttttaggattatggaagttacattggcgtggaaatcgggtgctaatttattcaatttcgggtatcatgctccttactgttgcctattttggcagtagattggtctagttgcttagtctagtaccttaggaagcggtgagataacaactatattttgcgaaaaatatcgaagatcttaccgcttgttcgtttaatcaatataggaatattgcattggaaagtatccccctgagtagcttatttatcgcattagctattcttcttgtcttatctggtttcttctctagttctgaaacaggtttaatgtcattaaatcgctatcgcatgcgatatttagcacaacaaggtcatcgtggcgctaaacaaacagaaaaattattagcaaaaacagatatcttactgagtttaattttaatctgtaataacttagtaaatattgttgcttctgctattgccaccatgattggtatgcgattgtctggtgatgcaggtgttgccattgcaacaggcttgctaactttagtcatgcttgtttttgctgaaattctacctaaaacgattgcagcaatttatccagaaaaagtgggctttacggcgagttatattttattaccattaagacgtttattattacccgttgtttttttaatgaatttggtaatcagcggattaatgaaattactgcgtatccgtaaatcagaaaaagcgggattaagtgcagaagaactacgcagtgtagtattagaagcagggcgttttattccaagtgctcaccaagaaatgttagtgtccattttagatatggaaaaagtaaccgtggatgacattatggttccacgtaatgacatcggtgggattgatattgatgatgattggaaatcgatcatgcgtcaattaacgggggctgctcatgcaagggttgtgatctataagagcaatatggataacattcttggcatcttacgggttagagaagcgtttcgtttaatgctagacagaaatgaatttaccaaagaaatgctcgtaagagccgttgatgaagcgtactttattcctgaagatacgccactgactactcagctaatgaactttagatcgaacaaagaaagaatcgggttagtggttgatgaatatggcgatataaaagggttagtgacccttgaagatattctcgaagaaattgtcggggagtttaccacttctgctgcaccaaccttagaggaagaggtccagccacaatcagatggtacggttctaattgaaggatcggctaatttacgtgatttaaacaagctctttaattggcatttgccagttgatgaggtgagaacattcaacggattgattgttgagcatttggaaaaaattccagatgaaggcgttgaatttacactgtttaatttgaaagttatcgtattagaagtgagtgataatatggttaaacttgcgagagtggaacctattcctcaaagcgatgacaacgaataaagatgaattttaaaagggaataggctattccctttttcgtatttcctcatcggaacagtaatttttagtaaatcttattttgaagccttatacacattagggtaaaatcctatcttattttatacacttatataaagatcatactgatgacaaaacaacttacacaggaacaaatttctgcactagctaaaattgacatgcaggcggtcgatcaagctatcctttcacagctaagttcagatgttgttctaattaatcaattagggcactacattgtgagtgcagggggaaaacgcattcgcccattaattgcagttttatcagcgaatgctttggggtacaaaggtactcagcatattacttgtgcagcttttgtggaatttattcataccgcaacgttattgcatgatgatgtggttgatgaatctgatatgcgtcgtggccgagcaacagcgaatgctgaatttggtaatgctgcaagcgtgcttgtgggagactttatttatactcgtgcgttccaaatgatgacgagtttgaaatcccttgaagttttacaagtgatgtcagatgcaacgaatgtgattgccgaaggggaagttcaacaattaatgaatgtgaatgatcctgatattactgaagaaaattatatgcaggtgatttacagtaaaactgcccgtttatttgaagcctctacacaatgtgcggcaatcgttgcaggcgctgatgaaaaaggcgttaccgcattaaaagattatggcagatacttaggaacagctttccaattagttgatgatattttagattacagtgccaatgcggaaaaattaggtaaaaatattggcgatgatctcgccgaaggtaaaccaacattaccattattacacgcaatgcgtcacggtaatgaacaacaatctgcactcattcgagaagcgattgaacaaggcggaaaacgtgaagccttagatgaaattttagcgattatggcggaacatggatcacttgattacgcaatgcaacgcgcgaaagaagaagcaaaaaaggcagtggatgcgattgcgatgttacctgaaagtgactataaacaagctttagtttctttagcttatctctccgtcgatcgtgcttattaggaaaaataatgacagaacaaagacaagcaccagtaaaaaaaacgcgtaagggcaaagatcctaacgcaccttttgtccgtgagaaactttctctacccgatgggcataataaattattactccactcttgctgtgcgccttgctctggcgaggtgatggaagcaattcatgcttctggtattgaatttaccatctatttctacaatccaaatattcacccactcaaagaatatttaatccgtaaagaagagaatatccgtttcgcagaaaaatggggtattccatttattgatgccgattatgaccgtcaaaattggttcgatcgagctaaaggaatggaaaatgagccagaacgtggtattcgttgcaccatgtgctttgatatgcgttttgaaaaagccgcagaatatgctcatgaacatggtttccctgtattcacaagctgtttaggcatttctcgttggaaagatatgaaccaaatcaatggatgcggtcatcgtgcagcagaaaaatatgatgatgtagtttattgggactacaactggcgtaaaggtggcggttcacaacgtatgattgaaatcagtaaacgtgagcatttttatcaacaagaatattgtggatgcgtttactcacttcgagatacaaacaaatggcgtgaagcaaatggtcgccaaaaaattgaaattggtaaactttattattcagcagattaaacaagcggtgagatatcgcatttgttttgcaaaaatttaaaaggaaaaaataatgtctaaatttgcaatggtatttccggggcaaggttcacaagcaattggtatgttagctgatttagcacctgtatatcccgtaattgaacaaacttttcaacgagcgagtgaagtgcttggttatgatttatgggatttagttcaaaatggtgaagcaacagaattaaatcaaactcatcgtactcaacctgcattacttgctgcctctgtggcgcttttccgagtatggcaagaaaaattcccagaacataacccaacagtaatggcagggcatagcttgggtgaatattctgccttagtttgctcaggtgcattagatttccaagatgcgattaaattagtggaattgcgtggtcagttaatgcaagaagctgtaccagcgggtacaggggcaatgtttgctattattggattagataatgaatcaattatcaaagcgtgcgaacaagctcaacaagaaacaggtgaaatcgtttcagcggtaaactttaactcaccagggcaagttgtgattgcaggaacaaaaacagcggcagaaaaagcgggggctttatgtaaggaagcaggagctaaacgtgcattaccattagcagtgagcgttccctcacattgtgcattaatgaaaccagccgcggataaactggcagaaacattgcaaaatattcaattttcccgaccgcttgtaccagtgattaataatgtggatgttgcgattgagaatgaagcagatgcgattcgtgatgccttaattcgtcaattatatagccctgtgcgttggactgaagtggtagaaaaaatggcggaagcaggtgtgacaacactttatgaaattgggccaaataaagtgttaacgggattggcaaaacgtattgtggctgatatttcagcacaagcagtcaatgacgtagcttcattagatgcagtgagtttttaattaaaataagaaaaaggtagagagttaaatatgcaaaataaaatcgcattagtaacgggtgcaacccgtggtattggtaaagcaatcgcagaagagttagtggctaaaggggcttttgttattggtacagcgacatcagaaaaaggagcggaaactatttctgcttatttaggcgaaaagggtaaaggacttgtattgaatgtggctgatgaagaatcaattgagcaagtgcttgctcacattaaagctgagtttggcgatattgatattttagtgaataacgcagggatcacccgtgataatttattaatgcgaatgaaagatgatgaatggtttgacattatccaaacaaatttaacgtcagtttatcgtctatctaaagcaatgttacgttcaatgatgaaaaaacgtcatggtcgtattgtgactatcggttcagttgttgggtcaagtggcaatccagggcaaacaaactactgtgcagcaaaagcaggtttagtcggtttctcaaaagcattagcaaaagaagtcgcatctcgtggtatcactgtaaatgttgttgcaccgggttttattgcaacagatatgacagaagaattaacagacgagcaaaaaaatgctattttaagtcaaattccagctggtcagttgggacaagcaaaggatattgcgaaagcagtcgcttttttagcatctgaagatgcaggctatattacaggtgaaactattcatgtgaatggtggcttgtatatgaactaaccgcaaaataataagcggtcgttttggaatcgaattttgcaatttgtagaattcgattcttttattttttaatttcttcccaaaatagaagaataattagtgagacattactcttatgaaaaaaaacacactcatcattggttttatgttattcgccatcttctttggcgcaggtaatcttatttttccacccaaactgggattagaaagcggagaacacttttggacagcgattattggtttcgttgtcacaggcgtaggtttaccgttattaggtattattattggtgctttctatgaaggtggctataaagaagcattaaataaagtccatccgtggttttcaatcgtattcttagtggcaatttatttagcgattggtccattctttgcaattcctcgtactggtgcaaccgcctatgaaatggcaattattccatttattggcgaatcaacaacggtatcattactggtatttacagtgatttattttggtattacgctttggatcagtttaaacccttctagagtagtagatcgcatcggttcgattttaacgccagtgttacttgttgcaattattgcattagttgtgaaagcttatttcttgctctctaataacgagttagtcgtatcgacaccagccattgaacaaaatagctttgttcaaggtattttagagggctatttaactatggatgcgttagcttccttagctttctcggtcattgtattaaatgcgattaaagcaaaaacaagtaatcaaactaaacttattaaacaaaccattggtgcagggattatagcagcagtggctttaggatttatttatatttctttaggttggattggtaaccactcagcattacctgcagaaacggttgctgaacttaaaacaaatggtcaagatattggtacttatattttaaatactgtaacggctcaagctttcggtgaatttggtcgcatgatcttaggtatcattgtgtctttagcttgtttaaccacatcgattggattagttgtggcggtcagcgaatactttaatgaaatcttccctaaaatttcttataaagcctatgcgattttatttgttttaattagttttgtgctttcaaatcaaggattaagtgcagtaatcagtaaatctgtacctgtattattagtgctttacccaatttcaatgacaattatggcattattattagtcaatttatttattaaattgccattacttgcgttacgttttgcacttggtttagtaactgtcgtttcaatcctttctgttgcaggtgttgaatttgttaatggcttaccattaaaagaatattcaatggaatggctaccatttgcagtagtaggtttagtggttggatttgttattgctaaggcaatgaaaactgaataattttataattagattttaaacttaaaaagcactcccaaagattttgagagtgcttttttatttgtatatttcaacgtgtcagtgtgtgtaaatttgttatgataagagtacatttatcagttttatattggaggatatatgcctgaattacccgaagttgaaaccagtgttcgcggtgtttcaccctatttagttgggcagactattaagcaaattattatccgacaaaaacagttacgttggcttgtgagtgatcaactatcagcaatggatggcgcaaatattctcaatatttatcgtcgtgctaagtatcttattattcacacagataaaggcgatattctcattcacttaggtatgtctggttcattaggtatattaaataccgaaactgaaaaagaaatcggtaaacacgatcatgtggatttagtgaccacaaatggcacgattttacgttataacgatccgcgtaaatttggtgcgtggttatgggcgaataaagcggaagaggctgagttgctcaagaaactaggactagaaccactttctgatgagtttaatgcggattacctctataaacaaagtcgcaataaaaccgtcgccataaaaaatttcattatgaataatgccgtagtggttggggttgggaatatttatgcgtgtgaatcgctctttatggcgggacttcatcccgatatggcgacacaaaatctgaaaccgaagcaagcagaacgattagtcaaagtgattaaagatgtactgacgaaagcaattatacagggtggaacgaccttaaaagattttatccaaccagacggaaaacccggttattttgctcaagtactaaaagtttatggtagaaaagggcaggagtgctacgattgtggctcaatcatcgaatccaaagtaatcgggcaaagaaacagtttttattgccctaaatgtcagaaattaccgcgataaatttgattttgcaaatttttttcagaaagtgaccgcttgttaggttgggtggaaattggatagagtagataaaatgatgctccttagaaccgaagtcctaaggagcagagcattacggtaattctttacgaattccttattgtagcaacggttctcatttcgctgtgcaacaacgtgatcgattctacaaaagcgtataaattttgtcaacattactgaatttttatggtaaaaataagtaaaatttttaatagctgaataagagaattgtgatgaataacagtacattaaattatattttagggcttgatattggtatcgcttctgtcggttgggctgtcgttgaaattgatggggaagaaaatccgattgggctaattgatgtaggtgtacgcacctttgaacgagcagaagtacccaaaacaggcgaatctttggcattagctcgacgcttaaaacgaggcacaagacgtttaattcgtcgtcgagcattccgtttattaaaggcgaaacgtttattaaagcaagagggaatattaacccaagacgattttgaatcttcaagggttataaaaagtttgcctcataatacgtgggaattacgtgttaaaggattaacccagttattatccaataaagaatgggcagcagtgctactgcatttattgaaacatcgaggctatttatcccaacgaaaaaatgaaacgaaaaccgataataaagagttgggcgcattattatcaggcgtacatagtaatcatcaattattagcagagaaaaattatcgaacacccgcagaattagccctcaaacatttttatgaagaagaaggacatattcgcaatcagcgaggggcttatacccacacctttggtcgcttagatttaaaacaggaattgagacaattattcaacgcacagcgagaattggggaaccctcacacttctaatgaactagagcaagcctttacggaacttttaatgtggcaaaaaccagctttgtcgggcgaagctattttaaaaatgttaggaaaatgtactcttgagaaagaagaatataaagccgctaagaacacttacagtgccgaatattttgtatggcttaccaagctaaataatttacgcattttagaaaatggtagcgagcgtgctttatcacaagaagagcgagcaatattaattgaacagccttatctcaaagcaaaactcacctatacacaagttagaaaattattaggattatctgatcaggctcactttaaaggactcagctatcgtaaagataatgccgagaataccacattgatggaaatgaaagcgtggcacgctattcgtaaagcattagaaagtaatgggctaaaaacagaatgggaagggctaaaaacgcaacctgatcttttagataaaattggtacggctttttcactctacaaaactgatgaggatatcactcagtatctcaatggttgcctttcaactgacgtattgaatactttattagagcatcttaatttcgatcgatttattcatctttctttgcaaagtttaagcaagatcttaccgcttatggaacaagggttacgctacgatgaggcttgcaaacaagtttatggcgatcattatggagcgaaagagcaacaagaagaacgttatttacctgttatcccagccgatgaaattcgtaatcctgttgtactaagaagtttatcccaagctcgcaaaatcattaatggcgtggttcgtctttatggttcgccttgtcgaatacatattgaaacaggtcgagaagtgggaaaatcttataaagatagaaaagagattgaaaaacgtcagaatgaaaatcaagcagataaattgcgtgctatcgctcactttaaagaactgttcccaaattttgtcggcgagccaaaagcgaaagatattttgaaaatgcgactctatgaacaacaacacggaaaatgtttatattcaggcaaagggctagatctcaatcgcttattagaaaaaggctatgtggagatcgatcacgcattgcctttctctcgtacgtgggatgatagtttcaataataaagtccttgtgttagcaggcgaaaaccagaataaaggcaataaaaccccttatgaatggttagatggaaaagcggatacagaacaatggaaacattttgtctcattagttcttggtagttatttttcacaaaagaaaaagcatcgattattaactaaagagcttgatgaaaaaggatttaaagaaaagaacctgaatgatactcgctatgtggctcgtttcttatgtaattacattgcagaaaatatgttattaacaggcaaaggtaaacgccgagtatttgcctcaaatggtcaaattactagcttgttacgtcatcgttggggaatgagcaaaagtcgggaagaaaatgaccgccatcacgctattgatgccattgttgtggcttgttcaacggtggcgatgcaaaagaaaattactgattttgttcgccgtaaagaaatggatgtgttttcgggggaaatggttgataaatcaacgggcgaaattcaatggattcattttccagaaccttggaagtatttcagacaagaggcggaaattcgcgtatttagtgataatccacaagaagatctggtcattcgtttgccagatcgtcctcaagctaatcatcaatttgtacagccattgtttgtatcgagagcgcccactcgtaaagtaacagggcaagggcatatggaaaccgtcaaatcagctaagcgaattaatgaaggtattagcgtgattaaagtgcctctcactcaattaaaactcaaagagcttgaaaatatggtaaatcgagagagagaacaagcattatatgaatctcttaaagagcaattaatgcaatataacgatgatcctaataaagcatttgctgaaccattttataaaaaaggcgggcaacaggttaagtctgtgagggtcgaacaattacaaaaaacgggtgtattagtacataatgaaacaggcgttgctgataatgcctcaatggtacgagtggatgtctttaagaaaaaaggcaaatatttcttagtaccaatttatacttggcaagtcgctaaaggtattttgccgaataaagcagtaattcagagaaaatcagaagatgaatgggaagaaatggatgaaaccgctgaatttcagttctcattatttgctaatgatcttattaaagtaacgactaagaaaaatgcaattttaggttattttggtgggttagatagagcaacaggaaatatcagtattaaagaacacgatttaaataaaaatgtagtaaaaaatgggattcatactagtgtgggtgtaaaacttattcccaactttgaaaaataccaagtggatgaattaggtaaaaatattcgaccttgtcgaaaatccaaacgtcttggtgtgcgttaaatcaatgccctgctttgtaaaaagtggggcatttttttatttactattgagaggatggttatgagttggcggagtatattaattagtaatggtgggaaattatcgctaaaacgtgggcaattatttattcagcaagatattggggagttttctgttcctttggaagatattgcggtaattgtggttgaaagtaaggaaacggtaattactgcccctttgctatcggctttagcgttaaatggcattaccttaatgagttgcgacaatcaatttttaccttgtggacagtggctaccttttgcccaatatcatcgacaattaaaaatattaaaattgcaaatggaattaacgcaaccacagaaaaagcaattgtggcaaaaaattgttcagcaaaaaattcgtaatcaagcctttgtcttagaacaatctgctcatcctaagcaagcgaatactttatatagtatggcaaatcgagtgaaatcgggcgataaggaaaatattgaggctcaagccgcactactttattttaaaaccgcattcggtaaagattttcggcgttggcaagaaaatagcgttaatgctcatttgaattatgcctacacgattttgagatccgccattgctcgctcattagtattatatggttggttacccgcattaggattatttcaccatagtgaagtgaacccatttaatttagctgatgattttattgagccttttcgcccattggtagatttatgtgtatggcacttatggcaagagaataaattggagcaaggtttaatccctaaaactaagcaaaatttggtgtcgttattacattatcaaatgcagtttcaagagcagacattcagtgtgttggcggcgattgatcgcactattggttcgttacaacaagcgatacaagctaaaaatgctgaattattaaaattacccgaaatgttacccctaaaggaacaccagtatgagtgaggcaaaatttatgcgaattattgtcttttttgatctacctgtaacgactaaagcgaaacaacgggcagccaatcaatttcgccaatttttactgaaagatggctatcaaatgctccaactttctgtgtatagtcgaattgtgaggggacgagatgcactagaaaagcataacaaacgattacgcgaacatttacccgaagaaggctctattcgttgtttagaagtgacagaaaaacagtttgccaatatgcaaattttactgggtaaactgaaattgcaagagaaaaaagtgaatgctaatcaaatgctacttttttaatggattattaaaagaaaataaattttctatgtaacataaaaaaacaagtttaactgatttatttttaagcaaaaaaaatcctttttttgaagggaaaaaggacgttatagtctaaatttcaaactgtttttaaagtgggatttagctaaaaaaatgtaatttttgagtagttttaggaataaataaatggaatttttgagatagaaaaatgccgataatccttacataacaagggatatcggcatatctattgtagcacagcgaaatgagaacgggagctacaacttctattcctacgtattgaccgatagagttattgtagcacagcgaaatgagaacgggagctacaacagagctatgtttagctggcttacaaaatcaattgtagcacagcgaaatgagaacgggagctacaacggcttggtttaactataaaggacaaaaaacattgtagcacagcgaaatgagaacgggagctacaacaagcaacaaaatcttaggattacaagcaaaattgtagcacagcgaaatgagaacgggagctacaaccctgatattctttgactgtaaaaactcttgattgtagcacagcgaaatgagaacgggagctacaacgcgatagatcgtttaactcaacggagacaaattgtagcacagcgaaatgagaacgggagctacaacagcgtatttgaccccgtcaagagggtcgagattgtagcacagcgaaatgagaacgggagctacaacggatgaatggttacgcaatcgttattggaaattgtagcacagcgaaatgagaacgggagctacaaccaaacacgttttagaatttttatttgtaatattgtagcacagcgaaatgagaaccagtagagattggcttaccctagaaattgcattataactgatgataatgaacgcttacttgaaagtaaaaagtggtaatctttgtgctatatataaagaatagctaaaaagattatacaggcaacacattgctaattgctagttagtgggagtgtagttactagtctttaatatctagtacagagacttgtgagcagttattggtacatctgaacattatggtcgacatcaagcaggaacaaaatattgtttagcatgtcgattttggaatgagtgaaaatttgattgtgaattacctaaatagaatttaagaaataataaatttgtatagaaaaaatcctccgatgtaccaaataacggcactaccaatattcggaattagtgtttctctagcagaattaagatcaatttcataatatgtagagatgaaatcatcatatataacccataatggtaatatgataaaaattaaccctatactgagaactataaaacttgtagcaagcaaaagtaataatgtaatcattttagtgtccaagtgttctttttaaaagtattggataaatttttataatgattgtcaataaactttaaggatttatatcttaaaatttaacatgttaagttagaatgtatgcaaaagattcattcctagaaaggtaataattaagctaaattaaaaggttttgaaaacgtacgtataaactggcattattagctcataagatagtttaggtttagatagattgatttttaatattaaaacgaaaaggataataaaatcttatgttctaatctttttaaagttttgacttcaatgttgagactaatccggggtatccaaatattgctacttacatagcaggctatatgtttaccaaactatataagtagcataaataataaattattttctttctaagaaacggtcaatactccaagctccgccacctagtaacatgatagctaagaagccaccagtaataccgaagtttttcattaattgaatttcttgtcctggtgcaccatgtacaaggaaacctgatactaatgtgaaaagacctaaaattaaggcaagaatacgagtttggaatccgagtagtacagctaatccaccaccaacttctagtaatattgtaggtggaagtaatatagctggaatacctagatgttccatatgttcagctgtaagctcataaccattaaatttccctacgccagaaacaaggaaaatataaactaaaagagcacgagcaactacatttattaatgcataaagggttgggtttgtaacaatatttttaacaattacattaggattaaacatgtatttttctccattaaaaattatcagctacaaaatatgtaactaatttatcatttagatccaacattgaagtgtggtgtttaaaaaagattgaaatgaaaaatgtgtaacaagctcttgttattaggttttattgccattataaaagcataacaaaatgctacaaacattttacaaatgcaacgataccaaatctcaagcgtattgaaaactgctgtgagagtcttcacaagattatttgatcgttatcaataaaatttaattaattataggaagtgatagattaatcctacctctccataaatgacaggtaggattattatcgatattggcggtacttaattggttaattctgcatgcagctgttgaatagaatacacatcaaattcattgatatgttctactgctgtagaaattgcatcagcactagcaatcgttgtgtaaataggcacacgttgctgtaaggcagtgcgacggatagagtgactatctgcaattacctctgaatccccacttaccgtattaatgactaatgcaatttcattatttttaattgcatcaacaatgtgtggacgcccttctctcactttattaatagtctgcactgcaataccattttctcgtaagaatttagccgatccccacgttgcacataagccatagccttgttcttggaaacgtttagcaatatttaataaggtcggtttatcttgatcaacaacggacataaacacttttccaacttttggaattcgttctcccgcacctaattgagctttgtaaaaggcttcggcaaaggtttcaccgatgcccatcacttcacctgttgaacgcatttcagggcctaaaatcgtatcaacacctgggaatttgatgaatgggaataccgcttccttaacaaagtatttgtgtggaataatctcttccaatgcattcaattcagcgagggtttcgcctgccataactcgtgcagcaatttttgctaaagattgtcctgttgctttacttacgaaaggcacagtacgacttgctctcggattgacttcaagtacatagataacatcattctgtaccgcaaactgtacgttcattagccctttcacttttaaggccaacgccatttctttagtttgtctgcgaatttcatcaaggatctgaccgcttagtgagtatgcaggaagtgagcaagcggaatcaccactgtgaataccggcttgttcaacgtgttgcataatgccaccgataaccacgttttttccatcacaaatacaatccacatcgacttcaatcgcattatttaggaagtgatcgagcaaaattgggctatcgttagatacagaaacggcttctcgcatataggtattcaattcttcatcgttataaacgatttgcatcgctcgtccacctaatacgtaagaaggacgaacaacgagcggatagccgacttcattcgccaactctaacgcttctgaggcattacgagccgtacggttggcgggttgtttgagattgagatcattgagaatacgttggaaacgttcacgatcttctgcagcatcaatactatctgcggaagttccaataatatttacaccattttcgtgtagtgcattggctaattttaatggtgtttgaccgccataatgaacaatgacaccccaaggattttctactcgcacaatctcaagcacatcttcgagagtcaaaggctcgaaatacaagcgatcagaagtatcgaaatcggttgaaacagtttctggattgcagttcaccataatagtttcatagcccgcttcacgtaaagcaagtgaagcatgaacacaacaataatcaaactcgatcccttgtccgatacggtttggtccgccccctaagatcatcacttttttacgatcgcttgggttagactcacactcttcttcataggttgagtaaaggtaagccgtatctgatgcaaattcagcagcacaagtatcgactcgtttataaacaggtaaaatacctaaattatgacgataatcacgtacggttttttcactgactttggttaattcagcaatacgtttatcggagaaacctttgcgttttaagcgacgtaattcttcacgatcaagatcgctaaattgttttttctctaaattaagttcttcttgaacaagatcttgaatttgaattaagaaccaaggatcaattttagaataataatgaacatcctctagagagaatcctgcaccaaaggcatcagcaacatataagatacggtttggaccgggatttgctaattccctacgaattttttctggttcttcagatagcaaattgaacccgcaaatccccgtttctaaaccacgtagcgctttttgtaatgattcttggaatgttcttcccatcgccatgacttccccaacggatttcatttgagtagttaagcgatcatccgcattggcaaatttttcaaaggcaaaacgagggattttggtcacaacataatctagagttggctcgaaagaggctggaattaagccaccagtaatatcattacggagttcatttaaggtataacctaccgccagttttgctgcaactttcgcaatcgggaagcccgtagctttggaagcaagtgcagaagaacggcttacacgagggttcatttcaatcacgatcatttcgccattttctggattaatcgcaaattgcacatttgacccgcccgtatccaccccaatttcacgcaataccgctaaagaggcattacgcataatttggtattccttatctgttaaagtttgagctggagcaacagtaatagagtcgccagtatggactcccattggatcaaagttctcaattgaacagatgataatacagttatcggctttatctcgaacaacttccatttcatattctttccagccaaggacagattgttcaatcaataattcgtgcgttggtgaggcttcaaaaccacgctcacaaatcgccataaattcatcttgattataagcaataccgccaccagaaccacccatcgtgaaagagggacgaattaaggttgggaatcccacttctttttgtgcggttaaggcctcttcaaaactatgagcaacaaatgatttagggcaagataatcctatcttagccattgcctctttaaatcgtccacgatcttctgccttatcaatcgcatcttcggtcgccccaataagttcaacattgtattgttttaatacaccgtgacgggaaagatctaatgcacaatttaatgcagtttgcccacccattgtcggtaaaatcgcatctggacgttctttctcaataattttggtaacagtacgccattcaattggctcaatgtaagtcacatccgccatatttggatcggtcataatcgttgctgggttagaattgactaacaccactttataaccttcctcacgcaatgctttgcaagcctgagctcctgaatagtcaaattcacacgcttgcccaataacaatcggacccgctccaataattaaaatcgtttttatatctgtacgttttggcattttgttttctctgattttgaaattagttaaatatgaaattattcagcaatattaatttttattgtggcttataataaatacaatcaagcaaagctactctatatttccatgctaatttttcttctggatcttttggttctggtctattaaaccaaggtgtttcatatataatagataataattcatcccaataacgttcagcataaaaactattactagatattccgaaatcttttaatatacctttattggctccgttaaaacttatgaacaaatcaggtcttttcattgatattattcttgttacaacggaagtttctctttctcctttgcaaagatgatcaatattatgagcataatgcataaataattctttatttatattaccttccagtggaataccatcaatcaaggaacttagctttttattgttagtatttactctattggaaaaggttcctctcgcttgtaaatttccaaaccaaggagctctctcatcagagcattttaatccacagataaatttacggttatcttcattgatcattgagaatgtttcatgtgacttaaataaatattgaaataattcaagcatttttagtcggcttttaaaattgtgatatggatctttttttacttcttggaaatattctgcccaagagcatgttaaaatttcattatctaacacaggattttttagtatgcttttagattgaaagtcagttaatttattaatactctttctttttacggaatataattcttcatagcgtttaatatattctttagaaatttcttttgctgatttaaaacattgatctaaaaaattactaacctcattaaataatttattatcttctacatcctcactgtttataaacatcatgttttcagtattttttccatgaaatgccccatgagtaaaattagcactaccagataaaacagcccaatcattttcatcattccaaaataaataaactttaggatgaaaaacacctgatgcttgtaacgagattttcacttgtttattacttttaaatttgattaatacttgaggatctgtttgataaaaatgaatacctactgttgaggattgaattttagtcttattcataagaagagtttcaaaagctggatgattagatgatgcccacgcagttgcaaaagaaatatttttatatttatttactaatgaattaaatttagcagtaagcgttgattgtttagtaataaatttcataattaatccttccagaatcattgccctatatttcttagttcatcgacaaatttatcaaacaaataagctacatcatttggaccaggactcgcttcaggatgcccttggaaagaaaatgccacttggtcagtcaattcaataccttgtacggaattatcaaataaagagcgatgagtgactttaacattgctcggtaaactattttcatcaacttcaaaaccgtggttttggcttgtaattagcactttttgtgttgcaagatcttgtacgggatgatttgcaccgtgatgcccaaatgccatttttttcgttttaccgcctgttgctaatcccaataattgatgccctaggcaaataccaaagattggttttttagtggctaataactttttaattgcggtaattgcatattcgcaaggctctggatcaccgggtccattagaaaggaaaataccatctggattcaaggcgagtaccgcttcagctgaagtagtcgcaggaacaaccgttaaacgacatcctcgttcagccaacattcgcaagatattacgttttacgccgaaatcataagcgacaacgtgaaattccgctttttgttgcgtaacatagccttgacccaatttccactcgctttctttccattgataaagttctttgcaagtgacttcttttgccagatcttttcctgccattgaaccaaaactttttgcaagtgctaatgcttcggtttcatctgtgccaacataaatacaacctgcctgagcgcctttatcacgcaaaatgcgggttaaacgacgcgtatcaatatcagcaatagcaacaattttatgatggataagataatcagaaagggatgaattagaacggaagttactatgtaaaaggggaagatctcgaataattagtcctgaggcataaacacgattggattcttcatcttcattattcgttcccgtgttacctatatgaggataagtgagggtaacaatttggctagtatatgagggatcagtgagaatttcttggtaacccgtcattgccgtattaaatacaacttcaccgattgtatgtccctgatagccaatcgacttaccatggaacaccgaaccgtctgcgagtacaagaattgcaggttcaaacatattttactcctatttagaatctgtttggttggtactttcgagtcgccattaacctttactagaagtaggcgagtaagtttaaatgagcaaacgattgctttcaagttaaactttatagaaagtgcttcaaatatatctattacatttttatgcattaatattgcatttttattcataaaatttcaataaatatttaatatgaactctatttcttttatgcaagcggttagaatgaatggattttttgcaaataaaaaaacggacagttaagtgtccgtttcagatgaagtgattttatttaggctttctttaaaaactctgatttaagtagtaactttccacaatcgacattgtgatcgccagaaacaaggcgaatacctttaaatttagtccctttctttaagacttctgatgaaccttttaattttaagtctttgatgagtaacacatcatcaccatcagataataaattcccattactgtcttttacaattaatttatcatcatcttgttcttctatttcttcgcctgtccattcataagcacaatcagggcaaacgaattgaatcgagtcgtggt

SEQ ID NO: 3175 - DNA, 23177 bp, synthetic construct
  misc_feature 1..23177: note = Synthetic
  source 1..23177: mol_type = other DNA
cctgcttcattcacgccaaaacgataattatggcgaggtacaggcgtaaaattactggcgacgataatccgttctccgctacgactacggcgctcaaacacaaaaacggaattttcataatcattgacaactaaccagtcaaagcctgcaggatcgccatctaattcaaataatgcagcttgtttttggtaagtgtgattcaaatctttcaccaaaagttgcacgccttgatgccacttaccgccctgttgttcatctaataaataccaatcaaggctttcttggtagttccattcacgcccttgagcaaattcattccccataaacaacaattttttacctgggtagccccacatataaccgtaataagcgcgtagatttgcaaatttttgccaagcatcgccaggcattttaccgagcaaggaagatttaccatgaaccacttcatcatgagaaagcggtaacacaaaattttcactatattgatacatcataccaaaggtcatctgattatgatgatactgacgataaacaggatctttttgcatatagcttaaagtgtcattcatccagcccatattccatttaaaatggaagcctaatcccccttctgcggaaggacgtgtaacgccagtaaaagaagtagattcttcggcaatagaaattgcgccctgtatttcagagtcaattttccagttagtatgttttaaaaattcaatggcttccaaattttcacgtccaccatattgatttgggatccattgcccttctgcacggctataatcacggtaaatcatggaagctacggcatccactcgcacgccgtcaaagccgatgcgttccagccagtacaagacattactggataaaaagttgcgaacttcattacgtccgtagttgtaaattaaagtgttccagtcttgatgataaccttcacgaggatcggcgtgttcataaagtgccgtaccgtcaaacgccaccaaaccgtgggtatcgcttgggaaatgccctggcacccagtctaaaatcacgttaatgtcggcgtcgtgtgctttttgcaccaagcgtttcaaggcttcaggggaaccaaaacggcttgtgggcgaatacaatcccagcggttgatagccccaagaaccgtcaaaaggaaattctgacaaaggaagaaattcgatgtgggtaaagcccatttctttcacataaggaatcaattcttctgcgatttgatcgtaatccagccaaaaattattttcgagattacgtcgccaagagcctaagtgcacttcataaatagaaattggttgatcatattgattagctttacgacgtgcttcagtcattggcacgatttcaggcaaagcgctaatttgagaagcggtatcagggcgtaactgagagccaaaagcataaggatcagcttttaagcgaagctgtccatggcaatcaattaattcaaatttatacaattgacccagtgaagcttttggtaaaaataactcccaaataccactacttcgatgaaaacgcattgggtggcgacgaccatcccaatagttaaaatccccaacgacataaactcgtttagcattcggcgcccaaaggcggaaattcaccccagacacgccatcacattcagtaaaatgcgcgcctaaaatttcatacggacgtaaataatctccactacccaataaccaattttctaaatcatcaatcattaaatggaatcggtaaggatcttcaataatttgtggctcatgcccccaaaagactttcaattgataagcaaaaaaactgcgagtatttggaataacagcagcaaagaacccccgttcatcaagacaatccaactcacaaatttcctcgcctttttcattatcaatcacaaatactcgacttgcatcaggtaacaacactcttatttcaattcctttatctgtttcatgaatgcctaaaacagaaaaaggatcgccatgataaccatcaaaaaaagcattaattgccgcttgcgatactaattgagtcataattatccctctctttaatctttatggataacgcgatatgcaaattatcgttctaaattgtaaattaatcgtataggttggaatttcattaccaaataatcaaatatcctcttcatttcctactaatagaaaacaaggctgttttttataaaagaaagtaacaggaaaaaggaaagccgctttcggcatgatgatttttgaatggtgttgaaaatattgaaaggaaaaaacgcgccagccaatccaatgaggaaattgcctatcttgatgtaaccaaggggaaaacgcattatattcattattcactacctacaactgaaataactggattcattctatccaagcctcctattaaggcaatgacttttattcaaattagtgatctccgtcataatatttttaaatgggagataaggaaaattgtgatagatcaatcttcttcaatcacaaaatcaaaccaatctataacgtctttttcatgaacgccattttcaatagggatatgggctaatttcaccgaatctgaacgaccagaaattaaagggtgccaatcaaataaaggctttccttcatagcgtaggcgataagcacaagaagaaggtaaccaatgaaagtcaggcaaattgcgtttagtcaatttagtacaatccttctccaaagaaaaacgattctcataacaaccgcatttgccactttctaaatccaataaattgcaggcaatacgagtaaaatataaacgttcacgctttcctcgaccttcaataaatttacgatagcagcattttccacagccatcgcaaagcgcttcccattcttcctcattcatctctaataaggttttatgcttccaaaaatcagctgttattcccatacaattgatatccacgaaataaaatgcgcattctaccctatttccacttttctgaaactaagagcacgaataggacatcaaaccagatgaatttaaagacaaaatctaccacatatttaagacaaaaagcccagctttgatatataatcggggccatttttgactaattaagcacaattacaatgagccaacattatccgcttttatctctcattaactcacctgaagatttacgtttattgagcaaatctcaattaccacagctatgccaagaactacgcgaatatttgctcaattccgtcagtcaaagcagtggtcatttagcctcaggattgggaactgtcgaattaacagtggcgttacattatgtgtttaaaacgccttttgatcagcttatttgggacgttggccatcaagcttatccgcacaaaatcctcactggtcgtcgcgatcaaatgtcaactattcgacaaaagaatggcatccatcctttcccatggcgagaagaaagtgaatttgatgtgctaagtgttggacattcctctacctctattagcgccggtcttggcattgccattgcagcacaacgagagaatgcagatcgcaaaactatttgtgtcattggcgacggtgctattaccgctggaatggcgtttgaagcgatgaatcacgcaggttcgttgcacactgatatgctggtgatcctcaatgataacgaaatgtctatttcagaaaatgtgggggcgttaaataaccatcttgcacgtttattgacgggttctttctattcttccattcgtgagggcggcaaaaaaattctctccagcgtgccgcctattaaagaatttatgaaaaaaaccgaagaacacgtcaaaggttttgtttcctctgtaggtaccttatttgaacaactcggttttaactatattggcccaatcgacggacataatattgaagaattaattagcaccttaaaaaatatgcgcaatctcaaagggccacaatttttgcatattgtcaccaagaaaggcaaaggttatgcccctgcagaaaaagatcccattggattccatggtgttccaaaatttgatcctgctagcggcgaactcccaaaatccaacgcaaatccaacctattcccaaatttttggagattggctatgtgaaatagcggcacaggaccccaaactgataggcatcacgccagcaatgcgagaaggttctggtatggttaaattctcgcaacaatatccacaacagtattttgatgtagccattgcagaacagcacgcagtaactttcgcggcaggtttagccattggcggttataaacctgtggttgcaatctattccacatttttacagcgcgcttacgatcagttaatccacgacgtcgccattcaaaatttgcctgtgttattcgccattgatcgtgctggcgtcgtcggtgccgacggacaaacgcaccaaggagcatttgatataagctttatgcgctgtattccgaatatggtgattatgacaccaagtgatgagaacgaatgccgtcaaatgctttacacaggttatcaattaaaccaaccagcggcggtacgctatcctcgcggcaacgccattggcgtagaacttaaaccattacaggcgctagcactaggtaaaagtaatttaattcgccaaggggaaaatattgccatattaaactttggtactttattgccttcagcaaaagaagtcgctcaaaaacttaacgcaactttagtggatatgcgttttgtcaaacccattgatgaagaaatgattttagccttgtcgcaaacgcattctctcttagtgagtttagaagaaaatgccattcaaggcggtgctggcggtgctatcgccgaagtattgaatcagcatcaagccaaggtcaaattgttacaacttggcttacctgatttctttatcccacagggaacacaacaagaaattttggcggacttacaacttgatacagaaggcattgaacaacaaattcagaattttttaaaaaaagagaaaaaaatttaaaattttttggaactatttcaaaattcaatagtcttatacatcgctagtgtattgcaaatgcaatcgtctttttaaactttcttatgttaagacctcccgccatatcttttgatatggcggtttttatctgctaaaaacacccatttttcacatcaaacctatacatctaaatatcctgtgttagaattccgcgccaaatattttaacgaggacagctatgaaaacagctataaaaaataaacttaccccagatgaagctattgatatcgcctacgatatttttcttgaaatggcgccagaacacctcgatcccgccgatatattgctttttaatctacaatttgagcaaaatggcgcagttgaatttgttgaaaccgcagaagactgggatatggaaattggtgtgcttatcgatcctgaagcctatgctgaagtatggattggattagtcaatgaacaagatgaaatgaatgatatttttgccaaattcttaatatcacaccaagaagaaaatcgcgaattccacgttatctggaaaaaataatcccccaaaattaaagcataaaaaaggtcaaatctctgtgatttgaccttcttttcaacttacaagaatgttataccaacttagaaagttaactccgcactgagtttaaagttgcgacctggggcgttgaagcggttgatgcctgcgccagtgcgttggttgatgatattacttgttccaaatggtctaatcgatcttgctaagtcccaactgcgatatttttgattggttaagttatatgccccaaattgcaaggtgaggtttttaatgggtttcacataagcaatcacatccacaagagtgtaagcattgctacgccatcttatggagctatctctcacaatacgatcttcatctgctactccttttgctgtttcttctgctttttgcactcgccaaaacatattgtaagtgtcttttgcttttttctcagaaacgtgagtaacaaatagatccacgccaaacttgccgcttctgtggttataacttaagccaacaacgtgggtctgaggttgaatggcattcatcgggacttccgcattaaggcgaccaatttctttatattcgaaatcctccacttttaagttttcacctgaagccgcactgttgaccccagtaggagcagcaatatccacttcgacgatttgcacccgtcctttttgacgagtgaatttataatttagtgcaaattcatctaattttttagacaaaatgcctaaattgagtttggagtcaatttcaatgcctcttacttttgcatcagcacggttcacattttgataagtctcaaaacgcgttaacgcagagcgaccttgcagacgttgtgaacctaaatacattaaatcaataaaattatcatacttggtttcaaacccgctcaaagtcaaaaaaccatattcgttatgcacacttaatgccacttctttggtttttgcggtttcggccttcaagtcaggattcgggcgaatagagaaatcgggatgtttgaaagtgaaataaatttcttctcctgttggcgctctaaagcctttgctgtatttcgcctgcaaacgtaaccaatctagcggatcaacggtggcgctaagattataagaatgggcagaatatttttttggtttggaaaaataggcaatgttggcatttgcgttttcctcacgtaaacgacgatttgcctcagttgttaaatcttttggattaaatgcgggttccgcaacaaacaaattggtcaccatatcgtctggaatttttggcgacacacctggcttgtattcaggcttgtatttaatacggtcatagcggtaacccaaaccaaaactgagataatcattcactttaaaatcatcgctaaggtaaagggcgtttgcagtggctttaattggaataagataagagaaggtatcagtcttagtacatactggactaccacaatctttatgcaacgcccaccatttcacatctaacgccgattctcctgtatggttaatcatttcttttttagtttcagaccataatgccccataggctaaattatgttctgtttttcctaattggagatatttggttaaatcaaggtttgcttgtttcgtgcgcgtaattaaatcacgttgtgtccaaaggtttccgttgtaaccactagaacgtggacgttgtataataatattctcaccagtagaaacaggctgagtttctgcaaacttctcattattaatttccacaacttttattgggatatcgacttcctttcctgtttcaagatttaaacctttaatcgatgttaaattacaatttaccccatttttatgacatttaaacaaatgcttgtttattgcttttttattcaagtcaaacgttttgtctgcaatatcaccttcagcaaataaattatgaactacgctattaaccttcaatgttctagatttgcctatatgataagatactcgaattttacattcacctgatgcaattaaatcaacaggagtttctaattcacttccatcgctacctctatattgttttttcaaacacgtaggctcttctgagaatgtaattcccttttcatttttatatgtttcaaaaagttgaacaaaaaaaccttcttctcgtaagcgagaaaccatattattgaaagcttgaacctgtcttgctctttttgctttttctttagcaagcttttcaggatctgtaatatttcgaactgattcagcccaatcactagcctgaactcgtttaccagtatcttcatcgataggtgtataaactcctttagaattatagtactccgttttgataccatctttaccagtaaattcgttattatcattatatttaaatcccaatggattatctaaagccctacacttctcattgccatcacaataatcatcggttctcgctctagcacgaatatgttgatcagaataggtaatttttaatgtgtcgtagaaaggattagaagaaaagttctcataactaaaagcatagtttttgcgtctgttgctatcatcagtgtggcgtaattctttttcctcgtaaggataagtattgtattttagagtgtaagaaaaatcgtgaccacgggaacgagtttcatataaatccgccattgcagtgaaacgatgattttcattgggttgaaaacctaattttaccaaggtactttcttgtttgcgttgataagggtcggctttttctcgagttctgccttgaagaaggtcatcataatttttatagccaaaatttttgatttctgcccctttgcgttctgtgcgaaccatcatcatatcaaaccatttgtaacggcctgctacagtgaaggtgtcaagatattcatcattggcgctgttgtagccttttttgtaagaaagatgccagtctttatccaataacaaatcacgggcatctttagttttaaacattaccgaaccacctaatgcgccgctacctgatttgatggagtcggagcctttggtgatagtcgctgtggatacagtttcgatttctacgccgtttctggtgttattaaagttaccatagccttcaaaaagctctttaaaaccttgtgaggacagagtttccgcctgttgaagtccatcaatagtgatcgccacacggttttcttccaccccacgcaccgcataaccgctggcaccaaagcgacctttttccaccacggtaatccccgtttcataacgcactaaatcacggctgtcttgcacttgttggcgtttgagttgggtggcagatttgatggtctcacccactttgcgttctttgatgctcaattcaccttgctccgattgcacattaatttcatccaaaatgagactgtcttcagccgcccagcttggaagcgaaagcaaaaagtaactgaacaaagcaagagtgattgaagaaggagcaaatagatgactagctattgtttgtttgtttgtttgtttgtttgtttgtttgtttgtttgtttgtttgtttgtttgtttgtttgtttgtttgtttgtttgtttgtttgtttgtttgttcacggattttctcccgatataaataaaaaagaaatgtaattgataataattctaaattactttaagaagtttggcaaaatttattctttcttatgttcgaagccatctctcggtgtgatatggatctccataaagtaatgttaaacaatactaaatgaggtggctttaatgtactcttttgactaatgatatatagctgttgttttgaagcttgcaaagttgtcgaaataaacatcagttatttcgtttacacaatagcgggagaaattaacagtttcaaagctgtcatctagataattactattttgattaaatttaaaacactcaaatcaaaattttaaatttattcttgcaagcaaaatccgaaaacgtataatgcagaaattcagacgccagtgtgacgaaattggtagacgtagcggattcaaaatccgccgcccttaaaagcgtgtcggttcgagtccgaccactggcaccagtgctttagtcgtaagttagtctttaaaatcaataacttacggcttttttattgcctgtggtttggttaatcggctcattttctgcagctaaactcgctgtcattaatgatgtgcttgacagaaatttgacgtgatttgcgcttacgataggattttgattaggtaaattaatatttttaacattaataatgcttaatacttcagcatcaaaatggtcttgaaaaaacataaatagtgtttgattgatgaaacaaaggcaataacaaatcagcttaactttttggttagttccggaagtattcctccttttctttaggcaaaaagataccccttgaggtaaaacctcaaggggtagagctttgcggtcattcttttcagaagccttattgtagcaacgtttctcatttcgcagtgcaacaatatgttgctcactctataacattgttcaaaacttatcaacaaatttccttttttactttacaatctttctgtttgatttttaatcataaggggaagttatgcgagtgactcagttaaattatattttagggttagatcttggtatcgcctctgtaggttgggcggtggtggaaattgatgaaaatgagcaccctgttcgcctgattgatgtgggcgtgcgcacttttgagcgtgcagaagtgcctaaaacgggggagtctttggcgcttaaccgacgtttagctcgcagtgctcggcgtttaacttatcgtcgcaaattccgtttattaaaagcaaaacgcttgttgaaaaaagcaggggtgttgcaagaaaccgattttatttcatccactactcttgcccatatgcccaataacccttgggaacttcgcctaaaagcccttaatcaacaattatccccgaaagaatgggcggcagtattactgtatcttttgaaacatcgtggctatctttctcagcgtaaaaatgaacaaaagacggaagataaagagttgggtgcattgctttctggtgtacagacaaaccatcagttattgcaagcaaatgattaccgaagcccagcagaacttgcgattaactattttaaagaaaaagacgggcatattcgcaatcaacgtggtgcttacacccatactttcaaccgcttagatttacgcaatgaactgattttattattcgaaaagcaagccgaattaggaaatccatacacttcggaggaattaaaatgcgcctttattgagttattaatgtggcaaaaaccagccttatcaggcgacgccattttgaaaatgcttggtaaatgcccttttgaaacagaccaatataaagccgctaaatacagttattccgcagaatattttgtgtggctgacaaagttaaataatttgcgtattttagagaatggtgcggaacgaagtttaaccgccgataaacgccagttattgctcaaccaaccctttgaaaaagccaaatttacctacgctcaagcacgtaaattattggaattaaatgagcacgccatttttaaacaattacgctatgtgaaagataatccagaaaataccacgttgatggaaatgaaaggctatcacgcaatgcgtaaggcactagaaagtgtggggctaaaaaccgaatgggcggagttaaaaaccaaacctgaattgcttgatactattgcaacggcgttttctatttacaaaaccgacgatgagattaccgcttacttagccgataaattgccacaaacggtgattgatgccttgctaaaaaatctcagttttgatcagtttatccagctttcgttgcaagctttgcacaagatcttaccgcttatggagcaagggtggcgctatgatgccgcttgtgcagaagtttatggcgcacattacggtaaacaagataagcaagaaaatatcaccttgcctgttattcctgccgatgaaattcgcaatcctgtggtattgcgtacgctttctcaagcacgcaaagtgatcaatggcattattcgggtttatggttcacctgcgcgcgtgcatattgaaactgcccgagaggtgggtaaatcctttaaggatcgtcgagcaatggaaaaacaccagcaagaaaatcgcaatgagaaagaaagagcggttcgaaaatttaaagaatatttccctgaatttgtgggcgagccaaaggcgaaagatattcttaaattacgtttatatgaacaacagcacggcaaatgtttatattcaggtaaagaaattgaactgcatcgtttgttagagcaaagttatgtggaaatcgatcacgccttgccgttttcaagaacttgggacgatagttttaacaacaaggtattagtgttagccaaccaaaatcaagataaaggtaatcaaacgccttatgagtggtttcaaggaaaagatcattcggaaaaatggaaatattttgtggcgttggtcaatggcagtcgcttttctttcaaaaagaaacagcgcattttgactcaacagctagatgaacaaggttttattgagcgtaatttaaacgatactcgctatattgcccgatttctttgccaatttatcaataataatttgttattaaagggaaagggtaaaaatcgagtatttgcctcaaatgggagcattactgctttattgcgtcaccgctgggggctttttaaagatcgtgatgccaatgatcgccaccacgccattgatgccattgtagtcgcctgttctacggtgtctatgcaacagaaaatcactcgttttgtacgttataaagaaggtaatgtaacgacaggtgaaaaaattgatcgacacacaggggaagtcatttcgttacatttccctgaaccttggcaatattttagacaagatgtggtgtgtcgtgtgttcgataacgatcccaaaactgcattagccaaactgttgccaaatcgcccggaggcaaatcacgactatgttcaaccgctgtttgtatctcgagcgcctacgcgcaaaataagtgggcaagggcatatggaaaccattaaatctgcgaaacggctagaggagaaaattagcgtttctcgtgtgccactcacgcaattaaagctaaaagagttagccttaatggtgaatagagagcgtgaagtcgcactttacgaagcactaaaagcacgtttagagctatataaagacgatcctgttaaagcctttgagcaacctttctataaaaaaggcggacaacaagtgaaaagtgttcgagtggaaaaagtgcaaaaatcaggcgtcattgtgcgtcaaggcaagggagtggcggataacgcgtccatcgttcgcactgatgtattccaaaaagacggcaagtttttccttgtacccatttacacttggcaagtagcaaaagggattttgccgaataaagcggtagtggcaaataaagatgaaagtgaatgggaagaaatggatgaaaagtcgatatttaaattcagtttattcccaaatgatcttataaaattaaccaccaaaaaagaggtgtttttcggttattacgcaggtttgaatagacatactggaggaatcaatatcaaagttcacgatatggaaaatacgaaaggtaaaagaggcgtttatgaaggattaggggtaaaagtcgccatttcctttgaaaaataccaagtagatgaacttggcaaaaacattcgaccttgcaaaccaagcaaaagacaacctgtacgttaaaccaaatccctacgaaattttcgtggggattttttcttggagtaatgataatgagctggcgaagcattttaattagcaatggcgataaactttccttacaacataagcaaatgttaatccaacaaaaagaaaatgaatttaccgtgcctttggaagatattgcaattatcgtggtagaaagcaaagaaaccgtgattaccattcctttattatccgcccttgccaccaacggcatcacacttttaacctgtgatgaacaatttcttccctgtgggcaatggttgccttttaaccaatattatcgtcaatttaaaaccctcaaattgcaactggatatgtctcagcccttaaaaaaacagctttggcaacgaattgtgcaacaaaaagtccgtaatcaaagttttgttttggagcatttaggttttatggatgagaaaaatcgtttaattcggctttccactcaaattaaatctggtgataaacaaaatattgaagggcaagccgcactgctttatttccaaacactttttggtaagctttttgtcgagatgctgacaacaccattaacgcccaccttaattatacctataccgtttttcgctctgcggtggcgcgtgccatagtgctttatggttggttaccacaattagggctttttcaccgtagcgaattaaacccttttaacttagctgatgattttatcgagccttttcgaccgcttgtggatttaatggtctggcaattatgggatcaaggcaaattagaaaagggactaaccccatacaccaaacaaaaattaatcagcctgttgcatcaccaaatgcaatttcagcaagaaacctttagcgtattagccacgattgatcgcacagtaggctctctacaagcaagtttgcttgcacaaaatgcgaatttgttaaagttaccgcaaatgttaccgcttgaggaacattattatgagtgaggtaaaatttatgcgattaattgttttctttgatttacccgtgaccaccccagccaaatgcaaagctgccaaccagtttcgccagtttctactaaaagatggctatcaaatgttgcaactttccgtttatgctcgcattgtgcgtggcagagactctcttgaaaaacataataaacgcctatgtgaacacttacccgaagaaggatcgattcgatgtttagaagtgactgaaaaacagtttgctggaatgaaggtgttattaggcgaattaaagctacaagagaaaaaggtaaatgcgaatcaaatgctacttttttagcggttttgttattttaaaataaatttatgccatagtttaattgctgtttttttatactaaattttagtctcaaaacataaaaaacatcccgaatgatgagagtttggctcaaaacttcatacattttctatgtttgatagcggtgttttttcagaaattttcgataaaactctactatatctcatctaaattttctgtttttttgagcaataaaaatgcgccaaaaccttataagataaggcattgacgcatacagattgtagcactgcgaaatgagaaagggagctacaaccactttttaaggggtaaaattgagtcaaaaattgtagcactgcgaaatgagaaagggagctacaactacctacgaagacgatcaagtggttgttgaattgtagcactgcgaaatgagaaagggagctacaaccttggtttctactgtctaggcttgggggtaattgtagcactgcgaaatgagaaaacaacgaaagtagtggctcgtggcacttccgccttgttggtgaaagaaacccaaaccgcccaaatcatcgatattttccaaaagttcgggcaacatccgcaattgatgcacgcctttgactagtacgatggcgccaaaaccttaatgcagtcaatgagtatggggacgcaaacaatgctcattcctcgtgaagaatacgagcagaaactgcaacagattgaacaggcaaatgcccagcaaccgcaagaccctgccattatcagggtccaaatggaagcccaactcgctcaacaaaaacaacagctcgatttgcaattagcccagctgaaaatgcagtctgaattgcaaatcgagcaaatgaaagtggcgattaaagagaaagagttagagctgaaactgatggaaatcgaagcacaacagcaacataacgccagccgtttagccgcagaacagcagatgaaccaagctaaactaggcgtggatatgcaaaaaaccacagggcaacaggcgttagatatgcaaaaattcaaagccgaaatcgccctaaaacaacaaccactgccaaacccgacagggaattatggggtggattaagggttaataagagcaggtaacttgttttggactgaaagacaacgttaaacctaaagcattgatgattttcaaaatcgtatcaaaacggggtttttcgctggagagcgttttgtacaaactttcacgcccgatgcctgttttttccgcaagctcactcattcccttggctcttgccacggtgttgagggcttggataaattcctcgggcgtgccgtcttccaaaacagacgccaaataagccgccatcatttcttcgtttttaaggtaacgagcagcgtcaaaaggtctggttttaatggtcattgtgttgctcctgtttaatttgttgccacattgctttggctttttcaatgtcggattgttgggtggatttatcgccaccgctgatgagtaaataggtgatttcgcctttgcgtgcgtaataaatgcgatagcccttgccttgggtaattcgcatttcaaatacgccattgccgacggatttatgatcgccaaaattccctagctttgctcgttcaatgcgtttaacgatatgaagcacggcaagcggatcggctaaattctccaaccactcggaaaaaatatcagtttcttcaatgataaacataatgtctccgtagtgggtattgtatccgaaactatacaaaatgcaatcttgattatttctatccaccctccgcttgttttcatcgaacaagcgttttttttcatcaaaaggaaaacctatgtcattcaatctcagttcacaagaatatgaatatatgcaaaaagttgttttcggtaacgaaaataaaaaaggacgtggtaatcctcgtcaagatgacgaagccgaaataactggtagcgatatttttgttcaacaacaccaaaaacctgaagagcaaggcttttttgctgattttgtggatagcgtccaaatgggcgcgtggcaaggcggaagtgatttagcacgtggtttaggtgtggtgtttaatagtgattggttaaatgatacagccgactgggcggcacacaaagctaaagagcaagagaataccatgtcaactaaaatgcgtgaagcattaggacaaagcgcctttgaaggttgggatagtgaaagcggtgaaggtaaaggattattaaatgcttatttaaagagagaaaacgcgttattgatgcgattcaaacaggcgatagccatattgatgcacaattgcaacgctatgcggataatctcaatcaatgggcgaatgaggtggatgatttagtggtgaatatccaacgtgcgaatgcaatgaaccaacgagcaaatgtggttgcagagcagatgagagcgcaacaagaagcacaaattcaacaacaagcagaagctcaaaatcaaacacaaacaccttatcatcaacgcaacattgaagatgtttttgctgaatttacacataatggcttagatgaaaacgacttcaacaattttgtagagagtaatctccaacaggctaacgatgaactaaatcagcttaaagcaaatccattcaaaatgggggctgatttccaacaaggattagcagagaaaaaagcttaccaagaaaaattggcagatgcacaagcacgttttgattattggacgcaagcaaaaaagcagcaagccgaatcagtggtgatcctgaacaaggggcgtattgcatacgcccttgttgatattccaatgatgttggcgttagcctgatgtgcttttgttttttcctgttattatattgccttgaaagcgaggtttttatgttagataaacaagatattgaattattccaagcggagattaaaggcgctaagccctttgtgcaagatcgtgtgattgcaccgcgtagcgagaaaaaagcgaagatggctttgcgagaaattcgcgagcaggaagatacattgttttatttttctgatgaatatgaaccctatttgaaagaagaaggtgcggtgaaatatttgcgtgagggggaaaatcctcatttgttgaaacagctgcgacgtggtgattttacgcccgatttatttttggatttgcatgggttaaccaaagaagagtccaaattagaattagcaagtttgattttaacttgtgaaaaagagcacatttattgtgcttgtgtgatgactggctatggctcttttactttgaagcgacaaattccccgttggttggtgcaacacccaaaagtgcgcgccttgcatcaagcgccaaaagaatatggcggtgatgcggcgattttgatgttggtggaaatttagtcttcttgtttcatattccaagaactttcatcaagcagacgtccgaaatggctaatcactaagcgtttggtgatgtcggtttttggttgggtgaaaagggttttggttgggccatattccaccattttgccttcatccataactaaaacgtcgtcggcgatatgtttaatgatgccgagatgctgccccacataaatgtaggaaatacccaagcgttgctgtagcgagagcagtaagttggtaagctgagttttcactgtagcatctaatccgccaagtgcatcatcgataataataatttcaggatccataattagcgcccttgctaaagcaacacgttgtttttgactgctagacatggtgttgattttaatattggcgtgatcaggatacattcccactaattttaaagttttaaatattttctcattacgttcttcttctgatagctcggttagggaacgcagaggtgcatcaaggatttgccccacgtttaaacgaggattgaaggcactattgggatcttggaacatcatacgaatatgttttgcgcggtattgatgatcgccaaaaatcagttctttatcccgtaaaataatttttccttcagaacttggaattacgcctacaatcattttcgcaagagttgacttacctgagccattcttgccaataatggctaatgtgcgttttcgatttaaatgaaaactcacattattaacggcgataaattggttagcgttgaataaactgattttatcgctaaaagatttcgatagatcttcaacttctaataatgccataacttagccttgctccgtatgttgttgtaatgttagcggcgcgcttacttgtttttctctaaattgtttttctcgtagattgagcgggtagtggcaagaaaactcgtgctgtttaatgcggtagcgattaggttttacgatgcattttttttgggcaaaaggacaacgaggtccaaggcggcagccgatgggcaaatgttccaacagcggcacgctgccacgtaaaatattcaggcgactttttgtgggtaaaggttggctgaaatctggaattgagtgcaacagtgcctgtgtataagggtgatgaggaaaactgagtaattcttctgtgggaccagattcggcgttttgaccgcaatatagcacagacaagctgtcacaccaatctcgaatgctaatgatgtcgttgctagtgagcaaaatgctggtgcctaaatttttgttcatactggacagtaggcgaaaaatttgcactttggtggtggattcgatagcgtttgtgggttcatccgcaatgagcaatttgggctgattggcaacggcgatagtgatcattattttttgtgcttcgccttctgtgagttcattggggtagctttgcataatgtcgttgtgttctttgataccaacacggtgtaacagttcgatggcacggcgttttttccagccaaaccattgccaccagcgtcctttaaaagtccagctaggaatattttgaataatttgtttgccgatttttttgcttgggtctaaacaagtgattggatcttggaaaatcattgaaattttacgtcccaccactcggcggcgttgttttggactcagtttgagtagttccacattatcaaaacggaaacgatccgcacgaataatccaatcctcttttaatacgttgcaaatcactttagcgataatgcttttgcctgaaccgctttcgcccactaagccacagatttcaccttcatttagggttaaattgacattatcaactactttgactaagccatgtggcgtgttgatttcaatacaaagattgcgaatatcgagtaatgccatatttatcctcgttcataataggttttcaccgtatcgcttaaaccttggctaaagattaacagcgttagcaccgttacgatgattgcaacaccgggtaggatcactgtccaaggggcaaggtaaatgagttctagagaatctttgatcatcgctccccattctggtgttgggcgttgtgcgccaagagaaatgaaacctagcgcgctaatatctaaaatcgctgttgcaaaagaacgtccaatttcttgaatatagcgatgcatgatgttgggaatgacggtttctttcagcagtgttgaattcgacacaccgtcaagttttagcattagcacatattctttattgagttcttgttgagttaatttgtaaatttcatgcataaaataaggcagtattgccaaggtggtggcaatggttgcgccgagtaagctcgcttctagtaacgttgcgataataatcgcaattaataaactaggaatggataaaaaagtatgcagaatattacttaatattttcgatttgatactgtgcgatatgccagcccaaatgccaatgaccgtgccaaacagggtaacgattaatatcaccgctaaagatgatcctaaagtataagctgagcctataattatgcgactaaatagatctctgccgatatcgtctgtaccaaagaagaaagaaatcgtgccaccttcaacccaagaaggcggtagcaattcatgttgtgcgaattgttctacactagaataaggcgcgagtaatgggctaaataccgtcgttaatatgaaaatgacgagcaagtagaaactaaatagagcaatcctattttgtctaaaaatagtccaaatttctttgagtgcggtactttctctaaaatcatcaggttctttatcttgcataccagccctttttattaaatggatctaaaagaaatgtgagtatcgttgagattaaatacaccactattatacaaagcccaattgcaataataccgacggaaatactgttgtaatcttgtaaattgacagaatcaactaaccaacgcccaatgcccggccagccaaaggtgctttcagtcaacatactttgtgtgagcaccaatatgaacaatcttggcatttgaggaattaggataggaaaagtattacggaacacataagtaaataatattctgagttgcgaccagcctcttgttcctgccactttgacataattttgggtaaaaacaaattccgctcgttgttgaactaatctcgtgatatccatggtgggtagaatagtcagtactaatgtaggtagaactaaatgctgtaacacattttgcaccactttaatacgataaggttgatctataaaccatacatcaataatgggaaagccagtgacaggttggatttcatacaacaagttatattgaccaatggcggaaatttcccaagcttgaatggcggatacataaagcagaatgggggcaatccaaaatacaggaattgatagacccaaagcagaaatattgcgaatggagctacctaaaaagttatggctattcatagcgccgatgaagccaagaggaataccaaaaattgaggcaaggaaaagtgagctaatgcaaagttgtagcgtcggtggtagcacagtaaacagcaaacttttcagttcatcaccgccgttataggtaatacccaaatcgccgtgtagtaaggtttgcaagtaattagagtaaccaacaagcacatttggttctgctaaaatatcattgagtggatcctgcaataaaataatataactgagcaaggataaacccaataaacttactagcaataacgcaatttgacgcaataatgagttagacattatttatcctcccgcttgagccgtaaggtttggaaattaatgcttccaaatggggtcatttctacaccttttacttttccgtttacgatcaacattcttttcgcattggcgataggaataatagggatttctcgcaggataagttcttgagcttgttgatattgataagctctttgtcgcaattctgaggtgttgcgagcttcattcataaaatggtcaaatttaggttcgcaccaattcgatagatttgtaatttcattcaccgcatcacaaccgagaataggtcgcataaaactatctggatctaaatttcctgctagccaacccgctaagataatgtcgtaatcttcagttttattttttaattgttcgatcaaataagtgcgagttacagaacggacattaacatctatgccgactttagctaaatcctgcttaattaattccgccgtttttaacggtgaagggttataaacctgttcttcatttaatacccacattgtcagcgataaggcgctatctgagagattctgacgtgctttttccacattataatcatagtcaaaatcaggggtgttaatggtggaagcccaagaaatatcaggaataatattgttcgctactgtggcggtgtggtgataaatggttttgacaatgcgtttacgatcaatggcttgagagatgccttggcgaattttttcattacgcatcattggcttttgaaagttaaacgcgagataggacagattcataccatcgacagattcgacataaaaacgctcgttatttttagctaataaaccaagttgacttacttcagggtaagaagcaatttgacattcattgttgagaaatttcaccagccgccctgtgcgatcggtagagacgtcgataataatgttgtcaatatttgctgaatgctgccaagaattggggttacgcaccaaacgaacatattggcttttaaaagaattttccagttgataggcacctgtaccgacgggcagtaaatctagctgaacaaggttgtcgtcggcgtttagctgcaatgcgtattcttgtgaaaaaataatggcatactgacttgccaaatgagacaaaatggaggcgtcgggttcaaataaattaatctgcacttcataaggggaaagtgccaccacggactggattttttcatttaatttaatgctctcaaaataagggaagcgaacttttttcgcttgttggtggaatatttgatactgcggattgttgtattttattgcatcagtttcaatggaaggaagataggtatctctaccgatcatacgattaatagaaaataccacatcgtcggcgttaaattcacgagtcggtttaaaccattttgtatgatgaaattggataccgcgttttaacctaatgataatgctcttaccgtcttgagaaatggaataagatttggcgagaactggcgttactgttgcgctgtgatttttaatttcaaataacttattgtaaatctgctcagtgatcacgttcatatttgttcctgcatctgttgtttgcggattgaatgaaaaccctgtagcgtgggtgcaatacactagcccattgtccgttaagatttgaggaatcttcggggcagcggtaacgccgaagggcaagcttaatgcgatgccgaatagagcagacgtcgt

SEQ ID NO: 3176 - DNA, 23171 bp, synthetic construct
  misc_feature 1..23171: note = Synthetic
  source 1..23171: mol_type = other DNA
ggaaattcgaccgcacttcgccattctgtgattgatttaaaacagcaaaccgtacacaacggcttgtcagaacgtttgttgaaacaaatggaagtgcatttgcaaaaaggcaatcaggttttactgtttttaaatcgtcgtgggtttgcacctgtaatgttatgccacgaatgtgggtggatggcggaatgtcatcactgcgaaaaaccttatacctatcatcaacatcaacgtgctttacgttgtcatcattgtgcttctcaaaagccaattcctatgcaatgtggacattgtggatctacgcatttaattacgacggggctgggtacagagcagttagaacagacattggcagagtattttccacagtaccaaattacacgaattgaccgcgacagtacagcaagtaaaggtaagttagagagatatttatcagatattcagcaaggtaaaagccagattttaattggtacgcaaatgttggcgaaaggtcaccatttccctgatgtgacattagtggctttggtgaatgtggatagtgcattgttttccgttgatttccgtgcagaagagcgtttagcacagttgtatgtgcaggtggctggtagagcaggaagaatggaaaagcaaggcgaagtagtgttacaaacgcattatcctgatcacccgcttttacaaactttactcacacaaggctacgacaaatttgcgaagcaagccttgcaacttcgacagaatatggggctaccgccttttagtgcacaggcattgtttaaggcacaaagccgatattttgaagaagcagaacaacaattacagaaaattgcagattatttttaccaatggaatgcgagaaccgataatcaattgcagattttagggccgattactgcaccatttagtaaaaaagcaggacagttccgttggcaattgttattacagcatccttcacgaatgttgttacaacaagccttagcacaatttcaacaagcgaatattgtgacctcaagcaaagtgcggtgtgttttagatgtggatccaatcgatttaagttagcttaatttgagttaaaaaggatttttcagtaaaattgttcagattttttgattattttgaaaaggtaatatcgtggcaagacgcaatcatcccgcaagaggcggtagtaaaaagaagaaaggaacaagtaaaacagtgctatttttaattgcaggtgctgtgattgttgtttttgctttggtgttattttttatgaaagaaaaagcaccagaagtcgttgttcctaaggtagagaaaacagcaccgaaaagcgtattaccaaatcgtccagaagaagtgtggagctatattcaggctttagaaactcgcacggttccagtagatgataatgcaaaaaatttagataaaaatatgcgcttaaccgaagaacaaaagaaaattttgttagcaatggaaaaagagcaaaaagaagcagaacaagcgcgtttgaaacaacaagaagaacgtcagaaagcagaagaaatggcgaagaaagaagccgcactttctacacctaaagctcctgaaacaccaaaacaaactaaaccacaaaatacaccggcaacggttgtcgaagcgaaagcaagcgagtcgaaaaaagtggacattgtaaaagaagtgccaaaaacagaaacgccaaaagcagaagtcgtgaaaaaagtggaaaagccggtagagaaacctgctgaaaatccagcgccaataaaaacgacaacgaacggaagacaatatggtttgcaatgtggtgcgtttaaaaataaagcgcaagctgataatttacaagcacgccttgctttaacgggcttaaatgctcgagtcaattcaagtgctgaatggaaccgagttgtcgtggggcctttgggcgatagagcctctgcggttcgagcgcaagaaaaagcaaaatcagtgataaattgtgttgttatcggtatgtaattagttaaaaaacgtggtgtaaaaactgcgtttttttgtttttgaacttgcttaaattttaaaactctttagaatgaacgaacgttcattcagttagtgcgtacatcatatgtgctgattgttcccttctaaatgtaaatcaattgagtgaattttattatgcgtcaatctgatacagatatgaccgagcatatttttacggcaatagatcatctgatggcgaaagatggtttacataatttgtcgatgcataaaattgcaaaggcagccaatatttcgccaggtacaatttatatttattttaaatgtaaagaagaattgctagaacaatttgctcggcaagtatttgcacgttttcagcgtgaattagaaaagaattatgatgaaagtcagtcacttttcggacaatatcgtcaaatgtggtggaacatttggcattttttaggtgaaaacccaaatattatattgaatatgcatcaatatcagtccttaccgggctttgataaggtgataagagagtgggatcgtagccactggacattattctgtgaaaaagggcagaaactcggtgtgttatgtgatttaccaagtaatattctcttttctttagggttagaaagtgcgatgaaaattgcgtggaaacaaatctattttaaagaatcgttttctgaagaattactggagtcggtaattcaatgctcttggcgagcaatgcaaaaatagtttattttttgatattaatggagtttttgtatgagtgggactcaagcaaatcaacctaaacgatctcattcggtgatgatgaaaatcattttagggatcattgtatttttatttgcagtggtgatcgttttcaatgtgatcaaagggaaaatgattgagaaagccattgctggaatgggagaaaaaatttatcccgtaacggcgatgacaattcaaccacaacaatggacacctgtgattgaaacaacgggcttggtgcgaccaaatcagggcgcaatgttaagctcgcaaacatcaggcaccgtgagcgaagtgttagtgcaatctggtcaagaagttaaaaaaggtgacatcttagtagtgttagacagttcagtagaacaatctaacttacgtgcgtcgcttgcacaattatcttctgtcaaagcgacttatcaacgctatttgaatttgtataaaaccaaaagcgtttctcaacaagaactagataacgcaaaagcggcttatgaagcattagagtctaatatcgctgcattaaaagcggggattgctcgtcgccaaattgttgccccctttgatggtaaaactggtattgtgaaagtcaacgttgggcaatatgtaaatccaggttttgagattgtgcgtgttgaagacacaagtagtatgaagattgattttgcactttctcaaactcaattagaaaacttatacattggtcaaaaagtcaccgcaacggcagatgcaagaagtggtgaaacctttgcagcaaaaattacagcgattgagcccgcaatcagctcaacaactggtttaattgatgtgcaagcgacttttgatgtagaagatggccgtaaattgttgtctggaatgtttacacgtttgcgtgtggcattagctacagaatatgaccaagttgtcgtgccacaagtggcggttagttacaatatgtatggtgaaattgcttatgtattgatacctctttcagacgaagatcgtgaagcattaagcaaccgtaaagattttgaccctaacaatttaggcaaaacgtatcgtgcaaaacaaatcaccgtatttactaaagatcgccaaggcatttatgcacagttaaaaggcgatgacgtgaaagttggcgataaaattgtgacaggtggtcaacaaaatttaagtaatggtagcttagttatcgtggctgacaaagctggcgtaggtacacaacaacctgcgaagaaaaataacctataaagtgcggtagaaaataggaaagattttatgaattattcattattactcaaacaattagagcaaattttagaaactgaaacttatattatttcaagaatggcaaacacctccgcatttatttatgaacatatgccagatttgaactgggttggcttttatattgtgaaagacggtgtgttaaaagtaggtccattccaagggaaagtggcttgttcagatatcggctttggcaaaggcgtgtgtggctatacgtggaaaactggcacaacaacggtggtggaagatgtgcatcaatttgatgggcatattgcttgtgatagcgcatcacagtcagaagttgttgttccgatttttaaagacggtgaaatgattgcagagttagatgtagattcacctcgtttagcgcgtttttcagcggaagatgtagaatttttagaaaaatgtgccgcacttatctgaatgaaaaagtaggaaactaaaatgcgatttaccgatatttttattcgacgtcctgtcttggcggtgtcaattagcttgttaatcattattcttggtttacaagctattgctaagcttgcagtacgagaatatccaaaaatgacaacgacggtaattaatgtctcgacgatttatcccggcgcagatgcaagtttaattcaagcgttcgtaacgtcgaaattagaagaggcagttgctcaagcggataatattgattatttgtcatcgaaaagtttgccaaatagttcgttaattacgatcaaaatgaaattgaatacggatcctaatgcggcattggcagatgtgttagccaaagtaaactctgtgcgttctcagctacctagagggatagatgatcctgtaattacttcatcaaccggtggtacgggtatgatgtatatccaatttagctcggcgaaattggatgcaagtcaagttactgattatattgagcgtgtgattaagccacaattctttacggtagaaggtgtggcagaggtgcaaatatttggtgcgtctgattatgcgttacgtatttggttagatccagccaaaatggcatcacagaatttatccgcaatggctgtgagaagtgcattgtcatcgaataacgtacaaactgcggcaggtaatgacaatggtttttatgttacttataaaaataaagtggaaaccacaacaaaatctgttgaagaattgggtaatttagtgatttcatcgaaaggcaataaactagtacgtttacgtgatattgccgaagtggaattaaataaatccagtgatagtactcgagcagttgccaatggcttggaatctgtagtgcttgcaattaacccaacttcgtcagcaaacccattggtagtagccgaaaatgttcgccccttgtatgagcaaattaagcgtaatttgccagacagtatgagcgcagaaattctgtatgataccacaattgcgattaataattcgattgatgaagtagtgaaaaccattctagaagcaaccatcatcgtattggtagtaatcactttatttatcggatcattgcgagcgattttaattccagtaattacaattcctatctcgttaattggggtaataatgctattacaagcgtttgatttctccattaacttaatgaccttgctagcattgattttagcgattggcttggtggtggacgatgcgatagttgtacttgaaaacgttgatcgccacattaaactcggtgaaacaccattccgagcagcaattattggtacacgagaaattgcagtacctgttatctcaatgacaatcgcattgatggcggtatattcaccgatggcattgatggatggtattacaggttcattatttaaagaatttgctttaacacttgcaggtgcagtgtttatttcaggtgtggtggcattaacactttcaccaatgatgagtagttctttattaaaaccgcatactgacccaagtaaattagaaaaatgtatcgagcatatgttgaccaaaatgaataatggttataactatgcgttaaatctagtgatggctagccgcaaatgtatgttggcatttgctgcaatcatctttgcaactttaccgttcttatttaattctctggctcatgaattaacgccagcagaagatagaggcgcatttatggtggtcggtcgtgggccttcaaacgtgaatgtggactatgttcaagagggaatgcgtgagttcgaacagattttaaaaaatacaccagaagtggatttttcaatggtgatttctggtgcaatgggtagcaaccaatcattcagtgtagtgacattaaaagattggagcgagcgtgatcgcaaacaatcagaaattctgaatgagcttaacaaaaaagcggcgcatatcccagaaattgctcttactggttttaacttcccagaaattaataccggtgagcaaggacctccaattggttttgtaatcagtacagccaatgactataaagacttagccaatgttgcaggcgagtttttagataaaatgaaaaaatcaggtaacttcgtttatactgcattggatttaaaatttgatacagcgcaaatgcgtatcaaaatagataaagaaaaagcggggacttatggtgtcacaatgcaacaaattagtgcgaccttaggtagtttcttatctgcggcgacgattgaacgtgtagatattgatggtcgtgcgtaccgtattattatgcaagtaaaacgtgatcagcgtttatcgccagaaagcttgaataattactatgtgacagcaagtaatggtaaatctgtgccattaagtagctttttaactgtaacgttagaaccacaaccaacttcattacctcgttttagtcagttaaactcggcggtaattagtgcggtgcctttaccaacgaaaagtatcggtgaagcggttgaatggttgaaagcggctgcgcaagaaaatttaccgcaaggttataactatgactttacaagccaggctcgacagttagaacaagaaggcaatgctttagcatttactttcgtgttagcagtcatcatcattttcttagtgttagcgattcaatttgaatcaattcgcgatccacttgtgattatgatttctgtaccgttggcagtcagtggtgcattattgacgctcaacattctgagcaataccgttccgggtctgttaagggcgtttggtatcgtgatgagcttccctggcacaaccttgaatatttattctcaggttggtttaattactcttgtgggcttaattactaaacatggtatcttgatgtgtgaagtagcaaaagagcaacaattgcattacggcaaaaatcgtaccgaagcaattatggaagcagcgaaggtgcgtttacgtccaatccttatgacaacagctgcgatggtggcgggtgtaatcccattattatatgcaacaggtgcaggtggtgtttcacgttttagtatcgggattgtgattgcttctggtttaaccattggtacgctatttaccttgttcgttttaccagtgatttatagctatattgcaactgaacataaaccgttgccagagtttgatgaaagtatcaaaccattgacggataattcttctcactaagcttgagaaaacttgataaaaaagaccgcacttttaaacgaagtgcggtctttttttatgattttttttatcgctatgcgtgtggtgtttgttctgatgaaggccatgcattcacaacggctttcactaatgttgctaatggaatcgcaaagaacacgccccagaaaccccataaaccaccgaaaattaaaaccgcaataataatgacaagcggatgtaagtttacagcctctgagaataagaacggcactaataaattaccgtctaaaagctgactcacaatataagcaataaggatataccaaaatgttgggctaataccaaattgcgctgcagccactaacgctactggaatagtcactaacaccgcaccgatataaggcacaagcacagataagcccacagcaaccgctaataacaaggaataattcaaaccaaagaacaagaaaattgcataagttactgcggttacaatgataatttcaaataattttccacgaatatagttagcaatttgttgttgcatttcttgccaaacgttagaggcaagggtgcggtttttcggtaggaaacggcttacgccagtcatcaattcttttttgtcttttaataaaaagaacaccattaacggcactaagaaagcataaatgccaagtgtcaccaaacttaataacgaggtaagagagaattttaatgcggactcaccaaagccaagaattttagcttttacagagttgagtactgaatcaatagtttgataatccaccagttcaggataatgctcaggcaaagaaagtaaccacacgttaattgtattgaacatatgtggaagatcactgactaagttaacagtttgtgtccaaagtgttggaataagcacaagcacaatcactaaaatcaagctaagaaaaccgccaaaaatcagtgcggttgataataaacgtgggaatttaagtttatcggtcagaaaacgaattggccattctaaaaggtacgccaacacaattgcaatcagtaacggtgcgattaaatgactgaaaaaataaatagaaataaaaccaaataacaagatagcaaacaaccccatcgcttgcggatcgctaaaacggttgttataccaactttttaacatttcgatcataatattcccttaaggtaagcattttgagcgattataagttaaaatctaacgagatcatattattaagcgaggaaattctatgacaatcacgatttatcacaatccacgttgttccaaaagtcgcgaaacattagcacttttagaacaaaaacaatgtgagcttgacgtacaagcctacttaaaccatcaattcactactgaagaattgcaatcaattgcaaaaaaattaggcgtgaaaagttttcgtgaaatgatgagaaccaaagatgaattatttgccactttaggcttaaatcaacctgatgtgacagaacaacaattgttagacgctttggtagcaaattccgcattattagagcgtccaatcgtggtcaacggtgagcgtgctaaaatcggccgaccaccagaatctgtacttgagattctctaatttcgctttataatgttgcccgtttgttaattaaaataaacgggcaaatgttaattactttataaggaaaaattatggcaaaaaaacatcagccacaaagtgctgagccttatcagcacaagcgtggaacaattaaagataatgccatttgcgcattattacacgatccgttattccgtcagcgaattgagaaaaaacgcaaaggaaaaggcagctatcagcggaaagcgaaacacgtagggaaattttttgaaaagcccgattataaaatttttgatttgaaagattttataatcgggtttttcttaaacaacatttacaacaatgcaactcatttaaactcagcgaggtaaatttatgactatgcaaacggaagtactttttagtaataattggaatgtaagaattagtgaccctggtgaagaaggggcgcaaagtcacttttttgaaaccatttatatcacacttgaagcgcatattaagggtgatgaaattgcttatgaatttacacgtaaagtagaagatcaagtaaaaatcaaccgcacttttaccgatttaagtgagcttttcaaattcctcggtgactaccttgacccagtgagtatgggctttttaggtatcaaaatcggcaacttaggcgttaaggcttaagtttcattccttctagaaaaacgatgccccttgaaattttcatctcaaggggcagagcgttacggtcattcttttcagaagccttattgtagcaacgtctctcatttcgcagtgcaacaatatgtgatctaatctacattattgtgtaaatttaatcaatagttttatgcttttgttttagaataattaaatggacttttattcaaggaaaatataaggaatataaaatgcaaccagttaataaccaattaaattatattttaggtctggatttggggattgcttcagttggctgggctgttgttgaaatagatgatgatgagaatccaacaaggttgatagatgtaggtgtaagaacatttgaacgtgctgaagttccaaaaacaggtgagtcactagccctttctcgccgattggcgagaagcacaaggcgcttaatccgtcgtcgtgcttatcgtttattacttgcaaaaagactttttaagcgagaaggaatgcttactcaagcagatttggataaaggacttccttgtcaaatatggcaattgcgattagaagggttagaacgtaaattatctgcaatagaatggtctgctgttttattacatttattaaaacaccgaggatatctttctcagcgtaaaaatgagagtaaaacggataacaaagagcttggagcattattatcaggggtcaaccaaaaccatcaattattacagtcagaatcttatcgaactccagctgaactcgctgtaagaaagtttgcggaagaagaaggacatatccgcaaccagagaggttcttatacacataccttcaatcgtttagatctattaaacgagcttaatttactttttaccattcagcgtgagctaggaaatccatatacaaccgaagtattacaacaaagaatagttgacttactgatgtggcaaaagcctgctttatccggtgaagccatcttaaaaatgttaggtaaatgtacgtttgagccaagtgaatacaaagctgcaaaatctacttacagcgctgaacgtttcgtttggttaactaaattaaataatttacgtattttagaaaatggtactgagcgttcattaaccaatgatgagcgtttattattaattaatcagccatatgaaaaagcaaaattgacttatgcgcaagttaagaaaatattagaactgcctgagcaagctattttcaaaaatttaaactacataaaagaggatgttgaatctaaaacaacgctaatggagttaaaggcttggcatgcaattcgaaaggtattagaaagtaatgggctaaaaactgaatggaaaggattagctagtaagcctgaattattagatgaaattggtacggctttttctgtgtataaaacagatgaggatataacaaaatatttagaaaataagttatcttcttcagtactgtctgttttattagcaaacttaaattttgataaatttattcaattatcattaaaaagtcttcaaaaaatcttaccgcttatggagcaagggaaacgctatgatgaagcttgtagcgaagtctacggtgatcattatggtacaacaatccagaaagagcacatttttctccctccaatctcggcagatgagattcgtaacccagttgttttaagaacgctttctcaagcacgtaaagtgattaatggtattgtgagaatgtatggttctccggctcgagttcatattgaaacagcaagagaattaggtaaatcttttaaagagcgtaatgagatcaaaaaacgtcaagaagaaaaccgtagcgaaagagaaagagcggtacaaaaatttaaagaatatttcccagacttttttaacgagcctaaagcaaaagatattgtgaaattgcgtttatatgagcaacaacatggaaaatgtttatattcaggtaaagagctagatattaaacgactaaatgaaaaaggttatgttgaaattgatcatgtattaccgttttctcgtacttgggatgatagttttaataataaagtgttggtgttggccaatgagaatcaagataaatctaaccagacaccttatgaatggttaggagggaaggaaaactcactacgttggaaaaactttattgcattagttatgggaagtcgtttttctcatggtaagaagcaacgtattttgacacaaaaactcgatgaaaagggctttattgagagaaatttaaatgatactcgctatgtcgctagatttttatttaattacatttctaacaatatgaaactgttaggtaaaggtaagcgtagagtatttgcatcaaatggacaaattacagcgttattacgtagccgttgggggttatctaaagttcgagaagaaaatgatagacatcatgctttggatgcaatagttgtggcttgttctaccgtatcaatgcaacaaaaaattacacgttttgtgcgattttatgaaatggatccatttactggagaaagaattgataaagaaacaggagaagtgatttcactacacttccctgaaccttggaaatattttagacaagatgtcaatattcgtgtattcgatgataacccaaaaatagcattagaaagaatgctcccagatagacctgaggctaatcatgaatttgttcaaccattatttgtatctcgagctccaacaagaaaaatgactggccaagggcatatggaaactattaaatctgcaaaacgtttatccgagggagtgagcgtattaaaagttccattgacacaattaaaactcaatttattagaaaatatggtaaatcgagagcgagaaattgagctttataatagattaagaatgcgtttagctgaatttaataacgacccactcaaagcatttgaacaaccgttctataaaaaaggtgggcaactagttaaatcagttagagttgagcaagttcaaaaatcgggtgttctcgtccgtgaaaatactggtgttgcggataatgcatctatggtgagagttgatgttttcgagaaaaaaggaaaattctttttagtaccaatatatacttggcaagttgcgaaagggatattacctaataaagcagttgtcgcatacaaagatgagaaagactgggaagatatagatgagtcttttatttttaaattttctctttatccaaatgatttgattaggctagttacaaagaaaaaagtatttttggggtattattcaggaatgaaccgagcagttgccagtattaatattcgggagcatgacttggatatacagaaagggaaaaatggagagcatttaagtgttggagttaaattagcactatcttttgaaaaatatcaagtcgatgaattaggaaaaaatataagaatgtgccgtacaacaaaaagacaacaagtacgttaaagttaaatcccaacttttgagaaaagttgggatttttttaggagaatactatgagttggcgcagcattttaattagcaatggaggtaagttatcattgcataaacagcaaatgttaatacaacaatctaataatgaatttacagtcccgatagaggacatcgcggtgattgttattgagagtagggaggttgttatcacagctccattgctttcagctttagcaataaatggggtaacgctattaacttgtgatgagcagttcttgccttgtggtcaatggcttccttttggtcagtattatcgccaattaaaaacactaaaattacaattaggagctacccaaccgcagcgaaagcaattgtggcaaaaaattattcaacaaaagatacgcaatcaggcttttgtattacagcaggtcgattatattaatgaagctaatcgtttaaatcaaatggctaagatagtgagatcgggtgataaagaaaatatagaagggcaagcagcattaatttattttcaaactttatttggtaagacatttaaacgtagcgaggaaaatctcataaatgcacatcttaattatgcatacactgtattaagatcagctgtagcgcgtgccctagtcctttatggttggttacctcaattaggcttatttcatcgcagtgagttaaatccttttaatttagcggatgattttattgagccttttcgaccattagttgatttaatggtatggaaattatgggtgaacaagaaacttgaagtaggtctatcaccatcgacaaaacagttgcttataagtatcctgcactatcaaatgttattcagagaagaaacatttagtgtattagctgcaatagatagaatggtttcgtctttgcaaatagcattgatttctcaagatgccaagctactaaaactgcctgaaatgcttccattaaaggaacatcaatatgagtgaggctaaatttatgcgtttaatcgtttttttcgatttaccagttacaacaaaagaaaagagaaaggccgcgagccagtttagacattttttgttgaaggatggttatcagatgttacagctttcggtatatgcaagaattattcgtggtagggattctatgttaaaacataataaaagattatctgagcatttgcccgaggaaggttccattcgttgcttggaagttactgaaaaacaatttgcaagtatgcaaattttattaggtgaattgaaggtgcaagaaaaaaaagtaaatgcaaatcaaatgctacttttttaattaattatatagttatttattcattatgctacacttaaaaggattgttcaattgcttgttttttgtccttttaagggtcatattattttgataaaagtgattcttatatagtttttgttatcaatttttcgatttttttgataacgaattagtaagttttttgggagagaaaaacataaaataataacaaattctttcatttttttattatagaaaaacgccctagtcctttattgataagggattagggcgttgagattgtagcactgcgaaatgagagagggaactacaacgtttacaccattttcaactgcttgctcaatattgtagcactgcgaaatgagagagggaactacaactccaaaaattcggatgcctcctcgtgcgctattgtagcactgcgaaatgagagagggaactacaacaattcacttcaagggcttactacaccctgaattgtagcactgcgaaatgagagagggaactacaacaatatcacaagaatgtgggatcgtttctgtattgtagcactgcgaaatgagagagggaactacaactcttactaatacaatagattctgcaaccggattgtagcactgcgaaatgagagagggaactacaacttcggtgttaaagataaatcatcaacataaattgtagcactgcgaaatgagagagggaactacaactgggtggcgaagggattttgagctacaaaaattgtagcactgcgaaatgagagagggaactacaacttaatcggtttggttgtgtggctcggtgctattgtagcactgcgaaatgagagagggaactacaactgatacagtgcctttatatcctgcccattcattgtagcactgcgaaatgagagagggaactacaacttagaaaaagtcgtatctgcgaatgcagacattgtagcactgcgaaatgagagagggaactacaacatcattttttattttaatcatgaaatttatattgtagcactgcgaaatgagagagggaactacaacatatctgaaggttctcgccagtggcgtcaaattgtagcactgcgaaatgagagagggaactacaactatctaaatttaaagaagtcgatatatatgattgtagcactgcgaaatgagagagggaactacaaccagatgattttaattgttgaagaagacagaattgtagcactgcgaaatgagagagggaactacaactcaacaacttcagcatttaagcaatcaatcattgtagcactgcgaaatgagagagggaactacaacggcgcgccgtcgtcatagattgtgaaatccattgtagcactgcgaaatgagagagggaactacaacgtgcataaatcgctaatgcagcacccattgattgtagcactgcgaaatgagagagggaactacaacaatgggatattacctacaataaagggtctaattgtagcactgcgaaatgagagagggaactacaacgcatttttagctagttcacgatacatatctattgtagcactgcgaaatgagagagggaactacaacaattaaaggaatgttaaatggcaacgattaattgtagcactgcgaaatgagagagggaactacaactgaagcattggcagtgagggaaatctacaaattgtagcactgcgaaatgagagagggaactacaacctatgaagtatgcccccgtgttgcgcatttattgtagcactgcgaaatgagagagggaactacaacttgatttaaaagcatctcaccgtgagtagaattgtagcactgcgaaatgagagagggaactacaacctcgctttcattttccacttcaaattctatattgtagcactgcgaaatgagagagggaactacaacgctcataaattcattatattgacgagctgtattgtagcactgcgaaatgagagagggaactacaactgtgcagttcgtcgtttgcgttcataatgcattgtagcactgcgaaatgagagagggaactacaaccatcaggtgtttctacatggttttcatccaattgtagcactgcgaaatgagagagggaactacaacgttgagaggcaagcagtaagccgaacaacaattgtagcactgcgaaatgagagagggaactacaacgacttcaccactgatgttagcgccagtttgattgtagcactgcgaaatgagagagggaactacaaccctgcgtcattgtttgcgataactcgccctattgtagcactgcgaaatgagagagggaactacaacataatgcacaatcggaattaagtatcaccaattgtagcactgcgaaatgagagagggaactacaactaaaaatcataaatacacttgctatttgatattgtagcactgcgaaatgtgagagggaactacaacaatgtgcgctgtattgagtggggaataaatattgtagcactgcgaaatgagagagggaactacaaccatactacacctataaaaaaagccgtccttattgtagcactgcgaaatgagagagggaactacaacgtcgaatggaagatgaacaaattattaaagattgtagcactgcgaaatgagagagggaactacaacacaaacgtcaggaatactacctagagggagattgtagcactgcgaaatgagagagggaactacaacaaaaaaacaattaaaaaactttcccaataaattgtagcactgcgaaatgagagagggaactacaactgcagcggaattactaaccaccatgcattcattgtagcactgcgaaatgagagagggaactacaacaaaaaaacaattaaaaaactttcccaataaattgtagcactgcgaaatgagagagggaactacaactgtaacaagtcgtgaaaactacacatgggaattgtagcactgcgaaatgagagagggaactacaacataacttaaataaatttgttagattaaaaaacattgtagcactgcgaaatgagagagggaactacaactttttgctcctttatatgcatctataattccaggccccgctctttcaacagaaacccgcataacagaattcacaacaccaaccatatatttaattgccatccctgcaattaatcccataacaagaaaagcgaaactggttaaaaatggatttcctacatacttcatttgatcttgtaaaaaatcaattgaactttgcaccattacattcatacaaaccatagctaacgcattggataataaggcacttgcatattgcgcaaagctatcttttaaccatccccacatcaacataaagaagaaaataggcgatagggcgagtaaaaaatataaggtgattttagaaagcaaaaaagttaaggctataggtatagccattaaaccaaacccaacccaaattaatgttgcagtaagccattctgctgaccaactagtttttctagccacaaaatcagaataagtagaagttgcagctagcaagtcatcaaataaacctaagacacttttcccatttcctcctattgtagacagctcctttacagcctcattaaacgaatttagtattccaccttcgtttttaataaaggctataatgatagcaaaacgcgctaaattccatataagatcacccagtggggtttgaacttttcctgccaacaccatatagccataaataacaatgtatagtgttatagaaactagcaataatgtgccaatttccccagataatagcgtttgaattttttgagctatcgttgttagaaatgtatttagaaaagtatcaattttagtaaatacatcgtttgccattattttttaccaagcatctttagatgttcttcacttaataaaccatttttaaaactatctatatttgcataagccccttttaccgtttcacacttatgtttatcatttaaggcaccactagtacattcatcaagagttttattcaataatggttcattctgcaaataatcataaatggttaaatttttctcttcacagccagtaagacctaaaattaatacgcttgaaacaattgagggtaaaagtaattttttcatatgtaactccttatgagatattagttagtgattatttaatttcggttaaaacgtgttgattagctactttgcgaagttcaacttcttttaatttttccgccttacgatcagccaattcttccgaattttttgcaatatccattttgattttatcggcatttaacaacgcaatctgtgtttgcattgcattttgcaagtcttgtgcttctttcgtttttactgcgccctgcatacgtttagcaatttcattgattttattcacgcgcgctttgacttgtgataaatcacgtttcacttgctcttgtttcaccacatcaataatgattttgccttcacagttgcgtttttgtgaatctacaaagcctttacacatttcaccgacaccatactgatcgaagatttttttaagctgtggcgaaagaatctcatatcctttagaaagaattttgtcttggtcgcccatccatttatcaagatttttgatattgcctaaaatatcccctgcttcattcataaagcctgaaatatcggttatacctgtaatcgcacctaattgtgcttgctgatttttataatccttttcaaactgcgaaattctttccgtccaacgtttcgcttcaatcatccagtcttggattttattttgtatattggtagccatatgcgcactatcaacaattgtagcactgcgaaatgagagagggaactacaaccaaatgggcttggtagcacgttcggcttagattgtagcactgcgaaatgagagagggaactacaaccctctatcccctttaaaccatacacgctgaattgtagcactgcaaaatgagagtgagcgattcattactttttaaataattgctacctcaaatttatccctatttcattttctaatcaacaatcaactcagctcaaccccctcaatttcttatcgcattttctttgtattgcttatattattagcccatcttttttatgggcagagatgatgcaaaaaattttgttaattttgaccgcactttgggggcttcagggatgtgggactgtggtgaagttgttagaccctacagcaccctatacagcctatgcgggcacaaaatatgattttgaaatggcaaagaaatggggattgcctatcttagatttgcctttatcttttttacttgattccgcactgttgccttatgtgtgggcgcaagaatctgaataacgaatacgatgaaattaaattcacaacaacagcaagccgttgaatatgtcacaggcccttgtcttgtattggctggggctggctctggcaaaacacgtgttatcattaataaaatcgcacatttagttgaaaagtgcggttatttaccacgtcaaattgccgcagtcacttttacgaacaaagccgcacgtgagatgaaagagcgtgttgctcagtctattggtaaagaggcgagtcgtgggctgattgtgtcaactttccacaccttaggtttcgatattatcaaacgtgaatacaaacatttgggttttaaatccaatatgactttgtttgatgaacacgatcagcaggcgttactcaaagaacttaccgcagatttgctttcggaagataaagatcttctgcgtgagctgatttcaacgatttccaactggaaaaatgatctgatttcaccacagaaagcgaaggcacaggcaagggattcaaaagaacatacttttgcacaatgttatgaacgttatagccagcaaattcgagcttacaacgtgttggattttgatgatttgattatgttgccgaccttgttgttcaagcaaaatgaagaagtgcggtcaaaatggcagcagaaaattcgttatttgctggtggatgaatatcaagacaccaatacgagccaatatgaattgatcaaattattggtgggcgatcgagcttgctttacggtggtaggtgatgatgatcagtccatttattcgtggcgtggtgctagaccgcaaaatatgatgcgcttaaaaacggatttcccgcaattagaagtgattaaacttgaacaaaattatcgctcaacgcaccgcattttacattgtgccaatattttgattgataacaatgaacacgtgttcgataaaaaattgttttctaatttgggcgaaggcgaaaagttgcaggtgctggaagcaaaaaatgaggatgatgaggccgaacgtgttgtgggggagttgatcgcacatcgttttatgcggaaaaccaaatataaagattatgcgattttgtatcgcggtaaccatcaatcccgtttattggaaaaagtgttaatgcaaaaccgtattccttataaaatttcaggtggcacttcgtttttctcgcgtgctgaaattaaggatatgatggcgtatttgcgcttgttggtgaatcaagatgatgatgcagcatttttgcgtattgtgaacacgccaaggcgtgaaattggtactatcacgctgcaaaagttaggtgagttagcacaagaaaaacacacaagcttatttgatgcgatttttgattttgagcttattcaacggattacccccaaagcctacaatgcattgcaaaattttgcgcagtggattgtgaacttgtcagatgaagtggtgcgttctgaaccggctcaagccattcgtacaatgttggctcagttgcattatgaagaatatctgtatgaatatgcaaccagcccaaaagcggctgaaatgcaaagtaaaaacgttgcaactttgtttgactgggttgcagatatgctgaatggaaatgacgttgatgagccaatgagtttgaatcaagttgttacccgtttaacgttgcgcgatatgttagagcgtggcgaagatgatgatgaaagcgatcaagtgcaattaatgacattacacgcttcaaaaggcttggagtttcctcacgtgtttttaattggaatggaagaaggcattttgcctcaccaaactagcattgatgaagacaacgtggaggaagagcgtcgcttagcttatgttgggattacgcgcgcacaacaaacattatgtttttcattgtgtaaagagcgtcgtcaatttggtgagatattaaaaactgaaccgagtcgctttttagcagaattaccggcagacgatattcaatgggctcgtaataagccaccaatgagtaaagagcaagaaaaacaaaatacagctaatcaattggctaacttacgtgctattttacgtgggaaataggatttcttatttttttgtagagaaattattcagtcgaataattttttgtaaaaatgatttgacttatttttataaaaccgtattataccgcccacaaaccgattgcggtgagatggccgagaggctgaaggcgctcccctgctaagggagtatagggtcaaaaactctatcgagggttcgaatccctctctcaccgccatttactcaggttttactcactaaattagtgaatgtaaaacgatgctgcacccgtagctcagctggatagagtactcggctacgaaccgagcggtcagaggttcgaatcctctcgggtgcgccatttcctaataggctctaatatttgaaatggttaatgcaagtaaataaatgggaatcaaatatacgcacccgtagctcagctggatagagtactcggctacgaaccgagcggtcagaggttcgaatcctctcgggtgcgccatttcataacgcacatcctggtactccattttaaaattcatttcatttatagatattaagtatttataactctaaatttttttattgctttgagcattttaagcttaaaagtgcggtcaattttttatgatttttcatatcctaaagctttcttattgtaacttatttaaaatttcaggttgatctaataacagcgcataataattggcgagaaaataagtttgttcgtttgctggaattgggaaaggaataagctgaagaatttcttgatgcattgcagaaactattggaaaacagactgagctttgaattttatgttgaaagtctttatgtaatggggatgcacaatgctgtcttttaatacgtccgagcgcatttgctaaatgcactaacattgtttgtacttgcgatgtttcaacgttaacgtgccaatgttcagctaaatgtgtttttgtattgaacacaatgtctactatttgctcatcaattaattttcgcacttgtaacatttctaaatgtgcttgaatatccatacaaccctcgcatctgagtctagtgaagtctagcttactttgaacaaattaaacagtgcagagatcacaaatttatagcagaataagcttacttttcattaatgtttaaaaagagtgagtaatgttagattcaacagttcttgagcaatatgctggattaatttttgatatggacggcaccgtgattgatacaatgccttgccacgagcgtgcgtggataatggtcgcagaaagaatgggttatcctttatcgccttcagtaatgtacgaattagctggtgcaccattaaaaaccattgctgaagaaatgatgataagggctaatatgccgttggaacacttaaaagaagtcatgacattaaaacgtcagtttggttcagctttaattctaagtgaagcgactttattacctgccgcaaat

SEQ ID NO: 3177 - DNA, 23171 bp, synthetic construct
  misc_feature 1..23171: note = Synthetic
  source 1..23171: mol_type = other DNA
gcgttagtggaaaaaaatcttgccttaacgttacaaccttgcgaaaaacctgctcgagttttttcggcgaaaacgacagtatctgcagtgaatttatggaatttgctgccaaatggtgttatacgttatagtgatgtggttgaaggtgtggtggaaacatcgctcagtattggcgtgcttaaaaccgaggaagatcgcatcactggcactattttgctgcgttcattaattgaaagcggacgtgagtatgtggaatctttattacgctctttggcaaccctttctggcgcgcaagtgagcttttccggtgcttatccgggctgggagccacaaagagaaagcgaaattttagccttgaccgaacagttttatgcggaagtgttaggctatgctcccgtgatcaaagttatccatgccggattggaatgcggattattgaaaaaaatctatccggaattagatgtagtttctattggaccaacgattgtaaacgctcactcaccggatgaaaaagtgcatattccggcggtacaaacctattggcaattattgaccaaattactcgccaatattccgcataaataatgtacaagtataaataatacaaaaccttgtcggcaataccggcaaggttttttcattttgatttatgttacttttgtctactatgccttattttgacacgataaaccaaaggcgcaggtgatcataagtccaattgaaaataaaggtataaaccaaaattagcagggttaacccaatatccatcaaaaatgcgctccaccaatcgatttccaaccaataagcaacgagggggagggtgaacatcagcaaaccaccttcaaatgctaaggtatgtccaattcgcagcagaacactgcgtttttcgcgcggaccggtaaaaatgcgatcaaatagccaattgaaaataaaattccaaaatactgcaatgacggaaatgaagatgaccatgatcgtcagttgatccaattggtgttggctgactaattttaatgcggcgatggaaagcaaaatagctaacaattcaaataacaccgcatgaaaacagcgctcgtaaaatcccatcatcaattatcttaaacttgttcagaattgaccgcacttttggcttttttactcgctttttcggcgatattgcctttttctgaatgcacattttcagcgcttgatttgcggcgtttcccgatatttttactgtctttatgacgaattttcacttttttttgttccgcctttttcttttcttcgcgtttttcttttaggcgcgctttttgttttttgctcacggttttgatttcaccgtcttttggtggtttagttcgcggctcaagtccttccaaaatgcgtgcttttaaaatttcttgtgtataacgcttaattttgcccaataatttataatcatgagcttccacaaaagagaccgccgcaccttttttaccggctcgcgcagtacgcccgatacgatgcaaataagtatctgcgttataaggcaaatcgaaattcatcacgtggctgacatcttcaatatcaattccgcgcgccgccacatccgttgctaccaaaacggtcaccacgccatttttcagtttatcgatagcattattgcgctgagtttgtgccatttcgccttccaaatacgtactgcgaattccacgtttgcgcaaggtttccgacagttcgcgcacatcttcccgacgacgcacaaacacaataccacgtgttacctgttcttgttcgataaaacgtgccagcaatttgattttatgttcttggctatcggcgtgataataccattgttgaatttttttgcgttcacgacgactaggttctgcatcaatttcaagaggatcattaagtaaacgcgcggcaaaatctgctaataattcgccctctaacgtcgcggaaaataaaaacgtttgtttgcgccaacgggtttcagccgcaattttctccgcatcttgtccaaagcccatttgcagcattcgatcggcttcgtcaaaaattaagatttccacggcgcgacaatcgaaattttcttctttgatgtattgcaacaagcgtcccggtgtggcgaccacaatatcttgattatggttaaaaatttcaccgtgattttgatacgccacgccgccggtgatggtggcgatttttaattgggtaaattgcgccaagtcttctgcttgttgtgcgacttgcattgccaattcccgtgttggtgtgagaaccaatatgcgtggcgcaccgggtttgcggcgcggataatcgagcaaatgttgtagtgcgggtaataaaaatgctgcggtttttcccgttccggttggcgcagaacctaaaatatcgcgcgcttccattgcggctggaatggtttgtgcttgaatggcggtagggcgagtgtagcctttttgtgcaatggcgcgtaataattcgggcgctaaatcaaaatcttcaaattgtgttatggtcatatttcttgttactataaggtcaaatttgaccctgattataccgtactttgccgataaagtgcggtggatttttgagatatttatgcaccaagcaaaaagcggatttcgctttaaacaattttatgttaatcatcagcgctgtgccatgaaagtgggaacagatgggattttattaggtgcttgggcggatattacgccgggtgaacggttattagacttgggctgcggcagtgggttgattgccttaatgttggcgcaacgcacgtcggagcgcgcccacattagcgcgttggaattggatactgcggcttttttacaagcgcaagaaaatattcaagcgtcgccttgggcagagaaaatggcattgtatcatcaagatatcaatgatttttgcccaaagtgcggtcaaaaattcgatgttattgtgtccaatccgccttatttcccgccggcgcaaccttgtgcctcctcgcaacgatcattggcacgctatgcgcaacaaagccatgctcattggttgcaattggcggcaacttgtttgcgcgagcaggggcaaattcatgttattttgcctgttgacgccggcgaaacgttaataaaacagaccgcacttttttgttggcgacgttgcgaggtgatcactaaacaaggtaaaacgccacaacgcctgttgctcacctttggcttgcagcctaaacctgtgcaacgatcgcaactttgtatttataacgcggaaaatcaatatactgatgaatttatgcaattgaccaaagatttctatttgaagttttagtcggttatattgtcgttaaccagccattttctctttatagtgttggcgacagacagatagataacgttcgttgccgccgatttgaatttgttcaccgtctttgacgacttcgccttgcgcattgaggcgtaatacaaagttggctttgcgtccgcagtagcaaatagttttcagttcttctaattgatctgcccatgcaagtaaatactgacttccttcaaataattctgcttggaagtcggttctaagtccataacaaaggacgggaatatgtaatttatccaccacatcacttaactggtaaacctgttctttggttaagaattgggcttcgtccaccaaaatacaatgtagcttttgttgttctaaatgggcggcgatttctaaaaataaatcagtatttttgtgaaataaattggcctcccgatgaatgccgatgcgcgaggtaacttgcccttgtccgaagcgattgtcgatcgcggcggtgtaaactaaggtgttcatttcgcgctcgcgatagttgtaatccgattgcaaaagcgtagtggattttcctgcgttcatggtggagtagtaaaaatagagttttgccataatattatttgccctaaagtgcggtcatttttacgccgattttaacgggcgaaggtcggtcattgcccaacgtggtttgacgtcgatttccaatggtgtttgttcgccttgttttaagcgtaaaaagccagtgtaggcaatcatggcaccattgtcggtacaaaattgcggttgtgggtaaaagacttcgccgcccagttgctgcattaattctgctagagattggcgcagttgtttgttggcgctgacgccgccggcgatgactaagcgtttaaagccggtttcttttaatgcgcggcgacatttaattgccaatgtttcgaccactgcttgttgaaaggcgtgcgcaatatccgctttgctttgctcgcttaattcgccttcttgcttgagcgtttgggcgatggtattggctgcgaaagtttttagaccggaaaaactaaaatccaatcccggacgatcggtcattgggcgcggaaattgaaagcggtttggactgcctttttcagccaagcgagaaagcgcggcgccgccgggataatcaagtccaagtaatttagctgttttatcaaaggcttcgcctgccgcatcatcaatactttcgcctaatacttgatattgcccaaccgcatccacacggactaattgggtgtgaccgccggaaacgagtaaggcgataaaaggaaagtgcggtgcatttttttctaacattggtgctaataaatgtccttccatatgatgtacaccaaccgctggaatattccaagcataggctagcgagcgggcaatggtggagccgaccaatagcgcaccaacaagaccgggaccgcaagtataagcaataccatcaatatcttgcgcggttaaattcgcttcttttaatgccgcttggattaagggcgcggttttgcggatatgatcccgtgacgccaattccggcaccacgccgccataatctgcgtgcagcgcaatttgggtgtataattgattggcgatcaagccacgatcttcgtcataaatcgctacgccggtttcatcacaagatgtttcaatgcctaaaattcgcattttatttctctttttcgttgtttattcgttaaaaaattgtcgctgattttaccgcgttttctcctttttctctagttaagcgcgagttttgcaataaaaagatcaatcttttctttactttttaccgttatttagattaaaattgcgacccttattaagttataaataagccgtttatcaaaacggtcactaaattttgcaaaatattaatccaattgaggtgatggcttatgcctgtaattaaagtacgtgaaaacgaatcatttgacgtagcattacgtcgttttaaacgctcttgcgaaaaagcgggtatcttggcagaagttcgcagccgcgaattctacgaaaaaccaacgactattcgtaaacgtgaaaacgcgactcgtgcaaaacgtcacgcgaaacgcgtagcacgtgagaatgcacgtaatacacgtttgtactaattaaacattcgtttcataactcgagttaaacaaaccgtgaaaccgttcggaatcacggttttgtttcttttcaagttcagcttataattcttcatattttctcaacatgagtagaggtgaaattcgatggctggtcttattccacgatcttttatcgatgatattcttgccagaacggatattgttgaattaattaatagtcgtgtaaaactcaaaaaagcagggcgtgattaccaagcctgctgtccgtttcatcatgaaaaaacaccatcgtttacggtgagtcaaaaaaaacagttttatcattgctttggctgccatgcgcacggaaatgctatttcatttttgatggaatatgacaagttggaatatgtggaagcgattgaagaattggcgctgatgcacgggttggaaattccttacgaaaaatcaccgcactttgatggatctttcgcgaaaaatagcaaaaataagcgcaatttatatgaattaatgcaagaagttgcgcagttttatcagcaacaattatcacagcacattccgccacagcattatttgcaacagcgcgggctatcgccagagattattcagcgctttcaaatcggttttgtaccgaatacctctaatgccgtgttgcgaaaatttggcactaatgccgaattacaacaaaagctctttgatgcagggatgttatcgcgcaatgatcgtggcgatgtttatgatcgttttcgccatcgcattatgtttccgattcgagatcggcgtggacgttatattgcctttggtgggcgagtgttgggcgatgaaaaaccgaaatatttgaactcgccggaatgtatgatttatcacaagggcaatgaattgtatggtttgtttgaagcattgcaggtcaacgatagtccggagatgttgttggtagtggaaggctatatggatgtggtggcgctggcacaattcggagtggattatgcggtggcatctttgggaaccgccacaacgccagaacaaattcaggtcgcttttcgtgctacagaacaaatcgtgtgttgttatgatgcggatcgtgctgggcgtgatgcggcatggcgtgcgttagaaaatgctttgccttatttggaggacggacgtcagttgaaatttatttttttgccggatggtgaagatccggacacgtttattcggcaatatggtaaagcggcgttcgaagattatttgaaaaatgcacaatcgttaagtgattttttatttgcaaccctcagtgcgcaagtggatttttcttcgccagaggggaaaaccaaattagcggcgttggcggtaccgatcattaaaaaagtgccgggcgagatgttgcgtttgtcattgcgcaatatattggcgcaaaaattagggatttttgatcaatcgcaattagatcatcttatcccacaaaccgctgagcaggttcgtgtggtggagaagaaaaaatctgaggtgaaacgcacgccgatgcgggtactgattgcgttgttgctgcaaaatccgcatttaagccagctggtgccgaatttggcaccattgcgagtgttaaacgagccggggctagatttgttagaaaaactgaccgcactttgtcagcaaaaagtggggattactacggggcaaattttggaatattggcgcgacgataaagaatatggcgctccccttgaaattctggcagtttgggatcatctaattgatgatgacaaaattgaagatacatttcgtgaaacgctgaaatatttttatcttcaattaattgacaaaaatattgaaaggttgattgctaaagagcgtgctgaaggactggagctaaacgaaaagcaagaattggctcaattattgatgaaaaaacagcaaaataaatagttaatcaacgttaacaatggtaaaatcaggcgtattttatcttccacaaaattatgaatcaaggcggatatttgtatggagcaaaaccaacaatctcaattgaaattgttaatcgcacaaggtaaagagcaaggttatttgacttatgcggaagtaaacgaccatctcccagaggagctggttgatacggatcagatcgaagacattattcagatgatcaatgatatggggattcaagtgcttgaatctgcccctgatgcggatgatttaatgttaaatgaagcgatcaccgatgaggatgtggttgaagaagcaacgcaagtgttgtccagtgtagaagccgaattaggaagaacgaccgatcctgtgcggatgtatatgcgcgaaatggggagcgttgagcttttaacgcgtgaaggcgaaattgatattgcaaaacgtattgaagaaggtattaacgaggttcaaagtggtgttgctgcttatcctgaagcactaaattatttgttagagcaatatgatttagtagaagaaggtggtatgcgtttggcggatttgattaccggctttgtcgatcctaatgcggtgagcgatacggatattgatgagctggagaaagtgctttccgaagatgaagatgaggaagacgtcggcgatattgatttggaagatgacgaagaagaggaagaagaaagcgaggaggaaagcgctaatgattctgattcagataattctgtggatccggaagtggcacgtgagaaatttgccgaattaagattacagcaccaaaaaaccctagaagccattcaaaaacatggtagaaataaaaaagcggcgaaagatcaaattcaaattttagcagatatttttacgcaattccgtttggtaccaaaacaatttgatacgcttgtgctttctatgcgcgagatgatgaaacgtgttcgtagccaagagcgtacaattcaaaaaatgatggtggataatgccaaaatgccaaaatctaccttccaaaaagagtttatcgggcatgaaaccactgatgcgtggctattaaaagctttatccgcaggtaaatcttggtcggataaaattgcgcaatatgaagatcaaattcgccaatgcatcgagaatttaatccaaattgaacaggatacggggttaacggttcagcaaattcgtgatatttgcgaacgtgtttcgcaaggcgaattaaaagcccgtcgtgccaaaaaagaaatggtggaagcaaacttacgtttggtgatttctattgcgaaaaaatataccaaccgtggtttacaatttttggatttaatccaagagggaaatatcggcttgatgaaagcggtggataaatttgaatatcgtcgtggttataaattctctacttatgcgacttggtggattcgtcaagcaattacgcgttctattgcggatcaagcaagaacgatccgtattccggtgcatatgattgaaaccattaataaattaaatcgtatttcccgccagatgttacaagaaatggggcgcgaggcttctccggaagaattggcagaacgtatgggaatgccggaagataaaatccgtaaagtattgaaaatcgccaaagaaccgatttcaatggaaacgccgattggtgatgatgatgattctcacttgggggattttatcgaagacagcacgcttgaattgccattagattcagcaaccgcacaaagtttaaaagcggtaactcacgaagtattagaaggtttaacacctcgtgaggcaaaagtgttacgtatgcgtttcggtattgatatgaatacggatcacaccttggaagaagtgggtaaacaatttgatgtaacgcgtgaacgtattcgtcaaattgaagccaaagcactgcgtaaattgcgtcacccaagtcgttccgaaccgctaagaagtttcttggatgaataattaaattcggtcggcgatagtgaaatcgctgaccaaatttccaacagacaaccgttgtaatatagactttatttacatatttctctataatcccaacgttctcaccgcccccatagctcagtcggtcagagcagtcgactcataatcgattggtcacaggttcaagtcctgttgggggcaccaaattatcttttttcttcttccgttatcattcgtcaatcttcaagtaccatcggtataaggcaatttgcctagttatactttactgtctaagataatatgaaatttcaacgagttatcgtcctagcctcttttattaacgaagaaaatgaataattcacatattctgaaaaatgtagattgttgtactgttaaatttcttaattggtcacagaacgattggtgcgtatctttgatatttggctgtttttttgtgctggtagtggatggctaaaattacttcaagacttataactgtttatataatagtcagcgtgctttaatgctattagctttttacttaatcattgtgatgggcagatcatgatttattataccctaatgatatctctaaaaaatgatgccccttgtaaccgaaattacaaggggcagagcattgcggtcaattcttttcagaaaagccttattgtagcaacgtttctcatttcgcagtgcaacaatatgtgacctattctacaaatctgaagaaaatctgtcaatatatcctttaaattgtggtaaaaataacggtattacttcattttgttaaaaggattattcaaatgaaaccattaaattatattttaggtttagatttaggtatcgcttctgtgggttgggcagtggttgaaatagatcaaaatgaattcccgattcgtttaattgatgttggggtaagaacctttgaacgagctgaagtgcctaaaacaggggattctcttgcccttgctcgccgtttggcaagaagtagcagacggttggtcagacgtagagccgttcgtttacttaaagctaagcgtttattaaaacaagaagggattttgcaagcggacgatttccactcttcccatttaaaaccgttgccgaataatccttgggaactgcgtgttaagggattgaaccacttattagatcgtaaagaatgggcggcggtattattacatttgttaaaacatcgtggctatttatctcaacgtaaaaatgaaagtaaaactgacaataaagaactgggtgcattgttaaaaggggttagtgaaaaccgccagttattgcaaactcaagcgttttctactccagctgaaattgcgattaaaaagtttcaacaagaagaagggcatatccgtaatcagcgtggggcttacagccacacttttgatcgtaacgacttactggcagaacttcgtttattgttccaaaaacaacgtgaattcaacaatccttatacttctcaatctcttgagcaagccatcgcagaattgttaatgtggcaaaaacctgcattatccggcgaggctattttaaaaatgttagggaaatgcaccttcgaaccaaccgaatataaagccccgaaaaacagttatagtgcggaatattttgtatggctgactaagctcaataacttacgcattttagaaaatggttcagagcgtgggctaacagcggaagagcgtcaattattgataaatcaaccttttgagaaagcaaaatttacttatgctcaagcacggaaattgttgggattatcagatttagcgatttttaaaggggttcgttacggcaaagataatgcagaaagtgcaactttaatggaaatgaaggcttggcatgccattcgtaaagccttagaaagtaatggcttgaaaaccgaatgggatggtttaaaaaccaagccagagttgttagataaaatcggtacggctttttcgatttataaaaccgatgaagagattagccaatatcttaatagcgagttatcacctgctgtattaaatgtcctattagaaaatcttaattttgataaatttatgcaactttctttgcaaagtttagccaaaatcctaccgcttatggaacaaggtttgcgttacgatgaagcctgtaaacaggtttatggcgatcactatggtaaaaaagagcaactcgaattgcttttcttaccaaaaattcctgtggaagacattcgtaatcctgtggtgttacgtaccttatctcaagctcgaaaagtgattaacggggtggttcgtttatacggttcaccagctcgtattcatattgaaacagggagagaggtcggtaaatcctatagcgaacgcaaagatattaccaagcgtcaggaagaaaaccgcaatgagcgccaaagagcggtagaaaaatttaaagaatttttccctaattttgtgggcgagccaaaagcgaaagatattcttaaaatgcgtctttatgaacaacaacacggtaaatgcttatattcaggcaaagagttagatttaaaccgcctgcttgaaaaaggctacgtagaaattgatcacgcattgccattctctcggacttgggacgatagttttaataataaagtgttagtgcttgccaatgaaaatcaaaacaaaggcaatcaaaccccttacgagtggttaaatggtaaagaaaattcagagcgttggaaactatttcaagccttggtcaatggtagtcgtttcccttacagcaaaaaacaacggattttaacgaaataccttgatgaagaaggatttagagagcgtaacttaaacgatacttgctatgtagcacgttttctgtgcaattttattgaagataatatgcaattaatcgggcaaggaaaaaaacgagtatttgcctcaaacggtcaaattactgccctacttcgcagaagttggggtattcaaaaagtgcgtgaagataatgatcgccatcatgccgttgatgcagtagttgtcgcttgttctactcgtgcattacaaaagaaaattaccgattatgtgcgttataaagagatgaatgtgtttacaggggaaaaaatcgatcaggaaacaggggaaattatccaattccatttccctgaaccttggaaattcttccgtcaagaagtggaaattcgcgtgtttagtgaaaccccagcagaagatgtcgttatcgccttgccagatcgaccgcaagcaaatcacgaatttattcaaccgctctttgtttcacgcgccccaacacgcaaaatgacggggcaagggcatatggaaaccatcaaatccgccaaacgtttagccgaaggattaagtgtttctcgagtgccactcactcaactgaaattaaaagatctggaaaatatggttaatcgagaacgtgaaaaagcactttatgaggctttaaaagcacgtttagaaaaatttaataatgatccggcaaaagccttcgctgaacctttctataaaaagggtgggcaacaagtgaaagcggttcgtgtggagcaagtacaaaaatcgggcgtactcgttcgtcaagaaaatggggttgccgataatgcttcaatggtgcgagtagatgtctttattaaaggcggaaaatatttccttgttccgatttatacttggcaagtggcaaaaggaattttgccgaatagggctgtggttgcgaataaagacgaaaatgaatgggaagaaatggacgaaaaatctcagttccagtttgcgttatatccgaatgatttagtagaagtggtgacgaagaaagaaaaattctttgggtattattgtggactaaatcgccataccggaggaattaatatcagaacacacgatttaaataataatcaaggcaaaaaaggagtatttgaaggggttggcgttaaaattgcactttctttcacaaaataccaagtcgatgaactcggtaaaaatattcgaccttgtcgtccaatgaaaaaacgtccacctgttcgttaattttaaatccctgtttttaatgaaagcagggatttttttcaattcaaggagaaggctatgagctggcgaagtattttaatcagtaacggcggaaaattatccttaaaacgtaaacagatgttaatccaacaagaagagcaggaatttaccgttccccttgaagatattgctattatcgtggtggaaagtcgggaaacggtaatcacaattccgctactatcagcctttgctcaacaaggtattacgctacttagttgtgatgagcaatttttgccttgcggacagtggttgccgttcgctcaatatcatcgccaattaaaaacacttaaactacaacttgaagcaagccaaccgcagaaaaaacaactttggcaaaagattgtgcagcaaaaaatccgtaaccaagcctttgtgcttacccaatcccatcaccctaaagaagcaaaaagattgtatgcaatggcggggctagtgaaatcaggcgataaagaaaatatagaggcacaagccgctcaactctattttcaaaccgcatttgggaaagattttcgtcgttggcaagaaaaccacattaacgcccatttgaactatgcttacacgatattacgatcagcagtggcaaggactctcgtgcaatatggttggctaccggcgttaggattgtttcatcataatgaacaaaatccctttaatctcgcggatgattttattgaaccatttcgccccttggttgatttaatggtgtggcaactgtggcaagaaaataagctcgataacggcttaagccctgcgactaaacaacaacttattcgtttattgcactatcaaatgagtattaatcaacagacttttagcgtattggctaccatagatcgagctgttgcgtcctttcaaaatgccttaatgagtaaaaatgcggatttgttaaaacttcctgaaatcttaccgcttgaggaacatcgttatgagtgaggcaaaatttatgcgaatgatcgtcttttttgacttacctgtcaccactgcggcgaaacgtaaagccgccaatcagtttcgccaatttttattaaaagatggctaccaaatgttacagctttctgtttatgcccgtattgttcgagggcgagatgcgttagataagcaccataaaagactttgtgaacatttgcccgaagaaggctcaattcgttgtttagaagtcaccgaaaaacagtttgccagtatgcaaattttattaggtgagttgaaagttcaagagaaaaaagtgaatgcaaatcaaatgctacttttttaataaaaaatatttaaacgctaataactatgcgatattttaaatgcttattttttaaacaagtacgctgtttgattgcttatttaataatcagtgttttttctaaatttacgcaaaaaaatcattttagtataaattatagataatttttaccgcacttttttgcaaaaaaactcactaaactaaccgcttattaagaggaaattacttgttttttatataaataaaatgctccaaagccttataaaatcaggctctggagcataggtattgtagcactgcgaaatgagaaagggagctacaaatcttgcataaatccccctaaaatttatattattgtagcactgcgaaatgagaaagggagctacaaactctttcagttgtatatgagaatgggtacgattgtagcactgcgaaatgagaaagggagctacaaaggtaacccaccacccgaaccagcggatgcgattgtagcactgcgaaatgagaaagggagctacaactttcaggatcgctttcccctttacgactaaattgtagcactgcgaaatgagaaagggagctacaacgtttcactttggcattttttttgccacgtattgtagcactgcgaaatgagaaagggagctacaacggaaattggactatgctcacctaaaacctcattgtagcactgcgaaatgagaaagggagctacaacgttaaataaccgccttgataataataaacaattgtagcactgcgaaatgagaaagggagctacaacactttagcacgttgaattatggcgtttccaattgtagcactgcgaaatgagaaagggagctacaacaacaggcaatacctttactgtcttatctgaattgtagcactgcgaaatgagaaagggagctacaactgctggctttcttccagccagtccgctaagattgtagcactgcgaaatgagaaagggagctacaacaaggtcttttattcctcgccctcccgacatattgtagcactgcgaaatgagaaagggagctacaacgccagtcagatagataacattcgcgaatggattgtagcactgcgaaatgagaaagggagctacaacggtcgtataactccaaactataatgtggcgattgtagcactgcgaaatgagaaagggagctacaacacccgtcaagataggcgaattgatacaagtattgtagcactgcgaaatgagaaagggagctacaacttcgtcccttttttagatataactaagcccattgtagcactgcgaaatgagaaagggagctacaacccctctaagccggttaacccggcgcttttaattgtagcactgcgaaatgagaaagggagctacaacttaacaatctctttccattgcgataactgcattgtagcactgcgaaatgagaaagggagctacaacgcaaaggctcgtagccttgctatgtccgagattgtagcactgcgaaatgagaaagggagctacaacacaacattctttatagagcaagaaagaaatattgtagcactgcgaaatgagaaagggagctacaacttttgtgtctcacttaataatgccggatcaattgtagcactgcgaaatgagaaagggagctacaactcgttattcagaccagttaaaaaaagcaaaattgtagcactgcgaaatgagaaagggagctacaacttaaaaccgtgtctatttgtcccccatagcattgtagcactgcgaaatgagaaagggagctacaacctcaattgttttactacacaaataggaaccattgtagcactgcgaaatgagaaagggagctacaacataatgagccataaattcatgttgacattaattgtagcactgcgaaatgagaaagggagctacaacgtgacaactgcgcatcaaaaccagcaacccattgtagcactgcgaaatgagaaagggagctacaactggagatgtgttctgttggtggcgcctatgattgtagcactgcgaaatgagaaagggagctacaaccttttgataccggcttattatcaacatatcattgtagcactgcgaaatgagaaagggagctacaacgattttagctcatcttggtacttgtgatcaattgtagcactgcgaaatgagaaagggagctacaaccgattttattcaacatcgaccaaccggcggattgtagcactgcgaaatgagaaagggagctacaacaagctattgaggcgcaagaacatgttatccattgtagcactgcgaaatgagaaagggagctacaacggtcaccaatgtcgcgtgatacttagacggattgtagcactgcgaaatgagaaagggagctacaaccaaacccgcattgacggaaccgttactacgattgtagcactgcgaaatgagaaagggagctacaaccaaggtaatcacgccctcattcgcttcggcattgtagcactgcgaaatgagaaacgggaaaatttatcgctatgatgatccgttttggtcaaccttttatcgcccgaatttagacttatacccggaaaaattagctcatcaatttgcgaaggtggaaatgtcgggggaggagtttaaattagaatataaacgctttgaaaatgcttattttcttgaaaaagaaaaactgggatttacgaagatggaaaaaatcaaagataaagaagaaattattttaattcaaaatattgcatctatgaatttccattttgcagcagggcgcttatctaataaagatgtatcgttattagaaatggatacagcaacagtttggttctctgatcaatcacttatcaaacagcttaatagtcggttaggtgatcctaaatttaatattgatagttacacatgggttccggaagcaatattttctgccgataaaatctatcggggagatgatgggcgattaattgtagttaaaaatatggatggaagattatttgaggttatatttaaatatcttccaaataaaaaggaaagttttgtaatttctgctcgatggacaagtgaaaagaaattgcgttcagaagctaaaaaatacgaggttgtgcggtaggtcttccgcgtcctaaaggaaaggacacctacattcagagtccccgttctatttcaaccgttcgccccgtggaaggaagtttcaccactttcatatcacaacctcgtacttgaaatatacgcccttttatttttttatcaaccatagggagtaatttaaaatatgaataatcccattgaaattaaaatcaataacgccgatctaatttcccaactattagccgagttggcgcaaggtaccagagatttatcgccgctgatgcgtaaacttgctggcaccatggaaaaggcggtattgcaaaactttgaaagtggcggtcgtccggcatggaaggcgttagaatatcgcaaaggaaaaccgcttatcgatacgggaactcttctttataaagttacttttagtatagcgttttgcttttgggatatttttaacttattgcatcctaaataaatttgctaggttttatattttggtaaaattatattaaataatttaagtatgttttcagataataattcttctaaaataaattgagttatcgcaaactaacattattttcaagaggctattatcaataaaaataaattgctaaaacttattatcacctcttgcactcccttaaatttgcgctatgatcagctgctcatttatcctaattattttctcggaacttactatgaataaaataaaatttgtgttgttggcatcaaccgtggcgctgttgtttgcctgtaccaatcaatccaccaaacctataaaaggctatttaaaagaagacattagccaatctgagctagcgaatgttgctgattacaaacgctattattatacttgtcgcaattttgaaactggttcaagtgcttatttaaccagctattttccactgtcgcgagaaagtcggatgaaagacaatttcggattttatttccaattagatggtggcaaagtacaaccctttgatcacattgaaaataaaccacttaatgcgcgcggttctcgctttgaggtgagttatcgctcatacaatccaattcaaggagaatatgtggatttgatcgcacgcgaacaaagttctatgtattacaaaaaccatcaaggaacgcgtacaccttggttggactgtcgggaaagttaatcggtcggaggcgcgaaatttaacggatttatggtgaataacttgtcaaattcggataaaatggcgcccgtgttcatcgtacttgatacaaaagtgcggtgatttttttcattgttttgaggaacactatgtctgaattactaattgcggcaatcttagggattgtggaaggattgactgaattcttaccggtttcatcgacgggtcatatgattatcgttggtcatctattgggttttgaaggggaaaaagcggcaacctttgaagtgattatccagttgggttcgatccttgcggttgtcgtgatgttttggcgtaaattatttggtttaatcggcatccattttgggcaaaaaccggattattctcaaccgcacttaaagctggcgcatattttgttggggatgattcctgctgtggtactcgggctgatttttcataaaaatatcaaatccttatttagccctgaaatggtgatgtattcgttagttgtcggcgggattttattaattattgctgaaaaaatgcgcccgacagtgaccgcgcatagcattgatcagatgacatataaacaagcctttagcatcggtttatttcaatgtttagccttgtggccgggcttttcccgctccggcgcaacgatttctggcgggttactaatgggcgtcggacgccaagcggcagcagaatattcctttatgttagcagtaccaatgatgttgggcgcgactgtattggatttgtataaaagtttaggttttttaacgctggctgatttgcctatgtttgcggtaggatttgttactgcatttatcgtggcattaattgcaattaaaactttcttaaatcttatcaaacggatttcgtttattccgtttgcgatttaccgttttatcgtcgcgattgcagtttattttgtgtttattcactaagttgaatgcaatcaacaaaaaagtgcggttaaaaatgaccgcacttttgctcatgttaacaaagagaaataaaaaaccttaaaatttccgtggttttaaggtttttttatatgttgataatggcgccaaattatacggagtgaaacgcacggttaaaataaactaagcctttttcatcttatataagcggtaatttcacatttatccgccgtgccatcagtaataatattaaccgcggtaacttaattttgctaaatatacctattggagatggcaacgcattttactgtgacaaatgtgcttttttaacctgataaatttcccttttttctcgatcaatttctgcctgaatggaaaaagcacgcattaaattttctggtgttaatacgtattccgttgcgccatgagcgatgatttttcctttttctaataggataatttcatcacaaaaacggtaagcaagggaaaggtgatggatagcgacaatacaggtttgttgtggcgtgagggatttgagctgttccatgatgtcaatttgatagtaaggatcaagtggcgcgataggttcatctgctagtaacagcggcgtgtttttgatacaacaacgtgccaattgtacgcgggctttttcaccaccagatagttgtcgaaaaggcttttttagtaaatggataattgaaaactgcgcagaaattgaccgcactttttgttgttcttctactgtttttaatggatagggtaagcctaaagcaatcacatcataaacggataaatcccagtaaattggcgtattttgtgccaaataagctaattgttcactgcgctgtttggcgctcatttgagataatagttgatccgctagccagatttttccctcgttcagtggcaaaatgccggcgatacttttcagtaaagttgattttcccgctccgttagcccccataataccgattaattttccttgctggatttggcaattaagatgagacaaaccgtaggcgagggttacgttttccaatttaatcatttgccattctccgttgctgcgtgagtaaaatccaaattaaaaatggcgcgccgataatggaggtgagtgtgccgatataaatatgggaaaaaaagggcagatacaaaatgcatagatctgcgatcaatagcagcagtgcgccaatcagggcgctggttaaatacagttgtgatgggcgttttttcaagataatgcgcgctaagtgcggggcgattaaaccgataaagccgatggtgccggtttgcggaatagtcgcgccaaccaataaggcgatgccgaaagtggtgataaaaaaactgcgtttgagatccattcccatggtggaggcagtctcttcgccaaaggttaatacatcaagatagcgacgttgttgataaaggcaaaataaaccaactaaagcaatgaggaatgaaatgaatagggcgtctaattttgcccaggcgagcgagccttgcaaccagcgataaagctccgctagcgcccaaggactttcggcgttagagagtaataaggcaatcgccgaacccaacagcatattgattgcaataccgcttaaaatcatcatagtggcacctcgattgctcgctatccagtaaaccagcaaaaagctaaataacgcgcctaagacgccagcaattaagagtaaagaaaacggtacagaaaaataatacagcataaatacactggcggttgtcgcgccattcgcgctaccgagcaagcccgggcttgccagcggattttggaaaataccttgcatggcattgccggctatcgctaaactggcgccggtgaatactgccaataaaatgcgtggtagtcgaatatcccataatactagcggacgcatatcggttagcacgccctcggcattttttaaggcggaaaattgatgcagatcgtaccaactggcgagtcccatgagtacaagcagaaggactaaaagtgcggtgttaaatggcgttattttcatttgatatttctagtttttattatctaaaagctgccccatagtttactacttctctttattgagttgctgataaatcttttcagcaccttgccaaataccatgatcaaaacaataagtatattttaacggaatagttgcagttttttgatttttaaataaattttttagcagaggatgatgagctaattccgcttgttggctatagccttgtttatcggttaagaaaattaaccaattaggttggcttaataagactttttctaaggaaaaattttgcgcagtcaggggcgtttttaatggcgttaagcctaaaagttgcaagagagtttgataattcggcaaatcactttctacaacaccagtatccgctaaaattaaggtgtcggttactacttgatttaatttaagatttttcgatttcaactgcgcaacaagttgctctgctttgtcacggttatcggagatttgccccagttgcaaaatcagatcaaacagttgctctgcagtttgggggctatcgttaatcggcagtatttttaccttaagctgcgttaacgccgtcaccaattgtggataaaagtgatcgttaatgagaatagttttgtccaaataaggcaataattggcttaattgcggttcaagcgtcggtttatcttgattaattttatccaacatcatcaagggatttgttgagtaaggcgacatggcggcaatttgctctgggcgtgcgatttccatcaacaagcgatcgctacacagggttagcgaaacaaattgttctgcgctcgcctcaaccgttgtagaaaaaagccaaagtgcggtcaaaaaagagaaagtttttttcatcttaaaattaaacggtgaggaaatgctcaccgttttgcaaggttagaaactgccttttaagccgacgtaaatattgcgaccgtcttgcccatagccaagtacattttcgtattttttatcaaagaggttatttaagttgacataaacattgaggttttccgtcacttgataatttgcacctaaattgactaaagtataggatggcatttttgcgcgatatgatgtccaagtcgcttcatcgtaatcgtaataagtatcggtgcgtttgccaacataggaaatattaatatcagatcctagcttttctgttacttggtaagcgagaccggcattcgccatatgttttggacgacgtatcaaatcttggttttggctatcgcgactatttgtgtaagtataattggcataagcggttagattattggttaattgaccgttataagcaatttctacacctttaattttggttttcccatcgaggttaatcgcttgtgtcccggtggctgaaatgaaattttcgacattccgtgcaaaataagtaatatctaggctgtgttttttgtctgtggattcaatcaacaaaccaagatcgccaccaatacttttttccggtttcaaatttgggtttccgataaaattcccataataaccaaaatattcaataaacgttggattttgaattgctttaccaaagctggcatgagtacggaaatgttgagataaacgataag

SEQ ID NO: 3178 - DNA, 23168 bp, synthetic construct
  source 1..23168: mol_type = other DNA
  misc_feature 1..23168: note = Synthetic
tcactttgctctttcggtagcgattttaatgtcgattggcttgctagtggtgaggtggatacgccatcttcattgatccctaatttcttagcggttttttcaaaggtaacggctaaaccaaaaataccaatagaaccagttaaagtacttggactagcaatgattttatcgctcgttgcagcaatccagtatccccctgaagctgccattccacccattgaggcaataactggcttacctgcttgctgtaaggcttcggtttgctggcgaatcagttccgatgccattgcactgccacctggactattgatgcgtaaaataacacctttaattgtgtcatcatcttgggcttgttggagtaattttacgatagtatcgcttcccgcagagttttcgtcgctctctccccaagtaatttccccttctacattgacaactgcaattttattctcgcctgtaacatcgaaacgatccgttaatgatgctgcatagtcaaagaaatcaatatggcggtaacctttttcgctatcttcaccaaagatatcaattaaaatctggttgagttgttgagtagtcactaattcggtaactaatttgcggtttaaggcatattgtgcatcatcacctttagcttgcttaaactgttcaatatacacttttggatctggtactacggattttgcatcaatcgcaagattttgagcaatttgtagactgaactgttgccataattgattgatccataagcttgcattttgacgtgcttctggcgacatatcatcacgcaaaaagggttctacggcagatttataagttcctactcggaaaatatgcggaacagcttcaattttctcaaataacgttttgaagtagagattagagtaatttagcccgtgtaggtccacaaacccgactttattgaggtaaattttgtccgcaaagctggctaaatagtattgttgctgtgaataatgctctccaacagcaacgataggtttatttgttgctttgaattcattgagttgtttgcccacaaattgtaatgacgagagatcaccaccttcaaagtattttaaatctaatactaaccctgttacacgctcgtcttgtgctgcttttcttatcgctctgacaacatcaaaagttgaaattttgacaggctcactttctccacctaactcagattgtaagaaacgatgaaaatcaccaaactcatcgtggttatctgctaaatagccatctaaattcagcatcaatgcccctttatcaaagggtaactgattattcgattctgtatcgctttgtatcaaactgacaattgcaaaacagattagtacgaataaaataaaaaagagactaataacaaattcccgaaagattcggaaaacgcgataaagactttttaacactgataacataatatggatgaaatagggaaatttgccgtataaagtaccataaaaatgggcggaatttaacagaatgtgctattctcccacataaatttttacctaataaatcaagcaaggaatacttagtgaagacgttagatctattacaacttcgccgttctagcaaaaaatttggcacaaaagcaccaaataaagcacaattagatatcatcttcaaagccgcacttcgtgtgccagatcacggacatctcaagccttatcaattttttgttattgaacaacaacaattagtcacctttagagattatctcaacgctgcagcagaggaatttgatttaggcgaagacggatctaaaaaagctaaaaaaatcagttcacaagccccgatgattattgctgtggtagcaaaagttaccaaagatttaccgaaagtacccgcttgggagcagattgttaccgcgggttgtgcaacctatgccattcaattagccgctaatactttaggttttgaaacctgttggattaccaataaatgggtaaatggatctgcattgcgtcaagcattacattgtcaagatgcggataaaattgttgccttattgatgatcggatctcccgaagaaggcgaaattacccttgctagccaaactgaagatatttctggctttgttcactatttaaaataacttatacgatctaaaatgaaccaaaacgaacataaatacgaagatttgatcgctattttcgatagttgctttagccaaagttataatactcgactagaacgtgggagtgattatcctatttatctgcctgaatttattgatgaagataataccccaagtgagcgtccttataatgttattttatttgctcacggcttttatagcagtgctttacacgaaatagctcattggctcgttgcgggcaaagaacgccgaaaattagaagattttggatattggtatgaacctgatggacgttctgcagaacgccaaagagagtttgaacaagttgaagttaaaccgcaagcgattgaatggattttagcgactgcggctaactttcgttatttcgccagtgcagataatttaacaggcaatgcaggcgataatagtgcatttaagcaagcggtttatcaacaggtgcaaacctatgcggaaaaaggtttaccattacgagcagaacagctacgtcaagcactttgtcagttctacggtacaccaaattttattgacttatctcgtttcgatttagctaaaatttaggagcttaaaatggcttttactgtcatcattccagcacgctatgcgtccacccgcttaccccgtaaacccctattggatattgccggtaaaccgatgatccaacacgtttgggaaaaagctcaattatcgggggctgagcgtattatcgtggcaacagatcatcctgaaattgaacaagtggttactaattttggtggtgaaatttgcttaacatcggataaacataattcaggaacggaacgtttagcggaagttattgagaaaatggcaatccctgatagcgaaattattgtcaatattcaaggcgatgaaccgttaattcccccagtgattgtttctcaagtcgcgaataatcttgatcagcaccaagttaatatggcaactcttgctgttaaactcacgacaaaagaagaattatttaatccaaatgtggttaaaacattgacagataaacaaggaatggcactctatttttctcgagcaccaataccttttgctcgagatgattttgctgattgtaatgaccaatttgttcaacaacaaaactacctacgccatattggcatctatgcttatcgagctggatttataaaacaatatgttgcttggcagccgactcagcttgaacaattagaatcactagaacagcttcgagcactgtggtacggagaaaaaattcatcttgatcttgctaaaaaagccccacaggtcggggtagataccgctgaagatctagaacgagtacgccagattttatctgagcagtaatatcaacccaagcggtgagaacagcataaacatttgcaaatgttgattggaaactcaccgcttatttttgtaatttttaggagcatttatgttaggaaacattttaggatctgttgcatcatctgtattaggtggcggagaaggtcaaaccaaagcattacaactgattcaagcattattacaatcacaaggtggaatacaaggcttaattgaaaaattccaacaaggtggattagagcaattagtgaagtcgtggattagtacagaagaaaaccaacctatttcagcttcacagattcttgatgtttttggtcaaaagaatattgattctgctgccgaagaagtcggagtagcacagcaagaagcacctaatttattatctgagtacttgcctaagattgttgattctcttagtccaaatggagaattagatctcaaaaatttagatactggtgccttactacaacaaggtgcgaaagcggtattaggtaaattatttagttaattgaatttaggtgtgatggatagaatatagcaactatttagcacacctaaatccttgaaattaagaaaataaattacgttctctcattcctgaagagcgtttaaactggcttaatacaaggcaagcaaatagcacagtgtaaactgcaaaaatagcaattaaccattgtggcatactcagcccccaaaattgccatacaatttttccgcaattaccagatgcctcgaagatagatgggaaccaaacatttaatggtaaggtttcaggaaattcaacaaaaggcgagcattggttccaaggtgcagggttaagttgataatcagtatgtttaattgcaagagttaaccctttgactgcaccgtatgaaccaagtaaaagagcaatccaacgtgtaagtataaatctaggtgctaaaaaacctatcattcccgccactaaaatagcgagtaatgccagacgttcataaatacacattacacaagggttcagacccattccatgttggaaatatagagcagttgcttctaatgcaacacagcttgttgttaggagcaaccaagcccctcttgtgaatgaaagctcttttaagtaattgaacatagcggttcctatttaacgggttacaatccaaccccattctagtagtagttctgtaaatggttggagtaaaaattccattgaaatgaaaccaaccacagataacacaatggtataaggcagtgccatatagaccattctaccataagataaacgaattaacggagcaaatgatgacgttaataggaataaaaaggcggcttgtccattgggtgttgcaacagaaggtaagtttgtacctgtgttgatcgccacagcaattaaatcaaattgtgaacgttcaattgcaccagacataagtgctgatttggcttcattgatataaacagtccccacaaacacgttgtctgatatgcttgaaagcaacccattgaagacataaaacagggcgagttgcgaatctttttctgccgcaagaactagctgaatgatagggtcaaataattttagatcgacaattacagcgacaacagagaagaatacaactaataacgcagtaaatgggagagattcttgaaatgattttccaagtgcgtgttcgtcattgattccacaaaatgcagtgcagataataataatcgtcaagccgataagtccgacatccgcaagatgcaatgctaagccgataattaaccatacgcctgctactgcttgaacggctagttttaagcgatcttgttttgtcatttttcgctctttttggatattgtaatgtgctaaaacaacccaaactttgcgtggtaagcggtctccatatccaaatactttgtatttttctacaaggtaacaagtggctatgccgcagagtaatacagttatgctgatgggtgagactcgtaggaaaaactcaccgaatccccactctgcctgtgctgcaataattaaattttgcggttcacccaccattgtcattacaccacctagagcactccccacccccgcgtgcatcagtaaactacgtaaaaaaccgcgaaattgctctaaaattgctttattgttcgcaatcttgtcgtcattggtaatatctgttgaatcttcaaagctattaccagaggctactttatgataaaccccataaaagcctaccccaacactaataattaccgcaataaccgttagtgcatctaaaaatgcggatagaaatgcagcacttaaacagaatgatagggaaagtattttcttagaatggattgcaatgatcaatttagtaaatgcatacaaaagaagttgtttcataaagtagatacctgccaccataaacatcagtagcagaataacatcaaaatttgccacaatttcgtgtttgatatggtgtgggcttgtcattccaattgcaacagcttcgatagcaagtaaaccaccaggttggagtggatagcactttaatgccattgcgagtgtaaaaataaattccgcaaccagtacccatcctgcgataaattcactgataaagaaataaatcagtggattaatgattaaaaatgccaaaatagcaattttgtaccattctggcgaattgcctaaaaaatttttgaaaaaagcgtctaaattcttcataagattttcttctcgaaaggtaatcaaaacagatgaattgtaatatactttagattgaacgataatagagaatgttatgatttagttttagtaattttgatttttgataactaagtcgcaaattttaatcttaagagtggagttcttcttcattttcccaatttggaatacgcatcaatggataaatctgaaattttaaaggctcaaagcccagcagctctcgcagaagagtatattgttaaaagtatttggaataaccgcttccctgcgggatcagatttgccagcagaacgagaattagctgatattattggcgtaaccagaacaacgttacgagaagtgttacaacgcctagctagagatggttggctaagtattcagcatggtaaacctactcgagtcaataacgtgtgggaaactgcaggcccaaatattattgaaactttgattaagcttgatcgctctactattccaatgattattgccaatgttgtttctctacgaactcgaatggcagaatactatattcctgaagcaattcgtttagatacaaaaaaatcattaacactattcgaaggattagatgaactcgtagataatccaaaagcttatgcggaattcgattataacctataccgtagctttacttttgtggcgaataaaccagtttatgggctaattctaaatagttttaaagatctctactatcaagttgcgacactctttttttcagaagcacaatctcgtcaattaacctttaatttctatcagtctcttaagcaagcttgccaaacaggtgaatacgaacaagcagtagagtgtatggctcgtaatagacaaagtagtactgtgatttgggctgaaatgctaaaaaatttacctgagcattttggggaatgaatttctgaaaggaggcctttttaagcgctttattaattagccttcaatttcacacttaattttccttattacagtaatttaagcccaaaacaaataaaaaaacaatgtgataatattcgatatggcatattctagaattctgataaaaggctgaaaaaacagagaaaattgcagaataatttgatctatattcgcccaaataaatgggaaactgatataatcaatccgtttttaatttttaaaatcaaaagaggaaatcactatgtctgtaaaaaaaatggcagatcttgaccttgcaggtaaacgtctttttattcgtgctgaccttaatgtaccagtaaaagatggcaaagtaacgtcagatgctcgtattcgtgcgactattccaacacttaaacttgctttacaaaaaggggcaaaagtgatggtgacttctcacttaggtcgtccaactgaaggcgtttttgaagaagcaaactctctacaacctgtggttgattatttaaatgaagcacttgatgtaccagttcgtttagtacgtgattatttggatggcgtagaagtcagtgaaaatgaaatcgttgtgcttgaaaacgtacgtattaacaaaggtgaaaagaaaaacgatcctgagctagcgaaaaaatatgcggcactttgtgatgtatttgtaatggatgcatttggtacggctcaccgtgcagaaggctcaacttatggtgtagctgaatatgcgccagttgcgtgtgcaggcccattattagcagcagaattagacgcgttaggtaaagcattaaaagaaccgcaacgcccaatgttagcgattgtgggtggttcaaaagtatcaaccaaattaaccgttttagactctctttctaaaattgctgaccagttaatcgttggtggtggtattgccaatacctttattgctgctgaaggtcataatgtaggcaactcattatgtgaagtagatttaattcctgaagctcaacgtttatcaaaaacaacaagcattccagtacctgttgatgtgcgtgtaggaacagaattttcagaagtggcaccagcaactcacaaatcagtaaatgaagttgctgaaggtgaatcaatctttgatattggcgataaatctgcggaagaattagcagaaattattcgtaatgcgaaaacgattctttggaatggtccagttggcgtatttgaattcccgaacttccgtaaagggactgaaattgttgcaaatgcaatcgcagaagcaaccgctaatggagcattctcaattgcgggtggtggtgatacattagcagccattgacctatttggtatcgcagacaaaatttcttacatttcaacaggtggcggtgcattcttagaatttgtggaaggcaaaatattaccagcagttgaaattttagaaaaacgtgcaaatgactaattgctcaaggggcgtatcatatacgccctatttttaacctttgattttttaaatatataaggactccaaaatggctaaattattagatattgtaaaaccaggcgtagtaactggtgatgatgtacaaaaagtttttgcatttgcaaaagaacataatttcgcaattcctgcagtaaactgtgtgggtacagactcagtaaacgcagtcttagaaacagcagctcgcgttaaagctccagtgatcgtacagttctcaaatggtggttcacaattctacgcaggtaaaggtatcaaaccagcaagcggtgttcgtgccgatgttttgggtgctattgcaggtgcaaaacacgttcacgaattagcgaaagaatatggtgttccagttattcttcacactgaccacgcagcaaaaaatttattaccttggattgatggaatgttggatgcaggtgaaaaattctttgcagaaacaggtaaaccattattctcttcacatatgattgacctttctgaagagccgatggaagaaaatatggaaatctgtaaaaaatacctagaacgtatgagcaaattaggtatgacgcttgagatcgaaatcggtattacaggtggtgaagaagatggtgtggataacagcgatgttgatgagtctcgcttatacacccaacctgaagacgtattattcgtgtacgattcattaaacccagttagccctcgtttcactattgctgcagcattcggtaacgtacacggtgtttataaaccaggtaatgtaaaattaaaaccttcaatcttaggtgcatcacaagaattcgtttctaaagagcgtaaccttcctgccaaatcaatcaacttcgtattccacggtggctcaggttcaagtcgtgaagaaatccgtgaagcaatcagctatggtgcgatcaaaatgaatattgacacagatactcaatgggcatcttgggatggtattttacaattctacaaagcaaacgaagcatatttacaaggtcaattaggtaacccaacaggccctgatgcaccaaacaaaaaatactacgatccacgcgtatggttacgtaaaatggaagaatctatgtctaaacgtttagagcaatctttcgaagatttaaactgcgtgaacgtattataatttgtaaaattttgcataaaaaagaccgcttatacggtctcacattactaacaaacctctagacctctggctagaggtttgatctaatatgcatatagaaaaagcatactagagaaatagtttctaaaaagtgcgttaaggtattctagcaatagactacacattttttagtagccattttgtccattacccaatagattaagaatgaaaaaacgatgccccttgaaaccaaagttccaaggggcagagcgttgcgagaaattcatctcttattgtaacaacgtttttcatttcgcagtgctattacaacgctgtaaattttaatctctcatttttttatcgtcaatattctttttattataaaaattgctaaaatttgctcaaaggctaaatgataggagaaacattatgaaaacttcattattaaattatgttttaggtcttgacttgggtattgcttctgttggttgggcagttgtggaaattgatgaacaagaaaatccacaacgtctaattgatgtgggtgttcgtacttttgagagagctgaagtccctaaaaccggcgaaagtttagcattagctcgtcgtttagctcgctcttctcgccgactagtgaaacgtcgtgcacaacgaattaaaaaagcgaaacgtttattaaaagcagaaaatcttttactttcaatagatgagcaactaccgaatgatgtttggcaattacgagttaaagggttagatcaaaagcttgaacgccaagaatgggctgcagtattgttacatttattaaaacatcgtggttatttatcgcaacgaaaaaatgaaagcaaaagtgagaataaagaactcggtgcattgctttcgggtgtagcaactaaccatcaaattctaaaagactcgaaatatcgtacacctgcagaaattgcggttaataaatttcaagtagaagatggacatattcgcaatcaacgaggtgcttatacacatacatttagccgtttagatttgttggcggagatggaattattgttcactcgccaatctgaactaggcaaccttaacacctctgcaaaattattagacaatttgaccgctttattgatgtggcaaaagcctgctctcgcaggtgaagctattttgaaaatgttgggtaaatgtacctttgaaccaacggagtataaagcggcgaaaaatagctattctgctgagcgttttgtatggctaacaaaattgaataatttacgcattttagaaaatgggattgaacgagctttaactgataatgaacgtttaaccttacttgaacagccttatgaaaaagccaaattaacttactctcaagctagaacaatgcttactttatcggatgatgccatttttaaaggtgttcggtatcagggggaagataaaaaaacggttgaaacgaaaaccactttaatggaaatgaaagcctatcatcaaattcgtaaagcattagaaggtgcggatttaaaaatagaatggcaaacacttaaacataatactgggttgcttgatgaaattggtacagcattttcactgtataaaactgatgaggatatttgtcgttatttagaggggaaactatcagaaagcatgttgaatgcattgctagaaaatcttaattttgacaaatttattcaactctcccttaaagcattacaacaaattttgccattgatgttgcaaggacagcgttatgatgaagcagtttccgcaatttatggtgatcattatggtaaaaaatcagaagaaattcaccgcttgttaccgaatattcctgctgatgaaatccgaaacccagtcgtattacgcacattgacacaagcccgtaaggtaatcaatgctgtagttcgattgtatggaacacccgctcgcattcatattgaaacagggcgtgaagtcggtaaatcttatcaagatcgtaagaagctagaaaagcagcaggaagacaaccgtaagcaacgtgaaaatgctgtgaaaaaattcaaagaatatttcccaaattttgtaggcgagccaaagggtaaagatattcttaaaatccgtttgtatgaattgcaacaagcgaaatgtttatattcaggcaaacctttggaattacatcgtttgttagaaaaaggctatgtagaagttgatcacgctttgccgttttctcgcacttgggacgatagctttaataataaagtgttggttcttgctaaccaaaaccaaaataaaggtaatttaaccccttatgaatggctagatggtaaaaataatagtgttcagtggcaacattttgttgctcgtgtacaaactagcggtttctcctataccaaaaagcaacgtattttaagccataaattagatgacaaagggtttatcgaacgtaatttaaatgatactcgctatgttgcccgtttcttatgcaattttattgctgacaatatgttactgacaggcaaaggcaagcgcaaagtatttgcgtcaaatgggcaaatcacagctttattgcgtgctcgttggggcttacaaaaagtacgagatgataatgatcgtcatcacgctttagatgctgtggtagtcacgtgttcaacggtagcgatgcaacaaaaaattacgcgctttgtgaaatatgaagaaggtaatatatttagtggtgaacgtgttgatcgtgaaacgggggaaattattccattgcattttccaaccccctgggcattttttaaagaaaacgtcgaaatccgtatttttagtgaaaatccaaagttagagctcgaaaatcgtttacctgattatccgcaatataatcacgaatttgtacaaccattgtttgtttctcgtatgccaacacgaaaaatgacagggcaagggcatatggaaaccatcaaatcagctaaacgtttaagtgaagggttaagtatattaaaagtacctttaacacagcttaaattgaacgatttagaacgaatggttaatcgtgagcgtgaaataggattgtatgagaccttaaaagcacgtttagagcaatttggtaacgaccctatgaaagccttcgctgaaccattctataaaaaaggtggcacattagtaaaagccattcgagtggaacaaacacaaaaatcaggcgtattagtgcgagatggtaatggtgtggcagataatgcttcaatggttcgagttgatgtctttactaaaggcggaaaatatttcctagtaccgatttatacttggcaagtggcaaaaggaattttgcctgatagagcggttgtcgcaaatacacctgaagatgaatgggaattaatggacgaaagttcacaatttttattttctatgtattcgaatgacctgataaaacttaaaacgaagaaaacagaaattttaggttattttaatgggctaaatcgagctactgcggctattgatattaaagaacatgatctagagaaatcaaaaggaaaaaatggtattcatcaaagtgttggtgtaaaactcgccctttctcttgaaaaataccaagtcgatgaacttggaaaaaatattcgaccttgtcgcccgactaaacgacaaaatgtacgttaattcagtccctgcacttattgagtgcggggatttgtttatttaaggatttatctatgacgtggcggagtattttaatcagtcagggcggtaaactttcacttaaacaaaatcaaatgctaattcagcaagatggtaacgagtttactgtacctttagaagatattgctattgttgtggtggaaagccgagagacagtcatcactgttccgctactttctgcttttggtttgtatggtattacttttttaacttgtgatgagcagtttttaccctgtgggcagtggttgccatttaatcaatatcatcgacaactcaaaaccttaaaattacagctagaaacgagcttgccacaaaagaaacagctgtggcagaaaattgtgcaacagaaaattcgtaatcaagcaaaagtattaagtatttgcaacttttacgcagaatctacccgcttgttgaaaatggcaatgcaagtaaaatcaggcgataaagataacctagaagcacaaagtgcggtcatttattttcaaactttgtttggtaaaggttttaaacgcaccgaagatgaaaatagggtaaatattgcattgaattacggctatactgtgatgcgttcagcagttgctcgtgggctagtactatatggttggttgccccaaatcggcttgtttcatcacagtgaacttaatgcttttaatttggctgatgattttattgaaccttttcgcccgttggtcgatctacttgtagttgatcttgcgaataaagataagttgtctttcaatttatctcctattttaaagcaacgcttaattaaggtcttgaattatcaactgttatttaagcaagaaaaagtgaataccttaacggctattgagcgaacaattagcacatttcagtctgcattaagtcaacgaaatgcggatttgctaaaattgcccgaaattctaccgcttgcggagcatcaatatgagtgagaatgtatttatgcgtatgattgtattatttgatttacctgtcacaacgaaagccaaaatgcgagcggcaaaccaatttcggcagtttttattgaaagatggctaccaaatgttgcaactttctatttatacccgaattattcgagggcgtgattcaatggaaaaacatcataaaagattagtggaacatttgcctgaagaaggctcaattcgttgtatttctatcacggaaaagcaattttccaatatggaaattcttgttggggagaaaaaattgcaagaaaaaaatgttaattcgaaccaacttttgttgttttaaagcgattttttcagcaataaaaaagccttgaaccattacatttcaaggctttttagcatccctattatagcactgcgaaatgaaaaagggagctacaaccatttgtctttaggtaatgttatcttttccattatagcactgcgaaatgaaaaagggagctacaactcgctttggtttcctaaattaatcaaattaattatagcactgcgaaatgaaaaagggagctacaacgtgcctgttgtattgttcgctaatccgttaaattatagcactgcgaaatgaaaaagggagctacaacgcagcgactgcggcagtgcgaggagcggaaattatagcactgcgaaatgaaaaagggagctacaactcattcgaggtctgctaggtggtctgtaatattatagcactgcgaaatgaaaaagggagctacaacgattgaaggtgcattaagtgcaggaaatggattatagcactgcgaaatgaaaaagggagctacaactggttgctttaacaatacgtggaatatattattatagcactgcgaaatgaaaaagggagctacaacaacttgtttaaatgcctcatctcttacacgattatagcactgcgaaatgaaaaagggagctacaacctgtacaacgatatgctcacaatcaccgcaattatagcactgcgaaatgaaaaagggagctacaactaaaaagtgaataataaatttaatttgaagattatagcactgcgaaatgaaaaagggagctacaacaaagatttatattagctgctgaaccagcagtcactcggtcacttatagtacgaaaattcaagcaatctcatttttataggttaacatacttgctaatctaatacagatccattatttgtataacgcctttattaacaatatccttcttgttagaattcaaacaaaatacgcaataggaattcaataatgactaaacaattactcctaacgggattacttttatcccttactgcttgcggtaatccacaaaaaaccaaagaagaagcatttcccggtcaatttattggggcagattatcttttatctgaacaagatgctcagcgttgggcaaatgcaagccgtcaagcagaacaatgcatctacccaaatttaactcgtattcagaaacaacatttctctaaagaggatgcttacattcacgcacaatatgtgttcttttatccccttgaaaaaattattggtgaacagtacgtcaaaatgattcaagatgatgaaaaatcaatgggttatgcacaacatcaatttaaaaaatacaaagcagataatgttgaaaagctaggcgctgatgaatgccgtcttttgcaagaaaatgctcgtaacgacttagctgtagtcaaaggacaatacaaaagcggtatggttgaagagatcaaaacagataccaagaaagatcctgatggtgtagcaactaatgaaaataaattcttctttgatattatcaaatggggtacggcattactgttgtaattcagtgaagatttaaaccaaaagcggtcaaattcgaccgctttttttctatttatacaacaaaccttatttacggcaaagtcgctacaaccgcatagccattttgctcgccaatgctttctacttgcgtattagcactaataaagactgattcgccttgttttagatgaatggcgttattgcctaaatctaaatataggctaccctccatcactagtaaaatactcgcacttgagctggtaaatctttcttcactgaacgctttaaaatctagacgttgcaatgcgaaatcttgggctaatggagtaggatacaaaaagagattgctttcttgctgttcagggtggtaacaagggattattttcggtaccacttcactataatcaataatgtttaataatgcaggaatatcaacgtatttaggtgttaatccaccacgaataacattatcagatgctgccattaactcaatattttgtccgcgtaaataggcgtggggtaagcctgcaccttgatagattccttcgcctttttcaagatggacgatattaaatagatagaaacaaagcagccctgcatccagttttgtcaatggaatgtccattgcttctaacgtataaagcacccagtattctgcttggtttaaagacaattttccttgctgataatcagggcgatattgctcaataatcggtaaaagccactgttccaactggggttgatcggcttgcataatctccgcataaacctttggcaaaccttgatgttgaatacgttctgcaagcggtgctaaagaggctatattttgcaaatcttgtatgatctgcgtaagaggtttaaatccgtgaagtagccaaaagtccgataatgcaatcatcatttcaggcttatggttgcgatctttataggttcgatggctagcggttaagggaactccctgttgttcttcttgtagaaagccttgttctgcctgtgattttgtgggatggagctgaatagaaagcggtaacttaacgtctaaaattttcaaaagataaggcagttcattgccaaatttcgcgcgaccttcatcaccgagtaattcaggggcagtatctaatagacggtctaaagggagccatttttgttcaaattcaactaaagaaggtgctgaacgatgagcaccaagccaatattctgcataaggctgtccattgttattctctaatttcaaccaagtagggataaaatctgctcccccccagttatagtgttgatgcttgcccattaatttaaaaatcattatttgtatcctccaaagaaattcacaacttttataacatcttgcgaatgtttgattggaataaataaacggcgaccgttggttaaatcaatcactaatttttgcttgtccgctaagttaatttgtgaaatacgttgataatcaatatagaatgcacttaagaaaaaaccacggtctttcaacaataatttgggtttgcgtaaaaaactactatacacaaccaaaatgaccgacatgcctaacagaaacagtgtgaacgcttgaatacctgtttgtaaaccttgtgcaatggttaaccctattagcccaattaaaatccaagagtcaatttttgcttgtggttgtagctcaatcgctaacttggtttgtccattacgtttagggactatcacttgttcatagatggcataagaaagtgtaataaaaagtccgataataagaataaagtttgtcataaaaatacggttgaatacattttaggggctgtcttagaagtgtcacaaaattaaaccgaaattcacattctttcaagaataaaggaaaatttttcctgctcacttccgtaataccatagcccctaactaaatgcttatctatttatgatttttatctgacttcattgcactgaaaatcatcgctaaaattggacctgaaatgttgtgccagaaactaaatactgcacttggtacggcaattaatggattcgctttaaagtgaatggcggctaatgctgctcctaaaccagaattttgcatacctacttcaatagatacagctttgctatcgactaaaggcagtttgaataagcgagcaaccccatatccaactaggtaacctaagccattatgcaacacaacaacaccaaaaatcagtaaacctgactcaataatacgatctttactgactgccacaaccgccgttacgattaacacgatcgcaacaacagaaattaatggcattgtttgactaaactgctcaattttttctttgaaaatagcacgaatgactaagccaataaaaataggtaaaagcaccatttgtagcacagaaataaacatggcacttgcattaatatctaaccattggcttgcaaataggtagaacactgctggcgttaaaactggagcaagtaaggttgaaattgttgtacaagcaacagaaagcgcggtatttcctttcgctaaaaaggtcattacatttgatgatgtaccaccagggcaagcaccaactaaaatgacgccaatagcaagatcaggcggcagttggaataattttacaagtaagaaagcaatacttggcattacaacgaattgtgcaactacaccaatcattaccgctttaggattacgcgttacttcggcaaagtctttaaatgtaagggttaaacccattcctagcattacaataccgagtaaataaggaatccacggtacaaacattttaaacgtttctggaaattgtgcggcaataaaggcaaaaacaattacccagagggcaaaggttttgctcacaaattgagtaaatttgagtaaaaaagacattgtgtttcctttcaagtgaataatattagttatcgatatactgaaagttgcataaactttcggaaaggtaagataatagaaatccactaaaaatcaatctctttactcgttcttaacaaattttagcagtataataaccgagattctgacatttctttacatagaaggagacaaccaatgaaacctatgatcaaactttctactcttgcaatctgctctatttttgccctaacaggctgtgcaacacagcaaccaaatggcgaagaaaaactacaacaacacgcagtattaggggtaaactgggtgcaagaatctggggaataccaagcgcttgcttatcaagcatttaatgctgcacaagttgcttttgataaagccaaagttgcgaaaggcaagaaaaaagcggttgtcgttgatttagatgaaacaatgatggataacagcgcttatgccgcttggcaaattaaaaataacaaagcctttgatggtaaagattggactcgctgggtaaatgcgcgtgaaaccaaagccattgcaggtgcagtagaatttaataattatgtgaatagccacggcggtacaatgttctatgtatctaatcgtaaagacgatggcgaaaaagcgggaactttagatgatatgaaaactttaggtttcaagggggcaagtgagcaaactctattcttgaaaaaagataaatcaaataaaacccctcgttttgaagaaattgaaaaacaaggctatgaaatcgtactttacattggcgataacttaaacgattttggcgatgctttctacaaaaaatcgaatgcagatcgccgagcattagtcgctgaaaaccgccagttatttggtaagaaatttattgtgttaccaaatccaaactacggcgattgggaaggtgcagtgttcaattataactacaaatcaagtgcagaagaaaaagcccaagctcgtgataaagcattgcgtgcgtggagtggtcaataatttattttcatctaagcggtgagattgtgctaaaaatttgcaaaattttctgcctaactgaccgcttatcatttttataacataaggacacattatgtcagcaatgcaaatcatactatcaacacagcctgccgcagagcagtggggaaaagatgccctactttcggcaaatcaaaatagaatgactattcatttacagaaagaccctttagtgagtattcaaaaagccgctcgtaaaattaaaaatcaaggtattttaaatgttgcattggttggcgaaggctggggattagaagaaagctgggcgttccaacaaggctttgtgagcgtaaaaagtacaggagaaatcacattccctgcattaaatagcgatcaggctgaatttgatgctcgtttagcttgttcaacttttactcgtgaaattatcaatgaaccatctgatgtattaactcctgaagtattagctcacaaagcggctgaatttattgtccatcaagcggataaatatgcaggcaaaggtaaagtatcttttgaaatcatctctcgtgaagcagtaaaagatcgtggttatttaggtatttggaccgttggtaaaggctctgctaatatgccagcgatgttacagcttgatttcaacccaacaggaaaccctgacgcacctgtgttagcttgtttagttggcaaaggaattacatttgattcaggcggatatagcattaaaccgagtgattcaatgtccacaatgcgtacagatatgggtggagcagcattagtaacgggtgctctaggcttagcgattgctcgtggtttgaatcagcgtgtcaaactttatctctgctgtgctgaaaatatggtaagtagccgcgcatttaaactaggggatattattcattatcgtaatggcgtgactgttgaagtgcttaataccgatgccgaaggacgattagtcttagctgatggtttaattgaagcagataaacaaaacccacaatttattgtggattgtgccactttaacaggggcggcaaaagttgccgtaggaaatgattaccacgcagtactctcaatggacgaacaattagtatcagatttattacaatcagcaaaatctgaaaaagaaccattctggcgtttaccatttgaagatttccatcgtaatcaaaccgcttcttcctttgccgatattgcaaacgtaggctctgtgcctgtaccagcaggagcaagcactgcaacggcattcttatcttattttgtgaaaaattatcaacaaaattggttgcatatcgactgtgcagcaacattccgtaaaaccgcaagtgatttatgggcaaccggcgcaacagggattggaattaaaaccttagcaaatttacttttatccaaataagataacttgatgtgaatataagccatagtcattaacttgactatggctttttatttggatctgatttatggcactgtataaatttacaaaaaaaatcgatctttttattgacactgtttttttgaacagtaaaataacctgtataaacacacagtttactgatcgtattgaataaaaatcagactgtaaaacagcaggagcaaaatatggcacatcttagaacattaacacgtgaattatcttatcaaccaataccgttatatcgtgattttaacgcccagcgttcaattaaattagatctcaattcactttgtattcgtaaaccaacagataccttttttattcacgttaaaaatccaaatctgattgcgtggggcattgagttagatgatcttttaattgtagagcaaagtgagcagatcttaattaacgatctttttgtgattgagaaaaatggtgaatataagttttaccagttttttaatcaaattggtcaagaaaagatcttattttcacttgatgtagctgaacctaatttacgcatttcagattggaatgaagttcaggttgcgggtgtcattacaaatgtggttcaccaaataagaaaccgcacatctcatcatcaaacaagatatgcggcttaaaactagaacagtttaaagtactcggcgtgattgtgtgtaagtttttgcccagtatttttcagataaagaactggttataacgcctcgactagagcttgcgtgaacaaatttgccaccgccaatataaacaccaacgtgattattcttgcggaagaaaactaaatcgcctggttttaggtctgattttgaaatcgattttccagcgtgtctttgttctgctgtagagcgtggaagatgaatattaaaggcattactcattgtggttctaacaaatgcagaacaatcaataccggctttagttgtgccacctaaacggtagcgagtacctgcccattggcgataagttgagagaactttgttagcgttgcttacggtgtgatgatttgacgtatccttagctaaaaccttatttttcactgtaacttgttgattgagaatttggtttggtgttgccgctttagtacttaaacttgcatttgctaacgaagaataagtcgctaatgtaatcaagctcatcataatgaaaactgattttgtcagtgtgaaaaataatttttgcataataaatttgtctcgccagaacagaaaagcgaagcactcctaaaaaattgaataaataaacggtataaaataattggctcagataattacctgagccagtcgtccgacaagtataacttacttttgttccaacgaacgtaaaaaatttatctcatcagcccagatttctggtttgattgtttctaaaatgagcggaatgcggtcaaaacgtgagtcttgcataataaactgaaacacatctgttccaattgtgccttctcgtaacgtatcgtgtctatctactcggctggctaatggcgttttagatccattgatgtgcataccacgcaaatagtcaaaacctacaacatcagagaattcactaaagacttgctcacagcttgctaatgaactgatgtcataacctgcagaaaataaatgacaagtatctaaacagactccgactctcgatttatcttctacttgttcaatgatttcagccaaatgttcaaatcgccaacctaagtttgaaccctgccctgcggtattttccagaactgcaatcacattgggtacagtatctattgcgatattgagcgattcagcaatacgagccaaacattctttttctgaaatcttatttagatggctacccgggtgaaaattaagtaattttaaaccaagttgatcgcaacgttgcatctcatcaataaaagcttcacgagatttttctaaattatccacttcaggattacccaggttaatcaaataactatcgtggggcaaaatttgatcggcagaaaactgatgcacttggca

SEQ ID NO: 3179 - DNA, 23168 bp, synthetic construct
  source 1..23168: mol_type = other DNA
  misc_feature 1..23168: note = Synthetic
ttaatccagctttactaaaagtaaactaacccttacaatatgtgcaattttttagtaaatattttgttatgaaattattaaaatctcttctagcacctgtatttgcaagtgtgatcttatctgcttgtactcttgatgcagagcgcccaaccgatgttcaacatatcgataaaaacgatattacgtggcaacagcacctcaaaaaaatcaaacaaattcaatcttatagcaccaaaggacaaattggttacatcagtccacaagagcgtttttctagtcgctttgaatggcaatatcaaaacccgaaagcctataagttaaaactttattctctgattagcaaaacaacgctaactatggaaatgcatccaaacggtatgacgatttcagataataaaggcaaccaacaatctgataaaaatgccaaattattgttacgcgaaatcatcggaatggatgtgccattagagcatttatcttattgcttaaaaggtcagccagctgataatgcagattaccaagttggaacgaatcatcttttatccgaatttagctacccacttgatggatcgatgtggacagccgattacttaagttatcatgcagataattcgatgcctgaaaatattctgttaaagaacaaaagtacatcgcaaaccctaaaaattcgtgtggatgaatgggcgttctaatgaaaacacattacttttcaaccgcactttcaacttctcttggaaagcctaaccgctttccaagccccgcaaaactcaatttatttctctatataaacggtaaactgccaaacggctaccacgaattacaaacgcttttccaatttcttgattttggcgattggctcaccattgatattcgccaagataaacaaatccacatcacaccagaaattccaggcttacctctagaacaaaatttaatctatcgagctgccacactattacaagaaaaaacaggctgtacgctcggtgcatccattcatttagataaaattctgccaatgggcggtggtattggtggcggttcatccaatgcggcgacgactctccttgctttaaactatttatggcaaacccatttatccattgatgaacttgctgagcttgggctaaaactcggagctgatgtgcccatctttgttcatggccaagccgcttttgcagaaggtgtaggtgaaaaaatccaatactgtgaaccacaagaaaaatattatgtggtactaaaacccgagactgcgatttctactgcagtggtctttagtgatcccgatttgtctcgcaatacagaaaaaagatcccttgccgaacttttgaatcaaccgtttgcaaacgattgcgaaaaagtcgtgcgaactcaatatcctgaagttgaaaaagccctactatggttgctacaatatgcaccagccagattaaccggaaccggggcttgcgtttttgctgaatttgatgatgaaaaatcagcacaagctgttttccaacaaaaaccgaaggaatttttcggctttgttgctaaaggattaaacgtttcaccattacatgtgatgttgaaacaactctcgaccaaccaatctatctacactcaacctgaggttatataaaatgccagacattaaactctttgctggaaatgctacgcctgagctagcgaaaaagatttctgaacgtctttacatttcattaggcgatgccactgttggacgctttagcgatggtgaaatccaagtgcaaattaatgaaaatgtgcgtggtgcagacgtgtttattatccaatctacttgtgcaccaacgaatgacaacctgatggaattgattgtaatggttgatgctttacgtcgtgcatctgccggccgtattactgccgttgttccttattttggttatgctcgtcaagatcgtcgtgtgcgttctgctcgtgttccaatcactgcaaaagtggtggcagatttactttcaactgtagggattgaccgcttattaacttgtgacttacacgcagagcaaatccaaggtttctttgatgtacctgttgataacgtattcggttcacccgttttacttgatgacatcttgaagaaaacggatcttgtcaatcctatcgttgtttctccagatatcggtggtgttgttcgtgctcgtgcagttgcgaaattattaaatgataccgaaatggcgattatcgataaacgtcgtccacgcgcaaacgtatcacaagttatgcatattatcggggatgttgcagatcgtgattgtatccttgtggatgatatgattgatacaggtggtacattatgtaaagcggctgaagcattaaaagaacgcggtgcaaaacgcgtatttgcttacgcaactcacgccgtattctctggtgcagccgtacaacatttagcgagcgatgccattgatgaaatcgtggtaacggatactgttccactttcacctgaaatgaaagcacttggtaaagtacgcgtgctgactctttcaactatgcttgctgaagcaattcgtcgtatcagcaatgaagaatctatttcagcaatgtttgaataattctttcgcttagcattcattttaaaagtgcggtcagaaaatccaatgttttttgaccgcacttttttatgcttcaactaaaaataaggcaaaaaaaagtgccccactggggcactactcggaaagcaaaatagatgtcggctatttaaaaatagcacttatttttagtgatttaagaatacggcaaagtcctttatattgcaaatagcaatgttcaaatttgtgagctaaatcacgctttttcttcacttttttatgtttaatcgttttcatataaaaaaagaggagcatacagctcctcttctctataaatagcattaaattaaccgttaataaatttttcgcctaattcaatatctgcacgcaatgttggtaacattgcttctaaagcttcttgttcaaatttgcttaaggtaccgattggtaaaatttcttctacaccttctttacctaaacgtactggttgagcaaagaaacgtgcatatttaccgtcaccttctacataagtacattcaaccacagtttcaccacttaagcctttcactaatgaacgagcaaaacgtgctgcggcttgagccatagaaagtgttgcagaaccgccacctgcttttgcttcaaccacttcagtacctgcattttggatacgttttgttaatggtgcaatttcctcttctttccactcagcatattgaacttgtgaaagtaatggaagaatagttacacctgagtggccgccaattaccggtacgcttgtacgagaaacatttaagccttttaattcagatacgaatgtttcagaacgtaatacgtctaaagtggtgacaccaaataatttacgtttgtcataaacacccgcttttttcaatacttctgcagcaatcgcaacagtcgtgttcacagggttggtgataatacctacacaagcttttggacaagtttttgcaacatgttcaattaagttacgcacgatacccgcattaatgttgaaaagatctgaacgatccatacccggtttacgtgctacccctgcagaaattaaaacgacatcagcacctttaagtgcaggtgttggatcttctcccgcaaaaccttctactttcaccgccgtcgggatatggctcacatctttagccacaccgggtgtcactggtgcaatatcatacagtgataattcactttcagcgggtaattgtaatttaagtaataaggctaatgcttgaccaataccgcctgctgcgcctaatactgcaactttcataaaatactcctcatgtattaattaatcctaactaggtagaattttaaagtcttgtccattaaattacaaacagagaaattcaataatgcgatctagctcaaacttttcaaacagcaaatttattttaattgcataaaatgaatttttatgcaattcttatgcaaatacttctatatgagaataactatgtcagatcaattaacaaaagcttttaaagaacttcttaatcaagaacgatttgcgtctcaaagtgaaattgttgaagccttaaaaaaacaaggatttcaaaccattaaccaatctaaagtttcacgcatgctaagtaaatttggtgcagttcgtgcaagaaatacgaaaatggaaatggtgtattgcttaccaagcgaattgagtgttcccgctaccagcagtccattaaaaaatctggttttggatatcgatcacaatgatttcgttatcgtcattaaaacctctccaggtgcggcacagttgattgcccgcttattggattccataggtaaacctgaaggcattttaggcacgattgcaggagatgacaccatttttgtgacaccaacaaaagacacaacaatcaaatcgcttttaggacaaattcaaacgctctttgaaagcaatctataatgaatatcttagtaaccggtggaacgggatttgttggcaaacccttagttgaatcgctactttcacgtggcgatacggtaacagtattaactcgctctattgaaaaagcccaatctatttttcctgaaaaaacaccacaatttttgaccgcactttcaacactcaaagacttaaatgaatttgatgcggtcattaatcttgccggtgagccaatcttcgataaaagatggacacttcaacaaaaagagaaactgcgtcatagtcgcattgatttaacacaacagcttgttcaacttattaatcaaagtgaatatcccccagcccttatttcaggttccgcaacaggaatttatggaaactgtggcgaagacgtgatcaccgaagataccaatccaagtactcaatttaccgcgcaactttgtattgattgggaaaatgcagcaaagcaagccaacacaagagtctgtttagtgagaaccggattagtgctttctccaaaaggtggggcttttgctaaaattctaccgctctatcgctttggattaggcggcaaattagggaatggtgagcaatattggagctggatcgcgttagaggatatggtaaaaggacttctcttcttacttgaccataatgattgtgaaggtgcatttaattttactgcgccacatccggttaaaaataagacctttaaccaattattaggtcaagtattacatcgtccttgttttgctcaagtgcctcaatttttactcacttctcttctcggtgaacgagcttgcattctattagacagtcagaatgcctatccaaaacatttgttagattgcggatttacattccaatactcagaattaagtgattactttcacaaaatattttaaaaacaaaaaggctggtcaaaaccagcctttattatttttcattatgctaaatattccaaaaactctcccacagtgtggaaagatccaaatactagcactatgtcatttttatcggcatttttaaccgcactttttacaccttcagctacagaatcttcagaaaaactttttgctgatgggcaaacggttgttaattttgcatttaagtcatcacctgattgaccacggtaaccgcctaatgttacacaatgccattggtcaataacggaagtcagttgggaaaacaccgactccgcatctttatcttttaacataccgcaaacggcaatgattcgacctgaaatttgtgttttaagtgaggtcaatttttcggctaaatattttgccgcatgaggattatgcccaacatcgatgatcacttttggcaactgtgaataagatacattcaagcgttctgctagattttctaactgattaccttttaattgttggaaacgacccaccaattccacttcaattaatgaacgtttgatggtctcaacagaaatatcaaaaggcagcagttcaacagctgccaaagctgttgcggcattagctaatggaatttggcaaaacggcagattttctaaccgcactttgttgctctgccacatccaagtttgctcattgactttaaacgaccaagtgacatctcggcgtgaaacgtagcaatgtaatttctccgcttgttctagcataggttgcggaacattgggttcgccaatcacaaccggtttattcgcacggaaaatacccgctttttcaaagccaatttcttcgcgagttgaacctagaaaatccgtatgatcaatatcaatactggtgataactgccaggtcattatctacaatattcgttgcatccaaacgcccgccaagtcctacttcaagaatgacgacatcaagcttcgcttgtttaaataaatgcagcgctgataaggtgctaaattcaaaataagtgagagactgcgttttattcttttcgataaaatcaaaagaagcggtatgcatttcatctggcaagtcttgattttgaatacgaacacgttcgttataacgcaataaatgaggtgaggaatacacacccacacgcaagccgtgatttaacaaaatggtttcaagcaaacggcacgttgtgcctttaccatttgttccccccaccgtgatcacataaggtgcgggattcaaaagatccaattcttctgccaccgatttaatacgatctagccctaaatcaatggctttaaagtgactgttttccaaataagaaagccactcagcgagtggcgaagtggcttttaaattcattgtattactcatgttcaacaacttctacttcaacaaaaggtgaaggttgattggtgagtttgcttaaaaggtttccaagggttgaacgcatttctgaacgtttcacgatcatatcaatcgcccctttctcaagtaagaattcactacgttggaagccttctggtaatttttcacgtacagtttgttcgataacacgtgggcctgcaaaaccgattaatgcttttggttcagcaatgttcacatcacctaacatcgcaaaacttgcagaaacgccacctaatgttggatccgttaatacagaaataaacggtacacctttttcacgcattttcgctaataccgcactggttttcgccatttgcatgagtgagaaaagggcttcttgcatacgcgcaccgccacttgcagagaaacacacaaatgggcaatttaattccattgctttttctgctgctttcacaaattttgcacccacaaccgatcccattgagccgcccatgaagctaaagtttgaagccgcaacaacaataggcatattgtaaagggtaccggtcattgtgattaacgcatctttttcaccggtttctttttgtgcagcagtaatacgatctttatatttttttaaatctttaaatttaagaatatcttttggttctaaatcagccgataattcttggcttgaaccttcatctaataaggctaaaaggcgctcacgagcatcaatacgcatatgatgaccgcattttggacaaacatataaattacgttttacttcttcaccgtaaagcacttgttcacaagaggtacattttgtccaaaccccttctggtacgttagctttacgtgatgcagaggaagaggttcctttgctaaaaattctatcaatccagctcattttttaccttttttattaactagaaaagtttgcgtatttaatcataatttagcgaaatttgctagtcagatgagattatcttctaaaaacaatggccctaaatttttctgtggaatcgcaaatttttcagggtaaatgacattcactaaatataagccttcaggtttcgctgttggcgcggccaatttacgatctttttgctctaacaaccatttcatccactcaacaggttgattgcctgcaccgacttcaatcaagcttcccacaatgttgcgtaccatatgatgcacaaaggcattagcttgaatatccacaataatgtactgcccttttcgcaccacatttaaatgatgcacatttcgccaaggggtattcgactgacattgtgccgcgcggaaagaggaaaaatcattttcacccaataagaactgccccgcttggtgcattttcttttcgtctaaatctaaatggcaatgggtaatcccttccggcaaaatggctgaacgtaatttattgcaatacaagatataacgataacgacgcgcggttgccgaaaaacgggcgtgaaattcatcatccaccacttttgcccaactcactgaaatgtcatcaggcaaattcgcgttcgtaccaaatgcccatgctttttcggagcgaacggctgtagtttcaaaatgcaccacttgtcctgtgccatgaacaccagaatctgttctgcccgcacaaaacacttcaattttttcatttgccacgaaagataacgctttttctaattcttcttgtacactgtgcactttctcttgtcgctgccagccacaatattgttttccgttatattcaatgcctaaggctatcttcattggaaaatactcctaaaacgatttcaaatttgaccgcactttgcccgaaaagaaaaaacaccaataactcatcattattggtgttcttatcacaagctaaaaattaagcacgtttgaagtcaatgtgaaccaattttggtttgaatgggtgacgttgcattgcttgaactttcactgcaacttctttaccttcaaccactaaagtgattacatcgctatagaaagaatcgtgagcttgtgcgttgtttaattcatcgtgatttaagatgattgaaacaggtgcttcgctgccaccataaatgattgcagggatttgaccgttgtgacgcaggcggcggctcgcacccttaccttgcgcttgacgaacttcagcgttaaatttaaatgccattttaatgttctcttgattaaaagtttaaaataaaaaattgcaggcgacccagcaattttcctaaatttgctcaaagacaaactttgagagcgacggattataaaatattcagccccacaatgcaaatttacacagcaaattttttctaggcttttcaaggcaaagcgattaaaataagccccaatttttaattaattttaactaactgattgtaagtgggtttcaaatggaatttcttatcagcttttttaccgattacggttattgggcggtgctatttgttctgattatttgtggctttggtgtacccattccagaagatatcacgcttgtctccggcggtgtgattgctggcctctatcctgaaagcgtcaattcccacttaatgttagtcgtgagtatgattggcgtacttgccggcgattcaaccatgtactggcttggtcgtatttacggcactcgaattcttcgtttccgcccaatgcgcaaactagtcaccttagaacgtctgaaaatggtgcgtgaaaaatttgcccaatacggtaaccgcgtattatttgtcgcccgtttcttaccaggcttacgcgcaccaatttatatggtttctggcattacccgtcgcgttagctacactcgctttgtattaattgatttctgcgccgcgattatttctgtaccaatttgggtttaccttggcgaatttggtgcgaaaaatttagattggttacacgatcaaattaaaaaaggccaactcgtgatttatatcctgattggtgttttagctctatacctattttggaaatggaaaaaagcgaagaaacaggctaaataatttcctataaagtgcggtcaaaaatttataaattttcgtcaataaaaaaacgcttaataattttattaagcgttttttgtttttgttaacctactctcacatctttattttctaaataagcagaaaaaagatgtcccttgaaacttacatttcaagggacagagctttgcgagaaatcttttctcttattgtaacaacgtttttcatttcgcagtgccattacaacgacgtgaattctatctatttatttttttatcgtcaatatattttttatacaaaaatctgttaaaatttaaacaaaaaaaactaataaaaaggaaccaaccttatggaaaataaaaacttacattatatccttggtctcgaccttggtatcgcatctgttggctgggctgtggttgaaattgacgaaaaagagaatcctctgcgtttaattgatgttggtgtacgtactttcgaacgagcagaagtgcccaaaacaggtgaaagcctcgcgctttctcgccgtttagcccgctcagctcgtcgattaactcaacgtcgtgttgctcgcctgaaaaaagcaaaacgacttctaaaatcagaaaatatcctattattcactgatgaacgtcttcctcatcaagtttggcagctacgtgtcgaaggtctagatcgtaaactagaacgccaagaatgggctgcggtgttattacatttaattaagcatcgtggttatttatctcagcgtaaaaatgaaagtaaaagcgaaaataaagagctaggtgcgttattaaacggtgtagacaataatcataaattactgcaacaagctacatatcgcacgcctgcagaacttgctgtaaaaaaatttgagatcgaagaaggtcatatccgtaaccagcaaggcgcctatactcacacatttagccgactagacttactcgccgaaatggaactcctcttctctcgtcaacaacactttggtaatccatttgcttcagaaaaattattagaaaatttgaccgcacttttaatgtggcaaaagcccgccttgtctggtgacgctattttaaaaaggctcggtaaatgtacttttgaagatgaatataaggcagctaaaaatacctatactgcagaacgttttgtttggataacaaaattaaataatttacgtattcaagaaaatggcttagagcgtgctttaagtgataatgaacgtttaatgttaatcgagcaaccttatgaaaaagctaaattaacttatgcacaagtacgttcaatattaaatttatctgatgaggcaatctttaaaggtgtccgttatttcggtgaagataaaaaagccattgaaataaaaacaatattgatggaaatgaaaggctatcatcaaatttgtaatgcattaaaaggtaataacctaaaagcggaatgggcagaattaaaggaaaatccagcattattagatgaaattggtaccgcattttcattatataaaactgatgaagatatcagcgcttacttagcaggaaaactttctcagcctgtattaaatgccttattattgaaaaaccttagttttgataaatttatccaattatcccttaaagctttatataaacttctgccattaatgcaacaaggactacgctatgacgaggcttgttgtgaaatttatggcgatcattatggtaaaaaaacagaagaaacccatcacttcttaccacagattccagctgatgaaatccgtaatcccgtggttttaagaacactcacgcaggctcgtaaagtgattaatggtgtagtgagattatatggttcgccagctcgtattcatattgaaacgggacgagaagttggcaaatcttacaaagatcgtcgtgaactagaaaaacgtcaagaagagaatcgtaaacagcgtgaaaacgcaatcaaggaatttaaagaatacttcccgcattttgcaggtgaacctaaagccaaagacattttaaaaatgcgactttataaacaacaaaatgcaaaatgtttatactccggcaaacctatcgaattacaccgtttattagaaaaaggctatgtagaagtcgatcacgccctaccgttttcccgtacttgggatgatagcttcaacaataaagtattggtgcttgctaatgaaaatcaaaacaaaggcaatttgaccccttttgaatggcttgatggtaaacataacagcgaacgctggagagctttcaaagcattagttgaaacaagtgcattcccttatgcgaaaaaacaacgcatcctaagccaaaaacttgatgaaaagggctttattgaacgtaacttaaatgatacacgctacgttgctcgtttcttatgtaactttattgcagataatatgcgcttaacaggtgaaggaaaacgcaaggtatttgcttccaatgggcaaattactgctttacttcgtggccgttggggattagcaaaatcacgggaagacaatgaccgccatcacgctttagatgccgttgtagttgcttgctcaacagtcgccatgcagcaaaaaatcacacgttttgttcgttttgaagcaggcgatgtattcactggtgaacgaatagatcgtgaaacgggtgaaattattccattacacttccctacaccatggcaatttttcaagcaagaagttgaaatccgtatttttagtgataatccaaaactggagctaaaaaataaattgccggatcgtccacaagccaatcatgaatttgtgcaacctctgtttgtatctcgaatgccaacacgaaaaatgacaggtcaaggacacatggaaaccgtgaaatcagcgaaacgtctcaatgaagggataagcgtgattaaaatgccactcactaaattaaaattaaaagatttagaattgatggtaaatcgtgaacgtgaaaaagatctttatgatgctttaaaagctcgtctagaggcttttaatgatgatcctgctaaagcgtttgctgaaccttttatgaaaaaaggtggggcgattgttaaatcagtgcgagtagagcaagtacaaaaatctggcgtattagtccgtgagggtaatggtgtcgcagataatgcctctatggtgagagtagatgtcttcactaaagatggaaaatatttccttgtgccaatttatacctggcaagtcgctaagggtattttgcctaataaagcaatagttgctctaaaagatgaaaatgagtggatagaaatagacaataactacatattcttattttctctatatcaaaatgatttaataaaagttaaaactaaaaaagataaattttggggttattttaacgggctaaatcgacatactggaggaataaatataagaacccatgatttagaaaaatcaaaaggtaaacaaggtatttttgaaggtattggagttaaaaccgctctttcctttgaaaaatatcaagtagatgaacttgggaaaaatattcgtttatgtaaaccaagtaaacgccaagctgttcgttaatctcaacttaatcctcacacgtactacgtatggggatttttttgtaaggatacattatgacatggagaagtcttcttattagtaaagggggaaaactctctttgcatcagcaacaaatgctgattcaacaagaaggaaatgaatttaccgttcctttagaagatattgctattgttgttgtggaaagcagagaaacagtgattacctttccattgctctcggcatttggtttatacgggattactttattgagttgcgatgaacaatttttaccttgtggtcaatggctcccttttaatcaatattatcgacaattaaaaacccttaaattacaacttgaaacgagcttgccactgaaaaaacaactttggcaacgaattgtgcaacaaaaaattcgtaatcaagcaaaagtcttatcactctgtcagcttcaagaaaaatcagaacggttactccagctcgctaatttagtgaaatcaggtgataaagataatcttgaggcacaaagtgcggtcatttatttctctggattattcggcactcatttcagacgaaaagaagaagacaatgccattaatatacatcttaactatgcttacaccgttgtgcgttcagccgtggcgagaagccttgtactttatggttggctaccacaattaggtttatttcatcatagtgaactgaatgcctttaatttagcggatgattttattgaaccatttcgccctcttgttgatttgctggtatggaacttgctcgaaaaagaattactatccaaaaatcttagtcctctatcaaaacagcaattaatcaaaatcttgcatcatcaactatgctttaaccaagaaaaagtgagtgttttaactgccatagataaaagtgttgcctctttacaaattgcacttattcaaaaaaatgcagcattattgcagttacctgagatcgatatattgcaggaatatcaatatgagtgagggggtgtttatgcgtatgatcgttttattcgatttaccggtcaccactaaagcaaaaatgcgggcggcaaaccaattccgtcaatttttacttaaagatggttatcaaatgttacaactttctatttacactcgaattattaaagggagagatgcgttagaaaaacatcataaaagactcgtcgcacacttacctgaagaaggatctattcggtgtttatctattacagaaaaacaatttgcgagtatggaaattttagtgggagagaaaaaaccgcaagaaaaaaaggtcaattcaaatcaattactacttttttaaccgtttttttagataaaacaaaagcccctaaaccttacggtatggggctttttgctgtccctattatagcactgcgaaatgaaaaagggagctacaacaatacaaagcctattcaatcagtggcgatgattatagcactgcgaaatgaaaaagggagctatctcttccttcggaagaattaaaagtgcggtaaaaaacaacttcattttctaccgcactgtttttattctaattaagctttagctgctaaatatcgctccaccgtatccacaatcgcttgagtttgcggatcgatttcaatattcactaaatcgccaatttggcgtttgccgattagagttctgtgtaaagtttcagggattaaattcacgcagaattcatcgtctttcacttcaccgatagtaagactgatgccgtcaatggcgataaatcctttggtgagtatatatttcatcacatctttattgggtaatttaaaccaaacctgacgattgttttcgctttcgataatctgtgaaacgcttgcggtacaataaacgtggccggataaaatatgtccaccaatttctgcgcccatttgcatcgcgcgttcgatattcacaaaatcccctgcttttaagttaccaagattggtgatgcgcaaggtttcttgcattaagtcaaagctaactagatcatcgtgaatttcagttactgttaagcacacgccattattcgccactgatgcaccgatttctaagccttttcgcatttcagctggtaattttacgatctgtgttctaaaattatcgctgtctttaattgcatgaatttgggcgatgccctgtacaatacctgtaaacattattattcctccattaaaaatttttccaatattatagcaaaatttatgaattctcgtcttttttctcaataccgtattgatattcaaaaacttatccgaattgcgacacctatcgggcttgcccagttagctcaaactggcatgggcaccgtggatgtgattatggcggggcgtgtgagctcggctgatgtaggcggtgtcggtattggtgcctccatttggctacctttagtacttttcggacaaggcttattactcgccttgccaccaacaatttcctatttaaatggttcagggcagcgccatcgcattgctcaccaagtgagacaaggcctttggatttcatttttagtgatgattccccttgcactcatcatctatcataatgatttcatattacagtttatgaatatggatgcccacatggcagatgtgacgatgaattatttgcgtgcgatggtgtggggcttacctgcctatttattgctgattaatttccgctgtttgaatgatggcattgccaaaacaaaacccgccatggtgattaccttcatggggttaatgctaaacattccgctgaattatatgtttatttacggcaaatttggtgcacctgcattgggcggtgtcggttgtggtgtggcaacggctattgtcaactgggcgatggcaatcttgatgattacctattctgccaaaaactataacgaacgtagtttgaaagtctttgaaaagattattgaaaagccagacatcaaaacactgaaaaaattgaccgcacttggtttgcctattgctattgcactgtgcagtgaagtctcactctttgccttaagtagtttattactttccccattaggtgcagatgtggtcgccagccaccaaattgccttaaataccagtgccgtagcctttatgttcccaatgtctattgccatggctgcaaccattttagtggcgcaagaactgggtaatcatgcaccacaaaaagccaaaatcatggctcacgcggctattattcttggcttgattgcggcaagtgtattggcgttggtgatttgggtatttagtgcagagattgccgcattaattgtgggtgataatgccaccgttattgctctttcaggcggcttattagcgatggcagcgatttatcaattttcagattcagtacaagtcgttgtgagcggtattttacgtggctataaagacactaaaattatcctttatatcacgttacttgcctattggggcgtaggtatccctgttggttatattctttcccgcacggattggattgttccaagcatcggcgcaaaaggtttctgggtcgcgtttatcattgccttaaccattgccgccgctttactctttatacgtatgcgaaaaatccaatcacaatctgatgaagccattattcaacagttagaaagattgaaatagttaaagtaaaaagtgcggtcgaatttgaccgcactttttattcttgaatttaaaattagatgctttttaaacttctctatacccttcatattcccaatcaaaatatttttgtaactgaataacaatatcatcccaggtttctcctgatatactatttaccatgagtgacaaataattttctatgtcatctaatgttttcagagcaacaaccattcctttatttatcaccaagaccttttctctttgcaccattcctacattaaaaacattagtataaaaatagtcactcccagaatttccttttgttcctattgctaatgttaaatttaagcaataagctggcttaagaactagtaaggatgcctcatccctcgttgaaaagccataatcaatccattttaaatcagctataagcatttacttcccctatgaactctaaactatacgttttataaatgaaaacttatcaacaagcaattaaaaactaacatcagaaaatttatgccatttaaaagtaaaaaataatttgtacagagtactttcacacacaaatataaaggctccatcatgctattttgtttttcttttagtcgttagaaatataataggaagaatgaggatatgaagtttcaaacttgctactattgcctcttttgctagaagaacataatttatgttattaactcccgcatcaaattgcacataaaaaatagcaacaaaataaatcaaagaaaaagccagaatactcgcaaaatatccaaaaacatatttcattattctattacctttgagtcactcatattctatctaagtttaaggataaaaagtgcggtcaaaattgaccgcacttttatcttttacatcaccaccacatcaaactgttcttggttgtagtactgctctgttttaacttgaacttgtttgctgatgaacatttcaatctctggcaataaaccgtgcgattcttctttgattaagtaatctgccacggctggagaggcataaaccacaaattgttcactcgagaataagtggttaacgcgaatgatctcacgcataatttcatagcataccgtttcgacggttttcacgcgtccacgaccttggcaagttgggcattcatcacacaaaacgtgctctaaactttcacgagtacgtttacgcgtcatttccactaagcctagttgagtaaaaccattcacattcgtttttacgcgatctttcgatagcgcttcttccaaggattcaatcacgcgattgcgatgctcatcggtttgcatatcaataaaatcaataatgataataccgcctaaattacgcagttgcagctgctgagcaatggctttagtggcttcaatattggtgttaaaaatcgtttcatctaaatttcgatgaccaacgaaagcgcccgtattgatatcaatggtcgtcatggcttcggtttgctcaataatgagatagccgcccgattttaaattcacgcgtttttcaagtgcattttgaatgccacgctctacaccataaatatcaaaaatcggctgactgcccgtataaagcattaatttatcacttaattcaggcataaattcatcggtaaattctttcacttcgttaaaacaaagtttggaatcaatatgaattttctctaaattagcgccgataaaatcacgcaaaatacgctgtggcaatgcgggttcaccataaattttagaacgggttggatatttgcctttacgctcaagcactttacgccataaacgttttaaaaattctgcatcttgacgcaattcctcttccgttgcaccttcggtggcggtacgaataataaagccgcctaactcatcacaaaaaggctcaactaacgcttttagtcttgcgcgctcttcttcactttcaatacgttgtgagacaccaacatggctattttctggcataaagacgagataacgagaaggcagtgtaatatcggtggttaatcttgcacctttggtgcccaaaggatcttttaccacttgtactacgatatcctgcccttcgcgtacgagttcagaaatgctttttgctcggaattgcttttgttcgttcacatccacacactcggtatgtgaaacaatatcggaagcgtgtaaaaatgcggctttttctaaaccgatatccacaaaagcggactgcatccccggtaaaacacgggttactcgccctttatagatattccccacgatgccacgtttggcttgacgttcaatatgaacttcttttaaaacgcccgtttccaccaacgcaacgcgggtttcattgggcgtaacattcattaataattcaacagaattcattttttcgaccttagttttaatgatataagtctatcgaaaaggaaaatagaataatagacccaaataaggtaaaatatgacctttctcaaattttcatgactttttttggggtatttaatgtttggtttagacccaacacttattacttttagtatttatattttcggcatgattttaatcggtgtccttgcctattattatacaaacaacttatccgattacattttaggtggccgtaaactcggaagttttgtgacagccatgtctgctggcgcatctgatatgtcaggctggctattaatgggcttgccaggtgcggtatatgtatctggcctagtagaaggttggatcgccattggtttaattcttggagcttattttaactggttactcgtggcgggtcgcttacgaatttataccgaatttaacaacaatgcgctcacattaccagaatatttccatcatcgctttggtacaaagcatcatctcttaaaaattgtgtctgcaacaatcatcctggtattcttcaccatttattgtggttccggtgtggttgcaggggcgaaattattccaaaacctattctcagtcgactattccaccgccatttggtacggcgcattagcgactatcgtctatacctttatcggtggatttttagccgtaagctggacggataccattcaagccacattgatgatttttgcactgattttaacgcctctctttatctttttaagtttgggtgatgcatcacaatttactgaagtgctacatcaagcagaaatcgcagcaaataaagactttaccgatttatttagctctactacaccattaggtttattaagtttagcggcttggggcttaggttattttggtcaaccgcatatccttgctcgttttatggcggcttactcggtgaaatccctcattaaagcacgccgtatcagtatgacatggatggtgatttgcctcgctggtgcgattggtattggcttcttcggaattccttatttctttgctaaccccaatgtagctggtgtggtaaataatgaaccagaacaagtatttattgaactggctaaattgctctttaatccatggattgccggtattctactctctgcaattttagcggcagtcatgagtacactttccgcacaattattaatttcttcaagctctattactgaagatttttataaaggttttattcgtccaaaagcttctgaaaaagaattagtttggctaggtcgtgcgatggttttagttatcgcgggtatcgccatttggattgcacaggatgaaaacagcaaagtattaaaactcgttgaatttgcctgggctggctttggttctgcatttggtcctgtcgtgcttttctccttattctggaaacgtatgacttcatcagcagcgatggctggcatggttgtcggcgcagtggttgtctttgcttggaaatcggtgattcctgaaaccagtgaatggtttaatgtctatgaaatgatcccaggattcatccttgctagcctggcgattattgtggtttctctcctttctgcagaacctgaaaatgaagttaaagaaacctttgaaaaagcagaaagagcctataaggaagcaaaataatgattgattttcgtcctttttatcaacaaattgccaccacaaatttatctgcttggctagaaacattgcctttgcagttaaaagaatgggaaaaacaaacccatggtgattatgcaaaatggtcaaaaatcgtggactttctccctgatttacaggcagatactatcgatttaaaaaatgcggtgaaatctgaccgcacttccccactttcagagggcgaaaaacaacgcattgtccatcatttgaagcaattgatgccgtggcgaaaaggaccttatcatttatttgatattcacgtggattgcgaatggcgttctgatttcaaatgggatcgtgttttgcctcatcttgcgccattaaaagatcgtaccattttagatgtgggctgcggtagcggctaccatatgtggcgcatggttggtgaaggtgcaaaaatggtggtgggtattgatccaaccgaacttttcctttgccaatttgaagccgttcgaaaattattaaataacgatcgtcgagcgaacttaatcccattaggtattgaagaaatgcaaccacttgcagcatttgatacggtattctcaatgggtgtactttatcatcgtaaatcaccgcttgatcatctcactcaactaaaaaatcaattagtaaaaggtggcgagctcgtcttagaaaccttagtagttgatggcgatgtcaatacggtattagtaccttcagatcgctatgcaaaaatgaagaacgtgtattttattccttccgttgcagctctcattaattggttggaaaaagtcggctttactaatgtgcgttgtgtggatgtcgccaccacaacattagaagaacagcgtaaaacggattggttagaaaatgaaagtttgattgatttcttagatccaaacgatcacagtaaaaccatcgaaggctatcaagcccctactcgtgcagtgattttagccaataaataattgcttaaataaaagagcggtcaaaaaattcaatgtttttttgaccgctctttgcttttctattttaatgcaatatgcaccgtaatctcttcgcgatcgtgatacaaatgcttcgcctgaatatcaaattccagttctttttctgccaacatcactgcaagattttctaggcacaacatcacttcttgataacgttttttcattggcaatttcaagttgaaaatggtttctcggcaccagccgttaatcagccattttccgattaaattggctatgcggcttggttgttccaccatatcacacacaagccaatcaatatgcttacgttttggtggttggaatttaaatccgtcttctgggcaatgttctattctaccggtatcatgcaaactggccgccattttgccgtgatcaactgcatacacaaataaaccacgtttcactaattgataggtccagccgccagggcaagctccaagatcaacgccaaccatattttcatttaagcgtttactttcttcatttcgaggaataaaggttaaaatcgcttcttccaattttaaagttgaacggcttggcgcatccgctgggaatttcaaacgtggtatccccataaaatgggtagagttattgccaagataagaataccctacatagcagcaattcggctgagtgaaaaaacaatgtaaaatctgaccgcgctttgcattcggcttaccttgtaaccaaccttgttttttcaacgcttgacgtaacggcacggtgaattttcggcaaaatgtcgaaagctctttggcttcattggtatctgctgtttcaacaaatagctctaccgcttgcttaagattaatgtcttctgcaatatgtttatattgagcaagaattggcgagatacgatcttgaggatcgagattttctaagagatctgacacaacgatcatttgacgtgcaaaaatcaaacgattaaaagggatttctcgcgctaaacgatctgcatcacccggttgataacattcaaaaatgacatagccgctgttttctactacgcgagcaaaaccaaatacaccacgctcagaggctcggtcagtaatttctgcggcgacttctttttcaaagccaattcgacaatataaggctaatttattcatgttttcctaatttaattgaatctttaatccattttctaaaggcttgaatttgttcatcatctaaacgatctaaatgattgactacatagaatgatttcggatcccgtaattcggttggtaacacaatttgcaaatgaccgttttcaatttcttgctgagccaaaatacgattagctaacgcaataccctgcccatgaacggccgcttgcaatgccataaaagtatggctaaataacggaccttgctgaatattcaaatcatctaatttgagataatccgccatcgcttgccagttatctcgagtatgcgtatgaatcagcgtatgctttttcaaatcattag

SEQ ID NO: 3180 - DNA, 23165 bp, synthetic construct
  misc_feature 1..23165: note = Synthetic
  source 1..23165: mol_type = other DNA
aatagcgcatcgccacagaacaaatattcattaccgaataaataactgacgtgctgagcggtatgaccggcactttcaatcactcggacatcataatcaaataaagtgaaatgatcttcaggttgaacaatatggttagcgaactgagaaacttcttgcgatccataaactgctaattgagggtagagagagagcagttcaggcataccatcggtatgatcatgatgattatgtgttaataaaatagcggtcaaatttagctgattttttgcaataaatgtcaatacgggtgcagcgtctgacggatcgacaataattaggttattatctttttgaattgcccaaatatagttatcggagagtgccggaatgggggtaatgtttagcataatactttcctctataaaagaatacatggggaaaaccccatgtattcatcaaaaacgaattattttaagaagagtgccgctgcaccacgagtaccgcctgagtcaccgtgaatcgcttttttgaagactggtacttttgcactacgcattaaatgaggcggaagcgcttttggtaaagagtcataaatatgatcaaaattagataaaccgccgccgaatacgatcatatccggatcaagaatcgtaatgagattactgatactgattgccattaattcgatgtatttatccacaaattcgacaattttcggctcttttttatagaagcgttcgataatttcttttgcggatacgctttcaccgacaagatctctaaatagcatctcaaagccacgaccggaaatataagtatctaagcaagcacggttaccacaaccacattcataaatcggcgcattatcccaacctaatagttttaaagcatgataattcagttgcatatgaccgacttcacccgccataccgattctgccggaatgaattttaccgtcaaacacaaaaccgccgccaaaaccggtaccaataattaaaccgagtacggttgagaattgttggttattcggatcccaagcttccgaaagggcgaagcagttagcatcattttctgctcgtatttcacggcctaaacgttcgcttaaatcttttaaaatcgctttgccgtcagccactcgaatattggtaatttccgcaataccggtttcacgatttacaaagccgggtaaacctaaaccaacagaacctttttcgccgaatttgtgatcggcgttacgcaccaaggtttcaaccgtatttaaccaatcttcataattggtttgcggtgtcggcactcgttcgctatacaacttttcaagctgttcattaaatgccgccaactcaatttttgtcccaccgatatctaaaccgtaataaatagccataattagcctcgcttttgaaagattttgaaagtttctaagaaaggaatcacccaaacaaacacgataatgtggaatacccaagaaattaacgtgctaacaaataaatcgatagggtagtgcatacctaaacgtaagcggctgatgagcatgaggcccgcccataaaattgcaaaaatttgggcaaaaatgaccgcttttccgcttaaaccgaatagcaacccgccgaatactaataaccaagaaacggcaaaaatggtatgacctgaagggaatgaataacctaattcacccgcttgatgttctgcaacgaaatcagcatcagctggatgcgttttttctgcaagtgttaacactgcttgagcctgttcttcttccggtagcgcataaaattgttctgtttgtgcttggaacatttccgtaacaaatggacgaggctctttaaataccgctttcgctccttctttgatgatttgcgtaccgacgacggagcttgcacaaataaagccgactaaaaaccacgcatgacgtttacgagtgagccacattagccaaagcataaagagcacacaggtaattaaagcgtaaggagctgaacccgtttcggttaagaaaaataaccagaaatcaagatcgtaaagacggtaatctattcctccaaatgtccatttccaacctgtcgcccaagtgaataatggcacaagtaacatcaaaaaagtgaaaatcgagagttttttaatcacggaaagttccttataaaaaagaccgcttgcaagcggtcagatttggctaataaattacgaaattgctttcgttgcttttggtaagctgattttcttctcttcgctttggcgataaagaacaagaacgtggccgatagtttgcacgttagttgcttttgtttcacgcacgatcgcatcgataattaattgtttggtttcacgttccgcacctgaaatttttactttgattaattcgtggtgatctaatgcgttttcgatttcagctaacacgccttccgttaagccgttaccgccaagcatgacaaccggacttaagtggtgtgctaaaccttttaaaaattgtttttgtttcgttgttaatgtaatagacattgtttttttaaacctgtggtttgttgagaataaaatttggcgtagaaaatagcacaaaaggggcgaattttaaagtaaaatgcagagaacaacaaacaaaataaactagaaaaggactgattatgtcaacgttaagtgttgcgatgattgtaaaaaacgaggctcaggatttagcgaaatgccttgaaaccgtacaaggttgggtgaatgaaattattgtgctggatagcggtagtagcgatgaaacggtacaaatcgccgaaagtttcggtgcaaaagtgtatgtgaataccgactggcaaggctttggtaagcagcgtcagttagcccagcaatatatcacaagcgattatgttttatggctggatgcggatgagcgtgtaacgcctgaattaaaacagagcattttacaagcggtcgaaaaagatgaaaaaaatactgtctatcaagtaagtcgtttaagcgaagtattcggcaagcaaattcgtcattcggggtggtatcctgattatgtggtgcgtttgtatcgtaccgattttgcgaaatacggtgaagaattggtacatgaaaaagtccattatccgaaaaatgccacggtgaaaaaattaaccggtgatttactgcattttacttataaagatattcatcactatttagtgaaatcggcaagttatgccaaagcatgggcaattcaacgtgcgaatgcggggaaaaaggcgagtttattagacggtgtaacacacgctttaggttgctttgtgaaaatgtatttgttaaaagcgggctttttagacggcaaacaaggttttctgttagcggtgctttcagcgcattcaacctttgtgaaatatgcggatctttggaacagaacacgtaactaattgcaaaaaatcgtgaaaaaaagaccgcttgttgtgtgtagcaacaagcggtcttgttaattaaatatcctcttcctgatcatagccgtcatattcaaagtcatccttggctaatgatgcacagccatattgctctaatttatttttagtaaagttagaacggaatgccgagctattgttattcaagctaattacaccaatagtcgcattattacattgatgtttattgataaaaacgaggttgtagccggattcacggatataaccggttttattaattgccgcgtcgaaaatttcttcacgtactaatgcactggtattttgcataaatacgttacgtttgccggcacgaatatatgctgccttcgtattagagagctcttggattttggcattgttcagcgaatattttgccagtttaactaagtccatcgcactcgaaatattggcgctagataaaccggaactatcgctaaaacgagtagaacgcatacctaattgctgtgctttttggttcatcttttggatgaactgcgaacggctcatcccggcagaacgagaaagcgcatgagcggcataattatctgaatggactaacattgcttttaataattcgctgcacgcaatcggcgtatattttggtagtttagtaccggtgcctttgatgtaatcgaaatcttcgtccgaaattgaagcgctacagtttttatttttgttattttctaaaaaaacattcgccgtcatgagcttagtaacagaagcaatcggctgaacattattcgctgagcggctttctaaaattttatcgtgagtaaaatcatacaccacataagattgggcaatactaagggttggaaaaaggaaaaaaacagagagaaattttttaaacatattatgattcatcgagttaaaaattagcctgtcattctaacaggcttttgttatgctcgctatggattaaacaattcttaggaatgccaaaggttctttacaaaaggcacaattgtttttagcgcttccgagatcgaaattaagcctaaattcatttgttgcgctttttcttttgcttcgggcggcataaaggctaagtgtttaccttcttcattgatcggacgccaacggcgaggtaacgcagataaacggcttggataaaagccgatagttgcgacattcagtgtgccagcgatatgcagaggtccggttgaaccggcaataaacagatcggcacaagcaatcgaacaggcaaaatcttgtaacccgtcattcttatcatatacaactgctttggttgcagtaatttgtgctgctaattggtgagctttttcgctttcgcctttaccggcagtcagcacgatttcacaattagtttcactggcaatgctattaagcatttgcgcatattgttcaatagataagctggttgcagatccgccggtggatgcatgcacaaacagccatttacaagcggtcgaaatttgcagattttttgctaatttggctttttgttgtgcaatctgttcttcgctgaattgcaagtagggcgctttaggttcaactactgcaatatggtgcttttgcagaaaggcacgagctaaatctagattatattcgctttccgcttttgccgattgcgaacggcgttgcgttaaacgttggttatatagaaattgaaagactttggttgccggcgcaaggcggtgtttaatgccacttttccaagttagtttggcattgtaccagtcggaaacaaagcagattaccgcatcaaattgggcatttttgatcgcttgtaaaacacggttgaactcggttttgtcttttttattcggtgtatcaataatcacgttatcaatcgaagggcatagttcggcaagcggggcagtataacttggtactaaagctgtaatttctacattcggcatagattgtttcagcattgcaaatgctggaaaacacaccataaaatcaccgattttgtcattacgaatgacgagaatttttttcatttatattttaaccttttaaaacgaattacgtattattttagcatttttttatgtgagtttttggtaaaaaatcatgaaaatttgaccgcttgtttagtattaaacgttagattaaaaatcattacgagatttctctctaaattttagatgtaatttttacaaaattaaactagaatagacggaatgacacaaatgcaaccgtttgcgtcagttgtcttttattgtgaaaatttataggaattcgtatgtcagcaacaattttagaatctctcccattaggtcaaaaagtaggtatcgcattttcaggtggtttagatacttcagccgcattactttggatgcgcaaaaaaggtgctgtaccttatgcttacactgcaaacttaggtcagccggatgaagacgattacaacgcaattccgaaaaaagcgatggaatacggtgcggagaatgcgcgtttaatcgattgccgtgcacaattagcacgcgaaggtatcgcagcaattcaatgtggcgctttccatatttcaaccggcggtattccttatttcaatactacgccacttggtcgtgcggtaaccggtacaatgcttgttgcggcaatgaaagaagatgacgtaaatatctggggcgacggttcaacctttaaaggtaacgatattgaacgtttctatcgttacggcttattaaccaatccaaaattaaaaatctacaaaccttggttagaccaacttttcattgatgagcttggcggccgtttcgaaatgtctcaattcttaatcgctaacggttttgactacaaaatgtcggtggaaaaagcatactcaaccgactcaaatatgttaggtgcgactcacgaagcgaaagacttagaagaattaagcaccggtatgaaaattgtaaaaccgattatgggtgtagcattctgggatgaaagcgtagaaatcaaacctgaaaccgtttcagtgaccttcgaagaaggtgtgccggtagcattaaacggtaaacgtatcgaagatgcggttgaattaattttagaagcaaaccgtatcggtggtcgtcacggtttaggtatgtcggatcaaatcgaaaaccgtattatcgaagcgaaatctcgtggtatctatgaagcaccggggatggcgttattacacatcgcttacgagcgtttagtaaccggtatccacaacgaagatacgatcgaacaatatcgtatcaacggtttacgtttaggtcgtttactttaccaaggtcgttggttcgatccacaagcgttaatgttacgtgaaacggctcaacgttgggtggcaaaagcgattaccggtacagtaactttagaattacgtcgtggtaatgacttcaccattttaaatactgaatcaccaaatttaacttacgaagcagaacgtttaagtatggaaaaagtagaagatgcaccgttcacaccagcggatcgtatcggtcaattaaccatgcgtaacttagatatcgtggatacacgcggtaaattaggcatttatactgagacaggtttattatccgttcaaaacaacgtattaccgcaacttggtaaaaagtaatcttgatctaatgcttcagaaaatttagaatcaatcaaaagccccaatagtttacgctttggggctttaattttttcatcagtttttaaattaagcggtcaaaaattaagaattttttgcaaatgaaattagttgaaatatttacagacggctcgtgcttgggcaatcccggcaaaggcggtattggcattgtgttgcgttataacgggcacgagaagcaagttagcaaaggctactttcagactaccaataaccggatggaattgcgtgcggtgattgaagcgttggcaatgttaaaagagccttgccaagtgcagttgaattcagatagccaatatatgaaagacggcatcactaaatggattttcaactggaagaaaaataactggaaaaccgccaacggtaagccggttaaaaataaagatttgtggatagcgctagatcaagagattcagcgtcacaaaattgagtgggcttgggtaaaaggacactcaggtcatcgtgaaaatgaaatttgcgatgagttggctaaagcaggtgcaaataatcctacattggaagatgtagggtacaatgcggattagccaaaagaggcaagcggtcaaattttgcaaaatttttgcaaatttgaaccgcttgtaaaatttttcggcatatattatgcgttttttacgaagtttgctctacgcaaacgttttctttttttgtagaatataggttcttaacctttagaggtttttatggttgacattattattatcggattaattgcattttctatcttagtaagcctttggcgaggttttgtaagtgaagtgctttcacttgccggttgggtcgtagcgttttttgtggcaagcaatttttatccttaccttagcggctacctcacgcaagtaaattcggtatatcttcaaaactcagaatacttacgtaatggcatcgcagctgctgttctttttattatcacactgattgtatgtggcattattagcgctctgctaagcaaattagtggatacaacaggtctatcagcgacagatcgtgtgttaggcggtgcgtttggcgcattacgcggtattttgattgttgcggcaatcttattcttcttagataccttctcatcagcaagccaaacggaattatggaaagagtctcaactcattccgcactttgactttattgtgaaatggttctttgaacaactacaagctaattccagctttttaaattcgactaaatagagaggttttttatatgtgcggcattgtcggcattattgggggatcgccggttaatcaggcgatttatgatggtttaacattacttcaacatcgcgggcaagatgccgcaggtatcgtcacaattgatgatgaaaaccgcttccgcttacgtaaagctaacggcttagtaagtgacgtatttcgtcaagagcatatgctcagattacaaggtaatgcgggtatcggccatgttcgttacccgactgccggttcatcaagtgtttcagaagcacaacctttctatgtaaactcacctttcggtttaactttagttcacaatggtaacctaaccaataatgctgaattaaaagaacgcttattcaaagaagctcgccgtcacgttaataccaattcggattcagaatcattattgaatatttttgcgcactatttagatcaatacccgacagcgcatttaactcctgaaaatatctttgaaacggtacgtaaaaccaacgaagtgattcgtggtgcttatgcgtgtatcgctatgattatcggccatggtatggtggcattccgtgatccgttcggtattcgtccgttagtattaggtaagcgtgttgtagaaggcaaaacagagtatatgtttgcttccgaaagcgttgctttagatattgtcggttttgaattcgtacgtgatgtaaatccgggtgaagcggtttatattacctttgacggtgaattacattcggcaatttgtgcggataatccgaaattaaacccatgtatttttgaatacgtttattttgctcgcccggattcagtgattgacggcgtatctgtgtatagcgcacgtgtgcatatgggtgaattattaggtgagaaaattaaacgtgaatggggacgcatgatcgatgagattgatgtggttatcccaatccctgaaacctcaaatgacattgcagtacgtatcgcaaacgtcttatataaaccttatcgccaaggctttgtaaaaaaccgttatgttgcgcgtaccttcattatgccagggcaagcgcaacgtaaaagttcggtacgccgtaaattaaatgcgatttcaagcgagtttaaaggcaaaaatgtgttattagttgatgactctattgtacgcggtacaacatcggaacagatcgttgaaatggctcgtgctgccggtgcgaagaaagtttacttcgcatcagctgcgccggaaattcgttacccgaacgtatatggtattgatatgccgacttgtgaagaattagtggcttatgatcgctcagtagaagaagtggcggaaatgattggtgtagataaactgattttccaagatctcgaagcattatacaaagcggttcaggcagaaaacccaacaattcaacattttgacgcatcagtatttaccggcgaatacattaccggcgatgtagataaagcttaccttgacgcaattgcacacgctcgtaatgacaaagcaaaagccaaagctgcaaaacaagcaaccaatttagaaattcataacgaaaactaaattaaagcataaaaacaagcccttgagtctgagatgattcaagggctttttgtattaatggctatataaaacgatgccccttgaaaccgaaatttcaaggggcagagcgttgcgagaaattcatctcttattgtaacaacgtttttcatttcgcagtgccattacaatgattaaatagtatcgttgacattgattgttgtcaatatacatttattacaatttatgataaaaattaaacgccttgtaaaaaaggattattacaaattataagaggtgaaattgtatgaaattgacgccattaaactatattttaggtcttgatttagggattgcttctgtcggttgggcagtggtagagattgatgagcaagaaaatccactaggtttaattgatgtaggagtacgaacatttgatagagctgaagtgccgaaaacaggcgaaagtttggcattagctcgccgtttagctcgttctgctcgtcgtttagtaaaacgtcgagcggatcgaattaaaaaagcgaagcgtttattaaaagcagaaaatattttactttcggcagatgaacacttgcccaatgatgtttggcaattacgggttaaaggtttggatcaaaagctcgaacgccaggaatgggcagcggttttattgcatttattgaaacatcgtggttatttgtcacaacgtaaaaatgaaagcaaaagtgagaataaagaattaggtgcgttgctttcaggtgtagaaacaaaccatcaaattttgcaatctgctgaataccgcacgcctgcggaaattgctgtgaagaaatttcacgtagaagatgggcatattcgtaatcagcgtggtgcttatacgcatacatttagccgtttagatttattggcggaaatggaattattgttccaacgccaaacggacttgggcaatccgcacacttctgcaaaattattggaaaatttgaccgctttattgatgtggcaaaagcctgcgttggcgggcgaagccattttgaaaatgctcggcaaatgtacctttgaacccaccgaatataaagcggcgaaaaatagttattcggctgagcgttttgtatggctgaccaagttgaataatttgcgtattttggaacaaggggctgagcgtgcattgactgataacgaacgttttgctctgctcgatcagccttatgaaaaagccaagtttacttacgcccaagcacgtacaatgttagctttacctgatgaagcaatttttaagggcgtgcgttatcaaggcgaagataaaaaagctgtcgaaacgaaaactattttaatggagatgaaagcctatcatcaaatccgtaaagcattagagaatgcagatttaaaagcagaatggaatgaacttaaaaataattccgaattgcttgatgacattggcacagcgttttcattgcataaaactgatgaagatatttgccgttatttagatggaaaattatcggaaagcatattgaatgcgttgttagaaaatctgaattttgacaaatttattcaactttcacttaaagcattacaacaaattttaccgttgatgttgcaagggcaacgttatgatgaagcggtttcagcgatttatggtgatcattatggtaaaaaatcagcagaaattaaccgcttgttaccaactattccagccgatgaaatccgcaatccagtagtattacgcacactgactcaagctcgcaaagtgatcaatgcggtggtgcgattgtatggttcacctgctcgtattcatattgaaacaggacgagaagtgggcaaatcttatcaagatcgtaagaaactggagaaacaacaggaagataatcgtaaacaacgtgaaagtgcggtgaaaaaattcaaagaatattttccaaatttcgtgggagagccaaaaggtaaagatattctaaaaatgcgtttgtatgagttgcaacaagcaaaatgtttatattcaggcaaatcattggaattacaccgcttattggaaaaaggctatgtagaagttgatcatgctttgccgttttctcgcacttgggatgatagctttaataataaagtgttggtgcttgccaatgaaaaccaaaataaaggcaatttaacaccttatgaatggttagatggcaaaaataatagtgaacattggcaaaattttgtcgcacgagtacaaactagtggtttctcacatactaagaaacaacgtattttaagtcataaactagatgaaaaaggctttatcgaacgtaatttaaatgatactcgctatgttgcccgtttcttatgtaattttattgctgacaatatgttactgacaggcaaaggcaagcgaaaagtgtttgcttcaaatgggcaaattacggctttattacgtgggcgttggggtttacaaaaagtacgtgatgataatgatcgccaccacgctttagatgcggttgtggttgcctgctcaacggtagtgatgcaacagaaaattacaagatttgtgagatatgaagagggtaatgttttcagtggagaacgaattgatcgtgaaactggtgagattattcctttgcatttcccaagcccctgggcattttttagagaaaatgtggaaattcgcatttttagtgaaaatccgaaattagaactggaaaatcgcttacctgattatccacaatataatcacgaatttgttcagccgttatttgtgtcgagaatgccaacccgaaaaatgacagggcaagggcatatggaaacagtaaaatcagccaaacgtttagatgaaggtttaagtgtattaaaagtgcctttaacacaacttaaattgagcgatttagagcgaatggttaatcgtgagcgtgaagttacattgtacgaatctttaaaagcccgtttagaacaatttggtaatgatccagcaaaagcttttgccgaaccgttccataaaaaaggcggtgcggtggttaaagctgtgcgagtggaacaaacgcaaaaatcaggcgtattagtgcgtgatggcaatggtgttgcggataatgcttctatggtgcgagttgatgtctttaccaaaggtggcaaatacttccttgtgccaatttacacttggcaagtggcgaaagggattttgccaaataaggcggtaactgctaatgttgatgaaattgattggcttgaaatggatgaaagttatcaatttatctttactatgtacccaaatgatcttgtcaaagtaaaattgaaaaaagaagaattctttggttattacggtggtttagatcgagcaacaggggctattgtcataaaagaacacgatttagaaaaatccaaaggaaaacaaggtatttatcgtattggcgttaaattagctttgtcatttgaaaaataccaagtcgatgaactcggtaaaaatatccgtccttgtcgtccaactaaacgacaacacgtacgctaactgaatccctacactcttcgagtgtggggattttttgtatttaaggaagaaattatgacttggcgtagtattttaattagcaagggcggaaaactttccttgcagaaaaatcaaatgttgattcagcaagagggtaatgaatttactgtacctttggaagatattgcgattgtagtggtggatagtcgggaaacggttattacgattcccttattatctgcttttggtttatacggcattacgtttttaacttgtgatgaacagtttttaccttgtgggcaatggttgccatttaatcaatatcatcgacagctcaaaaccttgaaattacagctagaagctagcttgccacaaaagaagcagctttggcagaaaattgtgcaacagaaaatccgaaatcaagcgacagtgttgaagatttgcaaatttcaagcagaatccgaccgcttgtctaaaatggcagagcaagtaaagtcgggtgataaagagaacttggaagcacaaagtgcggtaatttattttcaaactctatttggtaaagggttcaaacgtaccgaagatgagaatatggtcaatagtgccttgaattatggttataccgtaatgcgttctgcggttgcccgtgcgcttgtgttatatggttggttaccccaaatcggtttatttcatcgcagtgaactgaatgcatttaatcttgcagatgattttattgagccatttcgtccgttagtagatttattagtggtgcaacttgcgaatgatgataagttggcgttcaatttatcgcctattttaaagcagcgcttaattaaggtattaaattatcagcttttatttaaacaagaaaaagtgaataccttaaccggtattgagcgaagcgtgagttcatttcaatctgcattaactcaacgaaatgcagatttgttaaaacttcctgaaattctaccgcttgcggagcatcaatatgagtgagaatgtgtttatgcgtatgattgtattatttgatttacctgtaacaaccaaagccaaaatgcgagccgcaaatcaatttcggcaatttttgctgaaagatggctaccaaatgttacaactttctatttatactcgaattattcgagggcgagattcaatggaaaaacatcataaaagactagtagaacatttacctgaagagggttcaattcgttgcatttctattactgaaaaacaattcgccaatatggaaattctagttggagagaaaaaattgcaagaaaaaaaggtgaattcgaaccaacttttactgttttaaggcaatttttttaataataaaaaagccttgaacccttactgctcaaggctttttagagtcccgattatagcactgcgaaatgaaaaagggagctacaaccctaagaatgttgttatcaatattgattcaattatagcactgcgaaatgaaaaagggagctacaaccactatgtttgccttatctgctattggatcattatagcactgcgaaatgaaaaagggagctacaacgacagcattaatatcgcgatccgcatcctcattatagcactgcgaaatgaaaaagggagctacaactataaccgataaattgccaatcatcggtaaattatagcactgcgaaatgaaaaagggagctacaacaaaacgtgagagaatttattcatttttggaattatagcactgcgaaatgaaaaagggagctacaaccgctgttggatatttgagtggccaacacttattatagcactgcgaaatgaaaaagggagctacaacttcgtttaccgcatcatagttaaagccttcattatagcactgcgaaatgaaaaagggagctacaacaaaaaatgcgaaaaatggcagcaatattgaattatagcactgcgaaatgaaaaagggagctacaacggaatttatgagccatgtaatatctatcccattatagcactgcgaaatgaaaaagggagctacaactacaccgtttgagcaagaagtgccctgattattatagcactgcgaaatgaaaaagggagctacaacctttcgctctcgctttggctcgccccatttattatagcactgcgaaatgaaaaagggagctacaacagtggttgagggtaatgcctaatgtatgcgattatagcactgcgaaatgaaaaagggagctacaacattctgaccgggtttaacagatatgctgtcattatagcactgcgaaatgaaaaagggagctacaactaggacggagcttataccttcgtaaagcaaattatagcactgcgaaatgaaaaagggagctacaacgcagtgaatgaagtgatgtaagcatataaaattatagcactgcgaaatgaaaaagggagctacgactcctgacgaagtcgtgtaccagagtcgaattgtagctatgtgaaataactaagaaagcttatttatacacctgtggtattgagtattcaatttgctgtttgatttgagcgtagattggtttgaactcttcgcagcgagatttatcaacattagctttttggtggttatatttttcatgcatttgctcaaagtaaagacgtgaggattcgtctttttcgatcaattgagcattgtgttcgccaattaactcttttaataaattttgctggaaatagagcatcgtcatgctttcggcaacagaccaattgtcatagatttgttggtaattcggttttgcaagatcggggaaaaggcattgttcaatattatttaactgacgaaccaagattttcatatcggtagcggagattttgtatttggcgtgttccgtataagcggtcggattttcagcagaatttgcaaaactggtgtggcataaagctgcacaaatcaaggtaaataaagtttttcgcattgtatttattcctatgtctgtttggcgcagcatagcatagatcttttatttcgcgcaaaaaataaaccctccgaagagggcttattttagtggaaatcgttatacgataccttgttctaacattgccgttgccacttttttgaagcctgcaatatttgcaccgtttacatagttcacgaaaccgtctgcttctgtgccgttttctacacagttttcgtgaatagctgtcatgatattgaatagacgttgatcaacttcttcacgagtccaagataaacggattgcgttttggctcatttctaaacctgaagtcgctacaccaccggcatttgccgctttacccggagcgtaaagaattttcgcagcgataaacacttcaacaccttcaagtgttgttggcatatttgcgccttcagcgacgcagaaacaaccgtttttcactaattcttttgctgcttcaccgtctaattcattttgtgttgcacacggaagcgcaatatcacatttcacaccccatggtttttgaccttcaaagtattggatgccttgttcttgagcgtatactgataaacgttcgcggcgttcattttttaacactaataaatctgctaattgtttttcagtcatacctgaatccgggaataacacataaccgtttgagtcagatacggttaagactttcgcacctttttggattgctttttctgcagcgtattgtgctacgttacccgagcctgaaataacaacacgtttgccttcaaaaccttgacctttagttgctaacattgcgtctgcaaagtaaaccgcaccgtaaccggttgcttctggacgaattaagctaccgccccaagttaagcttttaccggttaatactgaggtaaattcattacgtaattttttgtattgaccatacatgtaaccaatttcacgcccgccaacgccgatgtcgcctgctggaacgtctgtatctgcaccaatatggcgagataattccgtcataaatgcttggcagaaacgcatgacttcagcgtctgatttgcctttcgggtcaaagtccgagccacctttaccaccacccatcggtaatgtagttaatgcatttttgaagacttgttcaaatgcgaggaattttaaaacacctaagtcaactgtcggatggaaacgaataccacctttataaggaccaatcgcagagttcatttgaacacggtaaccacggtttacttgcacttgacctttatcatcaacccaagttacacggaaagtaataacacgctcaggctcaacaatacgttctaaaataccttgttgagtatattgtggattttttgcaaggaatggtgctaatgaaccgaaaacttcttccactgcttggtggaatggtgcttggttaggatcacgttgtttgattttttggaacaatgcgtttaagtcgctcataaagtactcctgttatgtttgaattttagtaagaaataggttgtgttttgctatgtctcggagtctagcaagcaatttttaatttgaaaagatgtaattaaaaaaatttatcaaataaattacaaaaatttagtcaactgattaaaaaatgctctgctgttgattttttatgatttttaataggggtaaatgctcaaaagttaagttgaaattgatgatttgattgcaaatttggttatgttgtacaaaaactaatggttgggttaaggattagaaatattaatgaatgattttcgacataaaaaaaagcccacatctgtgggctaatgaattattccgctttagtcgcttcaatcggtttatctaatttaatatcacgaactaaaccttggttatcgaagtaaacaaagagagtatgctgaataggatcgttatacccctcacgtttaatgaaaacataatcccaacggttttgtgcaaatacgtcttgtaacataggtgtgccaagtaaatattgcacttgggttttattcataccgacttgtacttgatcaattttgtcttgttctaaatagttaccttgtggaacatcaatacgatacaccactttttttacggtagaacaagaggtaacacctacagcaagcagtgcgatagctaaaagagatttcattttcataatatttattgacctttgaattgttcaaaatgattggatagataatacccaaactcataaaaattttccattatttattgcgttccaactggtcacgcaaatttgctggtaaccctttgattgttaatgtatcgtttagttcatcccaaattaaacgttcgccgagtaattccgcattaaaactaattgttacgcccttacctgagcctgaatatttggttaaggtttttaatgcattacgaactggtggaatattttcttcaagcccgtattcttgctcttgagtaaattgtgcaaaattaacttcgttaagtgtcggtagcgcttcagataattcacttaaggcgatttcttcgccgctgttaatttgccctttacagtattcaaatacttgctttttcacttctcgagtttgcggggcagataattcaccttgatcacagtagtcactcaccgcttgtaaaagcgtttgattttgtaattgagggttaaaaccttcttccgcactcagaaaatccataaagaagtccgcaatttttcgtccgactcgccctttaataaaggtgagataacgatttgattgtgcattgatttttaattcagtcagattgatacggcaagcgatatcatactgagtaatatccaaatattcggtgcgttttatgtctaattgatcgtcgactaacattgaggtacggctatcaatcaatgcgataaataaataatcagtggctaaaaagttataacggcaaaggataaaggttccgcctgatgcaaaaggatatttcgctaattcgctagagagcattttggcacaactgtgactgaacggtaaaaaatcagtttcctgttctaataagcgattaagttgctgagcaaaaatagattcatttttaaatatgccgtaagcctttgctttactttggtaagcttggtgaagctgcaacatcatttgctccacttcaggactaatggcaagtagattgtcgcgaagtaccgtatttaactccggtgtttcaccttcggtttggtgaatctgatgaaggacgatttcagtaacattaatgctcatactatttctcttgagattaggggtagaaataaaaggtgggagatattatcattaaacgtactatttttcattactaaaagaaggaattcatatgactaaagttattcatacagaaaaagcacctgcggcaattggcccatacgtacaagcggttgatttaggcaatcttgttttaacctcagggcaaattccggttaatccgcaaacaggcgaaatcccaactgatatcactcaacaagctcgccaatcattagaaaatgttaaagcgattatcgagcaagcaggtttaagcgtagcggatatcgtaaaaacaacggtttttgtgaaagacttaaatgattttgcaacagtgaatgcagagtatgaagcatttttccgtgaaaataatcatccgtcatttccggctcgctcatgtgttgaagtcgctcgtttaccaaaagatgtcggtttagagattgaagcgattgcagtacgcaaataagcggtcatttttagagaaaattttgcaatgaaaaacattacgccaaattggcatgcgcctgagcatattcgtgcctttactaccgtcagaataggcggcgtcagccaagtaccttttgatagctttaatttaggtgatcatgtcggcgataatcctaaggatgtacaacaaaatcgccagttattggtagagcagttcggtttaccgcattttccactctttttaacgcaaacacacagcactcgtgtgattcgcctaccgtatgacggcgataatttggaagcagatgcggtttataccgatcaaccgaatcaggtttgcttagtgatgacggcagattgtttgccggttcttttctatagtaaagatggaaaagaagtggcggcggctcatgccggatggcgaggtttatgcgatggcgtattagaaaatacggttgctaaattcgcttgttcgccggcggagatttgtgcatggctaggaccagcgattggtccaactaaattccaagtcggtaaagaagtgattgagcagttctgtgcttttgatccgcaagccgagctggcatttattgcggacccgacaacaagcggtaaatttttaggaaatctttaccaaattgctcgacagcgattgaataaacttggtattaccgaaatttccggtggagagcattgtacttttactgaacaagaacgctttttctcttatcgaagagataagcagactggacgtatggcaagcctgatttggcgttctgaataaagcacaatttatagcgagtatgttttttatgcgggtgttcgcctaacgctagacgaacacccaaaatttccctataatccaacctcatttcttaatccccccttagctcagtcggttagagcaggcgactcataatcgcttggtcactggttcaagtccggtaggggggaccaacttcacttttccactctttcgttttctttcgtactcttacactcaagccttgatattactagctttatcgtactttttcattattttttcttacgtattctttcgcattcattcgtttacagccgtgaattttagttatacatttagttatacggagcatataactaaaaaaatcgtataactaaaagggctaaaatggcgagattaactaaaccacttactaataccgaaatagagcgagccaaagctaaagagaaggagtatacactttctgatggtggcggactttatctacttatcaaatctaacggcgctaagttatggcgctttaactactataaaccgcttactaagaaaagagccttaataagttttggccgctatcctgatatatcactacaacaggcgagaaaacagcgagatgaatgtttatctctattagcggtaaatactgatccactggaacaccgccaacagatggaaagagaagagcaagccaagctagaaaataccttgttgaaaatagttgagctatggcatagcaaacgcctcgatgatgtaaagcacggggagattcaagcagaaactctacggaaaaacagggcaatcttagacaagcatattttgccaatgttaggtcatttagcgataacagagattagcccaagaattgtagtcagtgcgctagagccagctaaagaaagaggtttaggcgatactctcaagcgtgctattcgattattgaatgaagtgttaaatttctcagtaaatgcagatttgattgagtttaataaatgcctgaaagtaagcgatcatttcagtacgcctaaagccgtgaataacccaaccattccgccaaaagaattacctgcgtttttagaagccctgagggatagcaatttgtccttacaaacgaagttattgattaagtggcagttgctcacaattacccgcccaaaagaagcctgcgaagcgttatggcgcgaaattgattgggaagctaaaacctggacgttacccgctgaaaaaatgaagatgaagcgcccgcacgtaattcccttaagtaaccaatcattgcgcatacttgaaaagatgaaaaagattacaggtaacagccctttcatatttcaaagtgagataaagcccaagcaaccaatgaatagccaaacagcaaatcgagcaatcaaactactaggctatgaagggcgtttaactgctcacggtttaaggtcgatagcttctacttacttgaatgaacaattagtcaattatgacgtggtagaggcttgccttgctcacgttatcaaagaccaaaccagaaaggcttacaaccgttctgattatctcgatcaacgagtagaagtaatgcaacaatgggcggattatgttgagaagtgttctattgggatttagtagagcattttcagaacatgggggaattaacgatttttacctatactgtataaatttattccctcctctctattaggaagcatatttttaatagtccaatagtccaaaacaccctttttaaggtatgaaatcattatatatcaataagttagatgtaaaattattggactatcattggactaaaatcaccatttttggactaaaataccccctttttggactatttattgaaaatttagtacggcaaataggatacttttaaggcgaattatattttacaaactcaaatgaatacggaataatgcgtaaaacaacgcaattttaaaaaattgaggtattaaaatgaaaatgccaaaaccaccagcttatgacgagttactccaagcaccagtaaaccataatgactttttcaattacttagctgaatttaaagcgacggatgagaaagggcggtatcttgcgtgggataagttcaagcgggtaaatcctaatgatagtttgcaaaaatggctggcggtaaagatgaaccgcaaaacattacagaaaacacttaagataggcgatatttcttttgctttttgtgtacctgatagcttacaggcgacactacatttcattgataaatcaactggcggaagtgttggcgtgagtagcctcgagggcttaagtaagcaagaacaggggcgttttttgttgaaatctttagtgatggaagaagcgataacctcagcacagctagaaggggcggtaacaactcgaaaagtagctaaggaaatgttagaaacggcaagaaagccaagaacaaaagacgaaatgatgatagtaaataactattatctgatgcaagaagccatagctcgtaaagatgaaccgcttagcattgaattgattcttgagcttcatcgtattgcaacgcacaacgccattgaaaataaagccgtagcgggagagtttaggcaagatgatgaaatttatatcgctgatgaatacggagataaaatccatcaaccgccaacgcataccgagctaaatcatttaatgacagctttttgtgattttgccaatgatgaacatacgggaga

SEQ ID NO: 3181 - DNA, 23144 bp, synthetic construct
  misc_feature 1..23144: note = Synthetic
  source 1..23144: mol_type = other DNA
taatattgctccgttttgattgatcgccataatattgccgtaagggacatttagatcagactgctgagtggcttttaaatattcaagattaatttcaaactcacttttgcctgtaaaaaaggcttctttagctgcttgatgtcctttcaacgctgaaaattgagcttggtaaatactctcgatctcaaattcagttttaatcgaacgctcaaaattaagaatattcaggattttttgcggattaatttggctaaagccaaatgaatttgcaagcagactatcctctccaataaaagcacaagcggtcggattttggataaattttgcaatttcagtttcagacttaagtaaaacccattcaaattcagtggcaaaaaaagcttccgtcggtatttttggagtagaaacccaataatcttcaggggcataaaagtaaattgttggcttatttttaccatctaggaataaccagcaattttcagcttggggataagggaaaaagtaattaaaataagggttaattttaaatggtgcagtttgatcgtctaaaaacaatgttcttgctttgcccgaataaatccacaagccatctaaaaaggttttctcgagtaagtcttgtacgacattttgcaagcgagagagatgtttagaaaataatgttttcataaggaatagaatgaataagttaattgtaaatagagaattagataccttagggctacgctgcccggagccggtaatgctgacccgtaaaacaatccgcacaatggaagatggcgaggttctacatattattgccgacgaccctgcaactactcgcgatattccgagtttttgcgaatttatggatcatcagcttcttcaaaaagagatttcttcctcgccatatcactattggataaaaaaaggattatcctaaatgcaagacaagcggtgaaattatgcaaaaaatttacataaatccaccgcttgtatttttaatgacgagttggttcgtcatcaaaatcatcgtcttcgtcgaagaactcgccatcatcaccgtactcatcgtcatcagcatttggatcttcaaagtaagttccccaaccttcatattcagcacccgctttttcaattaaaggcagtaattctttctgttgtgccgtaatgagatctgcatttaagttaatttcactcacgatatcacacacaaaaatgactttgccattttcttcttccacttcttccgcttcagaaatttcatagccaagtttataagcatcaaccactaatttctctaatttatcaaagtctcgatgtgcaacgtgatgctcaataatataaagtgcatcaggatctgaaccgtcttttaataaattttcaataatttcatcggtttcagctcgtaattcttctaaattgtacatactcaattcctcatttattctgcttcaaaaataggggcaaaccagctatctaatttagctgagagcttatccacgccaattttatttaatgccgagtaagcctcaacttgaatatcgccttgaaaaggcaaaattgcctctcgcaccattttcacttgtttagagcgagctgattgacttaatttatccgctttggtcaatagtaataaaacgggtaaatctgctgaaactgcccattcaatcatctgttgatcaagatcttttaatggatgtcgaatatccattaaaaccactacaccacctaagcattctcgtttttgtaagtattcacccaatgccttttgccattgaattttcatttgttctggaacagctgcataaccgtagcccggcaaatccaccaacttacaattcggttctacttcaaataagttgattaattgggttcgacccggcgttttagaggtacgagctaaacttttttgattcgttaaagcatttaatgccgttgatttgcccgcattagaacggccggcaaacgcaatttccacacctgtatcttccggtaagtggcgaatatcaggagcggaggttaaaaaatgggttttatgataatttaatttcattttattctcttaatttaaatgataagcctcgctcaccgtactggtttggatttgggtttcctttaaaaataccccattctaagaagaggatcatcgcaataaaggcaggcattacattgccaagtaatactttcattataccttgagtatagcctgatgccagatagcaaataatcggcactaataccattaacagggctttacctgagcggtctctatcgtgcaaacgtttcacaataatcgcagataggctaaatactgaaacccataacggtaaaaaactaaaaaaagttaaattagccaaatctgccagaaaaatagcgactatcaatagaaaaacaaagttaatcaaaaagcctgtccaaaagccttgtctgtttaatctacctttaaaaccaaaaagtgcattataccaaatcataccttaccctaaagcaacatctaatatcatcattaccacaaagcctagcattaaacttaaggttgcaatatcggtattaccattgctttgtgattcaggaattagctcttctactaccacgaaaatcatcgctccagcggcaaaagcaagagcataaggtagaattgccgtcatcgaaagcacaaaaatcgcaccaataaccgctgcaataggttcaactgccgcagacatagctccataccaaaaggctttttttctactatgcccctcagccctaattggaagagcaagagaagaaccctcaggtatattctgtaaaccaatacctattgctaagccaatcgctcccataatagaagcatctacactcgccatttggcttgctaaagctccaaaagttacaccaatagccaacccttctggaatattatggatcgtaatggctaaaaacagtaaagtagtttttgacaacccttttgtaagctgcttatttccttctgcttgctcaataggcttactaaggtgtaaatgtggaacgatatagtcaattagtctgatgaaagcaccaccagcaagaaagccaatcgctgccggcagccaagctagctcaccataatcagcttcggcataatctaaagaaggtgaaagcaaagaccaaaatgaagctgcaatcatcacaccggcagcaaagcccatcatactgtccaataattttcgatttaccgatctaaaaaaatagacaaatgatgagcctaaaattgtacatccccaagtaaataacccggctaaaaatgcctgccatacaggagaaagcgaaaggaaatattcaaacaaagcaaattagccataaaaaatcaatatgtatttattctatcaaatattcagatctattaatatagcgtaaatatagctatgatgatgattctatttgtaaaatttaataaaaaaccccaagtattctttaccttggggcttggggttcgttcttaatctttttgcttctttaagaagctcactaaatcgaatttgagataggttacttaaacattttcaacaggctcgctaaaccacctaatctagataaagaaaatattttctgaactgttataaatcgcttttcgcaattccacttgttcatttctttaaatgatatatcgatatcattaaatgccataaatatttctatggaatcatcatatccattacttacgagataattcataccatcacgagtaaatgcaataagacctcgtttaacaattctcacattttcataatctgcttcttctaaaatagacactaattgtctatccgtaaattcatcaaaaacttcttcataagaactactcatagatacctccaccatttttatctctagtcagatttagcgataattgatctctcatttgagcatctacatctattttataactaagttggtcacttggatcagttaaatcatattggtatttatttcctatattatcggtataaaaccatttaccattttcaaatttcattatcagcattattgggttcctatataaaaaccatattaactaaacaaaatatctcattattttgtcagtactttatttgttctacttgcatagcaagtagaacaatgggattatcccattggctgtctaatttttatcccatcttcattttgcaaatttcagttataaaaaaaccgcttgctacctcatttcaggcaacaaacggttattttttcctgctctttaaaataataaaaacccctaagtatctctacttaggggctcttctctctatctatcttctcttatgtattcggtaaaacccgatgatgctctactctcacatggcgaaacaccacactaccatcgacgttactgcgttttacttctgagttcggaatggtgtcaggtagaaccacagcactatggtcatcgggataattcagttaaaatctaaaaacaagctgctactttgagtattcttctctttgtttgtcttttcttcattcgtcttttttgtttagtctttactttacttcgccttgtgtcttcttgtttctctataaaaacacttgagcgttgtatagttaagcctctcgggcaattagtatgggttagctcaacgtctcgcaacgcttacacaccccacctatctacgtcgtagtctccaacaacccttacagacttatagtctgggagaactcatctcttggcaagtttcgtgcttagatgctttcagcacttatctcttccgcacatagctactcggcaatgcgtctggcgacacaaccgaaacaccagcggtgcgtccactccggtcctctcgtactaggagcagccccaaccaattctccaacgcccacggcagatagggaccgaactgtctcacgacgttctaaacccagctcgcgtaccactttaaatggcgaacagccatacccttgggacctacttcagccccaggatgtgatgagccgacatcgaggtgccaaacaccgccgtcgatatgaactcttgggcggtatcagcctgttatccccggagtaccttttatccgttgagcgatggcccttccattcagaaccaccggatcactatgacctgctttcgcacctgctcgacttgtctgtctcgcagttaagcttgcttctaccattgcactaacctcacgatgtccgaccgtgattagcaaaccttcgtgctcctccgttactctttgggaggagaccgccccagtcaaactacccaccagacactgtccgagtactcgttccgagtacttcgttagaacatcaaacgttaaagggtggtatttcaaggacgcctccacaatcactggcgtgactgcttcaaaggctcccacctatcctacacatcaaaattcaatgttcagtgtcaagctatagtaaaggttcacggggtctttccgtctagccgcgggtacaccgcatcttcacggcgatttcaatttcactgagtctcgggtggagacagcctggccatcattatgccattcgtgcaggtcggaacttacccgacaaggaatttcgctaccttaggaccgttatagttacggccgccgtttactggggcttcgatcaggagcttctctttcgataacaccatcaattaaccttccagcaccgggcaggcatcacaccctatacgtccactttcgtgtttgcagagtgctgtgtttttaataaacagttgcagccagctggtatcttcgaccggttcaaccttcatccgcaagggactacaatctacgccggcgcaccttctcccgaagttacggtgctattttgcctagttccttcacccgagttctctcaagcgcctgagtattctctacctgaccacctgtgtcggtttatagtacggtttagataaacctgaagcttagtggcttttcctggaagcgtggtatcggttacttcagcaccgtagtgcctcgtcatcatctctcggtgttaagaatgtccggatttgcctaaacattccacctaccaacttaaacagggatatccaacaccctgataacctaaccttctccgtccccacatcgcagtttatccaagtacgggaatattaacccgtttcccatcgactacgcttttcagcctcgccttaggggccgactcaccctgccccgattaacgttggacaggaacccttggtcttccggcgaacgagtttttcactcgttttgtcgttacttatgtcagcattcgcacttctgatacgtccaccggacttctcaatccagcttcttccgcttacagaacgctcccctacccaacagtgttaccactgatgccgcagcttcggtgactagttttagccccgttacatcttccgcgcaggccgactcgactagtgagctattacgctttctttaaatgatggctgcttctaagccaacatcctagctgtctaagccttcccacttcgtttcccacttaactagtactttgggaccttagctggcggtctgggttgtttccctctccacgatggacgttagcacccaccgtgtgtctcctgagtatcactcttcggtattcgcagtttgcatcgggttggtaatccgggatggacccctagccgaaacagtgctctacccccgaaggtgtccgctcaaggctctacctaaatagatttcggggagaaccagctatctcccggtttgattggcctttcacccccagccacaagtcatccgctaatttttcaacattagtcggttcggtcctccaattagtgttacccaatcttcaacctgcccatggctagatcaccgggtttcgggtctataccttgcaactacacgcccagttaagactcggtttcccttcggctcccttattcagttaaccttgctacaaaatataagtcgctgacccattatacaaaaggtacgcagtcacagaattaatctgctcccactgcttgtacgcacaaggtttcaggttctatttcactcccctcgccggggttcttttcgcctttccttcacagtactggttcactatcggtcaatcaggagtatttagccttggaggatggtccccccatcttcaaacaggatatcacgtgtcccgccctacttgttgttagcctagtaccacaataaatacttcggatacgggattatcaccctctacgattgagcttcccagctcattctcctgtatttactgctatcactaactggctctttcgcgttcgctcgccgctactaacgaaatctcggttgatttcttttcctcggggtacttagatgtttcagttctcccggtttgcctcattatcctatgtattcagataatgatagtagattcttcatctactgggtttccccattcggatatcttggattaaacgcttcttatcaactcatccaagcttttcgcagattagcacgtccttcttcgcctctgattgccaaggcatccaccttgtgcgcttagtcacttaactatacaacctcaaatgttttctgttatttcaatccagagaaagaaaaaacaaaacacttaaagttagtttttaaactaaacacttagctgcttttgttcagctaagatttttgaactactcagactttctttcgaaaatctctcagtttttcagcttgtttctaaatttttaaagaacattaagacaataaaaatcatctttaaatggcgtccccacggggattcgaaccccggttaccgccgtgaaagggcgatgtcctaggcctctagacgatggggacaacatttaaagatgctttccacttttccattttgggttaaacattttagcgacatttgcaaaatcttgcaagattttaaccgcttgaatgtctaaatctcattcatcttgtcctactgctttatcaaacaatctgtgtgaacacttgctgtcgtttctgctccacttcgctctcgcttagcttcgcccttgatttttggtaaggaggtgatccaaccgcaggttcccctacggttaccttgttacgacttcaccccagtcatgaatcataccgtggtaaacgcccccccgaaggttaagctatctacttctggtacaacccactcccatggtgtgacgggcggtgtgtacaaggcccgggaacgtattcaccgcaacattctgatttgcgattactagcgattccgacttcatggagtcgagttgcagactccaatccggacttagacgtactttgtgagattcgctcaccatcgctgggtcgctgccctctgtatacgccattgtagcacgtgtgtagccctactcgtaagggccatgatgacttgacgtcatccccaccttcctccggtttatcaccggcagtctcctttgagttcccgacctaatcgctggcaacaaaggataagggttgcgctcgttgcgggacttaacccaacatttcacaacacgagctgacgacagccatgcagcacctgtctctaagttcccgaaggcacaaactcatctctgagttcttcttaggatgtcaagagtaggtaaggttcttcgcgttgcatcgaattaaaccacatgctccaccgcttgtgcgggcccccgtcaattcatttgagttttaaccttgcggccgtactccccaggcggtcgatttatcacgttagctacgggcaccaagctcaaagcccaatccccaaatcgacagcgtttacggcgtggactaccagggtatctaatcctgtttgctccccacgctttcgcacatgagcgtcagtacattcccaaggggctgccttcgccttcggtattcctccacatctctacgcatttcaccgctacacgtggaattctacccctccctaaagtactctagactcccagtctgaaatgcaattcccaggttaagcccggggctttcacatcccacttaaaagtccgcctgcgtgccctttacgcccagttattccgattaacgctcgcaccccccgtattaccgcggctgctggcacggagttagccggtgcttcttctgtagttaacgtcaattgattgctctattaaaacaatcaccttcctcgctaccgaaagaactttacaacccgaaggccttcttcattcacgcggcatggctgcatcagggttccccccattgtgcaatattccccactgctgcctcccgtaggagtctggaccgtgtctcagttccagtgtggctggtcatcctctcagaccagctagagatcgtcggcttggtgagcctttaccccaccaactacctaatctcacttgggctcatcttatggcaggtggcccgaaagtcccaccctttagtccttagacattacgcggtattagctaccgtttccagtagttatccccctccataagccagattcccaagcattactcacccgtccgccactcgtcacccaaggagcaagctcctctgtgctaccgttcgacttgcatgtgttaagcctgccgccagcgttcaatctgagccatgatcaaactcttcaattcaaaaagtttaatcgctcaatatgtactgacataaaatcgcactttcaaacttagctcaacttaaaaaagttcagttaaaagaaagtaatgaatttctagttaagcacctattaagacttcaaaattaaaaaaatagttttaaatcaagtctatcaacaagtgcccacacagattgtctgataaattgttaaagaacaaaaaagaacgacgcactgaatattaacttaactgttcacaacagtgcgtcgttgtgtgcggtgcattatagagaaatattaaatctacgcaagtgttttttgcaaaaaattttaaattttttaccgcttgttgaatttacaatcatattgaaaataatttcatcaaatatcgctttctattacatcaataaaaatgatgccccttaataccaaagtatcaaggggcagagcattacggtaattctttcgaattccttattgtagcaacgtttctcatttcgcagtactacacggcatattctaactgttgtataatttttgtcaaatctatttgataggagaaacgcagatgaaacagcttcactatattcttggtcttgatttaggcattgcttccattggctgggcaatagtagaaattgatgaagatggctttccgattcggttgattgatgtcggtgtacgtacctttgataaggcagaagttgccaaaaccggtgaatcactcgcccttgcccgtcgtcttgcccgttcaacccgccgtttaatccgtcgccgagcctttcgcctattaaaagggaaacgtctattaaaacaatataatatcattagtaaagaagaacttgctaaattgcctattgattgctgggcattacgagtgaaaagcttagatgaacgtctttcaccccgagagtggtccgccgtcttacttcatctgttaaaacatcgtggctatctttctcaacgtaaaaatgaagcgaaaagtgcggataaagaaatgggtgcattgctttctggtgtgaaggacaaccatcaattattgattgaaaaccaattccgcacaccggcagaaattgcggtgaaaaaatttgctcttgaagagggacatatccgcaatcagcgaggggcgtatacgcatactttcgaccgtaaggatctactcgctgaaatgcaactactcttccaaacccagcgagaactcggaaacccacatacaagcggtcaattagagcaggaattttgcaatttgctaatgtggcaaaaaccggcgttatcaggcgatgcgattttgaaaatgctcggcaaatgtacctttgaaaccaacaaatataaagccgccaaacacagctacacagcggaacgttttgtgtggctgaccaaactcaataatttacggattttggaaaacggctcggaacgtgccctaaatctagaagaacggacgttgttgctcaatcagccttatgaaaaagccaaactcacctacacccaagtgcgtaaattattgggtttatcggaagaggctcgtttcaatggtgtgcgttacggcaaagagaaagccgaagatgccacactgatcgagctgaaagcctaccacgctattcgtaaagcggtggaaaaggcggataaatcagcgtgggaaaccttgaaaaatcagaccgcacttttagacgaaatcggcacgacattctctatttacaaaaccgataacgacatcactgaacaactcaacggaaaattgtctgagacagtgctaaacgctctgctggaaaacctcaacttcgatcaattcattcaactttccttaaaaagcctctacaagattgtgccgttgatggaacaaggattgcgttatgacgaggcgtgccaacagatttacggcgaccattttggtaaaaaatcaggggaaattaaccgcttgctacctccaattcctgctgatgaaatccgcaatccggtggtattgcgttcactcagccaagccagaaaagtgattaatgccgtgatccgcctttacggctcaccggctcgtattcatattgaaaccgcacgagaactgggaaaatcctataaagatcgcaaagaaattgaaaaacggcaagagcaaaaccgtaccgaacgagaaaaagcgatactttcgttcaaagaacgcttcccccatattttggcagaacccaaagctaaagatattttggcattacgtctttacgatcaacaaaacggacaatgcctatatagcggaaaagcactggatttacaccgtttgttagaaaaaggctatgtagaaatcgaccacgccctgccgttttcccgtacttgggacgatagtcaaaataacaaagtattggtgcttgctggcgaaaatcagaataaaggcaatcaaacgccatttgagtggttgagcaaagatgaacagcggtgggcgttatttattgctcgggtcaatggttgccgttttccgtatgcgaaaaaacagcgaattttaacccaaaaattagatgagcaaggctttattgaacgcaacttaaatgacacacgctatattgcccgtttcttagtgaattttgtgcgtgataacttgcatttaaccggcaaaggaaaaaatcgggtgtttgcctcaaacggtcaaatcaccgctttcttacgtgggcgttggggcttaaccaaagtgcgagaagagagcgaccgccaccacgcccttgatgcagttgtggttgcctgctctaccgtggcaatgcaacagaagattacccgttttgtgaaataccaagagggtaatcttaaaacggctgaacgaattgattatgaaaccggcgaaattattccgttgcatttccctgaaccgtggcatttcttccgccaagaggtgatgatccgcattttcagtgaaaatccacaagaagatctgattatccaactgccggatcgccctgaggcaaaccacgaatttgtacaaccgctgtttgtatcccgtatgccaacccgcaaaatgagtggaccagggcatatggagacgattaaatctgctaaacgcttagctgaaggggtgagtgtctccaaagtgccactcactcagctcaaattaaaagatctggaaaatatggtcaatcgtgaacgggaaaaagatctttatgaggcattaaaagcccgtttaactgagtttaaagacgatccttccaaagcttttaccgagccgttctataaaaacggcggacaacaggtgaaagccgtgagggtcgaacaagtacaaaaatcaggcgtagtggtgcgtaatggcaatggcgtagccgacaacgcctcaatggtgcgggttgatgtgtttattaaaggcggaaaatacttccttgtgccgatttatacttggcaagtggcgaaagggattttgccgaatagagcggttattcaaggtaaacacgaagatgaatgggaaattatggatgaaacagcccaatttctattctcgatgttcccgaatgatttaatccaagtcaaaacgaagaaagaaacattctttggttattacaatggattagatcgtgcaacaggtgcaattaacctcaaagaacccgatagtaatatcaacaaaggtaagtcgggcttacatcgtggcattggagtaaaaaccgctctttcctttgaaaaataccaagtcgatgaactcggtaaaaatatccgcccttgtcgcccaagcaaacgacaaggtgttcgctaatccaatccctgccccgttctgcggtgcagggatttttttataggagataaaaacaatgagctggcgaagtattttaatcagcaaaggcggaaaattatcccttcgccaaaatcaaatggtgatttggcaagaagagcaggaatttagtgtgccattggaagatattgccgtgattgtaatcgaacatcgggaaaccgtgatcaccacgcccttactttctgcccttgcccttaacggcataaccctactgacctgcgatgagcaatttatcccgtgcggacagtggttgccgtttggacaatatcaccgccaactgaaaaccttaaaactgcaactggaaatgagccaaccgctgaaaaaacagctttggcaggtaattgtacagcagaaaatccgcaaccaagccttcgttttgagccaaaccaagcggtcagatatcgccgaaaaattgcaaaatatggcaaaacgggtcaaatccggtgacaaagaaaacctagaagcccaagccgcccttctctacttccaaaccgctttcggtaaaaatttccgccgttggcaagaaaatgcgatcaatgcccatctcaactatgcctacaccgttctacgttcagcagtagcacgctcgctagtgctctacggctggttgcctaccttgggcatttttcaccatagcgaactcaacccattcaacctagccgatgattttatcgaaccgtttcgaccactggtggacttacaagtgtgggacctgtggcgacaagagaaattaagcgacaacctaaaccctcacaccaaacagaaattagtcggactgttacattatcaattgcatttccaagaccaaacattcagcactctggcggcaattgaccgcacggttggctcattccaagccgctatatcccaacgagatccgagtttgttgaaactgcccgaaattctgccgtcaaaggaacatcattatgagtgaggcaacatttatgcgaattattgttttctttgacctaccggttaccaccaaagccaaacgcaaagccgccaaccaatttaggcaatttttgctaaaagacggctatcaaatgctgcaactttcagtttatacacggatcgtacgaggtcgggattcactcgaaaaacataacaaacgcctaacccagcatttaccggaagaaggctcagtacgttgcttggaagtaaccgaaaagcaatttacttcaatgttattgctcgtcggcgaattaaagccacaggaggaaaaagtcaatgcaaaccaaatgctactcttttagcaaaaatacagactagaaatttttttatgccacatcgttaattttggtttaattgctacatttttaatcaaaacacaataccaagatagttatttttatcccttttcagcaaaaagcaagcggttatttttctaaaaaaatctgcaaaatttgcaaaaaatttcaggaaaataaccgcttacaaacgactttttactcaattttttatcgagctattcctagcaaaacccttgataaataaggctctgagcgaggtctattgtagcactgcgaaatgagaaagggagctacaacaaataataatctttattacttactgtcatcattgtagcactgcgaaatgagaaagggagctacaactgggagttgcaatgggggcaaatgcggttaattgtagcactgcgaaatgagaaagggagctacaacaccacccgccctcgtaatatcgcattccaaattgtagcactgcgaaatgagaaagggagctacaacagtagaattggtagaaagtgagagcggtttattgtagcactgcgaaatgagaaagggagctacaaccgtggcgaccgtttttagctggtaagataaattgtagcactgcgaaatgagaaagggagctacaacaccaactctttgctgattggcatttggttaattgtagcactgcgaaataataaatacttacctcaaacactaaatcagataaaataaacattcgcaattttctttcacaagcggtagaattttatccaacttttaccaattaaggagtagattatggaacattttatcggtttaggtgtagctggtaattttgcggggcacttggagcaagctggtgaggctgcggattttatgaaagtcaaaacggctgaagctattcaaccaaaagcaatttttccattttatgtgcctgcggaaaatttaggggattaccaattcttatccacttatccgctttcaaataccgcgattaattttcctgaagatgcagataatctacaaattgaacctgaagtagcgttgatttgtgctattggctatcaagataatcacgttgtttcccttactccaacccattttgccgcttataatgactgttctattcgccgtccgaatgcaaacaaaatctgtgaaaagaaaaactggggggcttcgtctaaagggctttctgccactttgcttgaattagataattttaacgaagggagcacattagataattataatatcgcttgttttcataaacgtaatggcgagttgaatacttatggtattgatagtcctgccgcggaatacagctacttccatcaaaaattattagattggattgtggatagaatgaataatcagccggacgaaggtccgatgaataatattgctgaaatgttaaaacaggcaaattatccaaccaaagcgattattagcattggggcaacacgttataccccttttggcgaaaccaatttcttacaggttggcgatgtgagtatagtcgtggtttacaatgcgaaaaaatattctcacagtcaaattgaagaaatggcgaagttagaaacctttagcgaagatatttctgccttaattcaaacagttcgttaattacaagcggtcttttttgaagcaaattttgcgatctgcatcgaaaatttgaatttcttttctgacgctttccttcctttactttatagtgccttcaaccgttggaggcactatgaaaaaatttctctttttattactactctgcccttctctttttgccaaatcacccgatttaatgttacttgggcaatataaagatcaagatattaccggctgggtaatgagcgagaagcttgatggcgtaaggggcttttggaacggtaagcaactgattagccgtcaaggctatccgcttaatccgccagattattttataaaagattttcccccttttgccattgatggcgaactgtttagcgaacgaggaaaatttgaggaaatttcctctatcgtccgttctgttgagcctaaaggttggcataaactcaaattacaggtttttgatgtgccttatgccaaaggtaatttgtttgaacggctaaattcattaaagcaatatattgctcagcaccgctctccacatattgagatcattgaacaaataccaattcaggataaaacccatcttaataccttttatcaggctattatagtaaaaggcggagaaggtgtggttgtacgtaacccgaatgctgaatatattcaagggcgatcagcacaaattctaaaaattaaacccgttttagatgaagagtgtactgttattgctcatcacaaaggtaaaggaaaatatgctcacaaattaggggcgattacttgtgaaaaccagcgaggtcgatttcgtattggctcaggttttaaagataaagatcgagaaaatccgccgccgattggttcaactattacttataaatatcgaggattaacagaaagtggaaaaccaagatttgcaaccttttggcgaataagaaacgagaacacttctaaaaaataagagctatctcacattttcaacaaaataaaattgacagattaaatgtatcggcgtaaaaagttgttacctttttttaacaatctgtgaacaattttatgctaactattcatcataccagtgaacatagtttgctctgcttagcagttccacctgccgaactttctaaacaacaacaaatctgggcagtggctgagcaagcaagagcacaagaaaatgtagtagaagtggtagtaggaatgaataatttcactatattccacaacttattagcgaattcaaacactctcatttcgactattcagcaactgtggcaaaattatcaagctcaagtaagtcaagcacctcgcttaattgaaatccctgttcattacggtggagaatttggcgaagatctgtttgaagtggcaaaattccacaataccactgccgaagagattatccgccgtcataccgaaccaacctacaccgtgtttatgattggtttccaaccaggctttccttatctcaatggcttacctgaaaatcttcatacgcctcgacgtgatgtgccgagaacgaaagtaccagcgggttccgttggtattggtggtagccaaacaggtatttacccttttacttcacccggcggctggcaactactcggacgcaccgagctacctctatttaacattcagcacaatccgccaacactactttcggctggcgataatgttcgatttgtcgcggagagcattaccctatgatttatattgaaaaagtacaaggctttgcccacattcaggatttagggcgctacggttatcgtcatttaggggtaagccacgggggagcaatggatactcttgctcttcaagcgggtaatttattgttaaaaaatgcaaacaatgccccagcccttgaaataaccgcaggtgggctaacgctaactttcgattgcaacaccccattctgttttaccggtgctttggtagaagccgaattagatggaataccggtcttttcctactttcgctatactgcaaaagctcgccagaccttaacgctaaaacggattgcaacaggcaattatgcttacttatgtgtttcaggcggtttccttgtaccacaggtgctaggttcagcaagtaccgacttaaaagcccaattcggtggttttcaaggcagaatgttaaaagcaggcgataacttacccaccggtttaagagatacccaactctcaatgctcgctattgaaccgattgatttcacttcccgaattagagcaacagcttccagcgaatatgaagcctttaccgcagacagtcgtgaacgcttttggcatcaaggttggaagctacaagcgaacagcaaccgtatgggctaccgctttgcagaaaaagcgttgaaattaacaacttccctggaaatgctctcatatgctgccccaagtggcacggttcaagttcctcctgacggacagccgattgtactattggcggacgctcaaacgacgggaggctaccccaaaattgcttgtattatccaagccgatctagggagacttgcccaaaatccgtttggttcagcagtgcaatttgagcaagttagccgtgaacaagcagtcaaaatttatcaaagagatcaagattatttagatagtatccggagaaaagtaaatgaagcacgttgatttaaatgtggatttagccgaaggctgtggcaatgatcatcgcctgttacaactggttacctcagccaatgtctgttgcggtttacacgcaggcgattacaacgaaatacgtaaagctattttatgggcaaaagaaaacggagtacgagttggagctcaccccggttttcccgatagagaaaattttggacgtaccaatatgcaactgtctgatgatgagctcaaagcgtgcctactctaccaactcggtgcaattaaagccttatgtgataccgaaaatgtagcgatggattatgtgaaaccacacggagctttatacaatatggcagcaaaagatcctcacttagccggattgattgctcaaacggtgaaacagttcgaccctgctcttaaattaatgggcttatcgggtagtttaatgctcactgttgctgaacaacaggggttacacactatttccgaagtattcgccgatcgccactatttagctgacggctcacttgtgccacgcacccgtgatgatgctatggtagaaagcgatgatgaagcgatcagccaagtattacaaatggtattagaaggcacagtaccaactgttgatggtagcaatgtagagataaaagcagatagcatttgcctacatggcgatggtgaacacgcagtagaatttgcagaacggattagaagggaactagaagtgaaaggaatctcagttaaggcataactgtaatcagctgccatctcagcactgtttacccctactaggtctattacaagcggtcaaatttcactaaaaaatacccatttttgatcaaatccaaaaacaacaaaaaggaactaatacaatgtccaaaaacaataatcgcagtgctttacttggagcagcattcttaatggcgacttccgccattggacccggatttttaacccaaacggcaacatttacccaaacccttcttgccagtttcggttttgtgatcttactctcaatcctgcttgatatcggtgcacaactgaatatttggcgaattgttgcggtatctgaaaagaaagcccaagacatcgccaatgcagtattaccgggtgcgggttattttcttgccctattaattgtaatgggcggtttagcctttaatatcgggaatgtcggtggtgcaggcttaggtttaaatattctaaccggtctttcgcctgaaatgggggcgattatcagcggtgcaatcgcggttgggatcttcctgttccgtgaagccggtaaagtaatggatagatttgctcaaattatgggctttgtgatgattgccttaacgatctttgttgcaattaaagctaatccacctattggcgatgctgtggttcatacttttgtaccagaaaaacttgatgtcattgcgattgtaactcttgtaggcggtacagttggtggctacattacctttgcaggtgctcatcgtttacttgatgcaggcattaaaggtaaagaaaatctcaaagaagtgagcaaaagctccgtatcagccattctaattgcttcaattatgcgagttgtgttgttcttagcagtacttggagtggtgtcaatgggtgttcagctcgatccgaaaaaccctgcttcaaccccatttgcccacgttgccggcaatgttggcttaatgatcttcggtgtagtaatttgggcggcttcaattacctccgttatcggtgcggcttatacatccgtttctttcatcacttcattttcaccatttatcgaaaaacataaaaattgctttatcgtcgcctttattgtgatctcaactgcggtattagcaacaattggacgtcctgcacaagtactggtttttgtcggtacgctgaacggcttaattctgccaatttcacttggtttaatcttacttgcagcacataaaactaaaattgtgggcgactacaaacaccctgtgtggatgaccatttcaggagctattgtggtcgtttcaatggcaatattaagtgcaatgacactctccaaatatatttcagggttgatggcttaatcattaaattttaacaagcggtcagatttcaacaactttttgcaagtagaatcgcaaaaggtttacaaaatctgaccgcttgctatttaagtttgtgatctatcacaaatttttatactaaatcatttgaaattaagccggaatttttctacatttcatatatcacttttattattaaggataactctatgacaaacgcagaactatttggcgaaggggtaaatctgatgtttgcaggaatgggttttgtgctcctgttcttattcttacttatttatgccatcagttttatttctacgctcatcaaccgatatttcccagaaccaatctctgttccaacacaaaaattgccaatctcacagactcaagatgatttagaacgtttacgtcctgtcattgtagcggcaattgctcatcatcgtagaattaacaaacaaaattagtacaaattatagtttagaaggaatttaatatgaaaactcaaccgaaaaaaattgcgattactgatgtggtcttgcgtgatgctcatcaatctttatttgccacccgtttacgtttagatgatatgttaccgattgcggctgagctagataaaatcggctattggtcgttggaaacttggggaggagcaacttttgatagctgtattcgttttttaggtgaagatccttgggtgcgtttgcgtgagctgaaaaaagcgatgccaaaaacgccaatgcaaatgctgctacgaggtcagaatttacttggttatcgccattatgctgatgatgtggtagataaatttgttgagcgttcagtggctaacggaatgagcgtattccgagtgttcgatgcgttaaacgatcctcgcaatatgcaagcggcactgcaagcggtgaaaaaacacggtggacacgcacagggtacattaagttataccacaagcccggttcacaccttagaaacttggttagatgtaacagaacaattattagaaattggtgtggattctttagtcatcaaagatatgtcgggtattttaactccaatggcagcttacgaattagtgagcgaaattaaaaaacgctatgatgtggaacttcacttacattgccactccaccaccggtatggctgaaatggcgttattgaaagcaattgaggcaggtgttgatggcgtagatacctcgatttcttcaatgtctggcacttacgggcacccggctaccgaatctattatcgcaaccttacaaggtacaccgtatgacaccggcttaaatattcctgaactcgaaaaaatttcagcttacttccgtgatgtacgtaaaaaatatgcaaaatttgaagggcaacttcgtggtgtagacagccgtattttagtcgctcaagtgccgggcggaatgctcactaaccttgaaagccaattaaaacaacaaaatgcttccgataaacttgaccttgtattacaagaaattcctcgtgtacgtgaagatttgggtaatattccgcttgtaacgccaacctctcaaattgtcggtacacaagcagttatgaatgtgttgatgggcgaacgttacaaaacgattgctaaagaaaccgcagggattttaaaaggtgaatatggtcgtacaccggcaccggtgaataaagcattacaagacaaagtgcttgaaggggctgccccaatcactgaccgccctgctgatcatattccaccggaattggataaacttgtggcagaagttactgctcaagcgaaagaaaaaagcatcacacttgctgaaaatgccattgatgatgtgttaattgtggcactcttccagcaaatcggttggaaatatttggaaaatcgtaataatccttctgcctttgaacctgtaccaagtgccgatgatgtaaaagctgtgccagtcgcagcaccaaaaacgcaaccacaatccggatctgcggtttacaccgttgaacttgaaggcaaagcctttgtagtgaaagtgagcgaaggtggggatattaccaacatcgccccaactaccgcaccaagcagtacaacaccggcaccacaagtggtcaattctgttcaaaaatctgcaaatgccgaaccggtgaatgctccaatggcagggaatatcctcaaagtagaagtgaaagaaggtcagcaagtggctgaaggcgatgtgttattaattcttgaagcaatgaagatggaaacccaaatttgtgcggcaaaatcaggcacgattcaaggcattaatgtgaaacaaggcgatgtggttgctgtaaatgacaccttaatgagcattgcgtagaggtgatgtatggaaggtattatcgctctatttaaaggaatggggattatgcacattgagtgggggcaagccgtaatgattgcggtgagtgtgcttctgctttggcttgcgatcgcccgtaaattcgagccgctgttgctcgtaccaatcggttttggtggtttgatgtccaatattccggaa

SEQ ID NO: 3182 - DNA, 23030 bp, synthetic construct
  source 1..23030: mol_type = other DNA
  misc_feature 1..23030: note = Synthetic
ttggcaaaatatctatattgtgtatttgggtaatggtgttattggaggcattgggctgggtttaggttatattgcacctgtttcgacgctgatgaaatggttcccggataagcctggtatggccacaggacttgctattatgggttttggtggcggtgctatgcttgcttcgcctttgagtgtggccttattgaattactttaaaacgcctaccgatgtgggaattattcctacttatatggtgttaggggtcatttattttgttttgatgatttttggtgcattaattgttcgtgtgcctgagaaaaactggcttccagcagggtacactgaaaagaaaaaatctcatattacgcatgcagtacctgttaatgaagcgatcaaaacgccccaattttatttattgttctgggtgttgtgtttaaacgttacagcaggaattggcgtgttggggcaagcatctgtcatgattcaagagatgttctctacagaaagtgttggagatcgtttggccgtgagtgcagcagctgcggcaggttttgtgggcttgctaagtttgtttaatatgggtggtcgttttttatggtcaagtgtgtccgatcatattggacgaaaaaacacttataccattttctttgtgctaggagctatcttgtattgtttggttcctacattaggtgctgagggacatttaggcctatttattatttgtttctgtattattttgtccatgtatggtggtggttttgccactatgccagcgtatttaagagatttgtacggaagttttgaagttggtgcgattcatggacgcgtgttattggcctggtcaacagccgctgttttggggcctgttttggtgaattacattcgtgagtaccaaattagtcaaggtgttcccaaagcagaggcgtatagtgtcaccatgtatatcatggcagcattgcttttgattggattggcatgtaatttatgtatcaaaaaagttaatgaaaaacattatattgatgcagaaatccatgataatcgcacagaaactatttctgcttctttagttcaacgacatagtagtaaatgggttgctttattgagctggctattggtgggcgtaccgatgttgtacggcgtaattgaagtgttcaacaaagtgcttagtttatttgcgagataatcaaaaccacgctgcaccttctgaatgagggtgcagtgctgttaagaaaccgcatctttggtatgcacaataacatggtgacggcactatgttggcttatagatgctggtagatgaggtccgtatttttatctattcagtacctacattaaaacgatatcaaattgatcgggagaataactggattccactgaaagggtaattggtttgccaatttcttcagaaacaagtgccagatgctcactttcttcatccaaaagtaaatcaatgacgggttgagaggcaatgattctaaattctttggggtgaaactgtagtgcttctctttggatttcacgcataatgtcataacagatgctacgtgcggtaaggatggaaccgcgtgcctgacagcatggacaaggctcgcatagcaatcgttctaatgattcgcgactacgttttctcgttatttcaaccaatcccaatcgagaaaagtcactgaccgtggtcttgtttcgatcttttttcaacgcttgatttaatctttccaaaaccattgttttttctttttcacttgtcatgtcgataaagtcaacaataataatgccccctaaatttctaattctaagttgttgggcaatggctgtcaccgcttcaatattcgttttgaacatgacatcgtgatagtctttgctttttacatggccccctgtattgacatcgatagcggtaaaggcttcagtttgatcaaaaattaaatagccacctgatggcaaatctacgcgtctagataaggcactttgaatgtctttgtgaatgccataacgctcaaaaatggggatattgccactgtaaaagtgaattttgtcttttatttcgggcataaaatcatttgcccatttttgcatagactcgcagaccgactgattatccacctctatcgattgggtgtttaaagaaactaaatcacgcaacacgcgatgaggtaggtcaagttctgtgtgtaccaaactgggaacgggttgatgtagggctttgttttgtatatacgcccacaatctttttaaataacgcatgtcatataaaatttcttcgtcagtggcttgttctgcgttggttcggacaataaaaccgcctttctcggaagggtctttcaactgagtaattcgctcccttagcatctctcttgtgctaacgtcttccattcgttgcgacacaccgatatgttggttgtgaggggtataaactaaataacgtcctgctaaattaatttcgttgctgactctagggcctttggtccccgtcccatctttaaacacctctactaataaggtttgtcctggaaacaaaattttttcaatgggtgtttttttgttagataggtgataacgttcaaaacgtgactcaagtaggtcggagatattgataaacgctgatttttcctgaccaatatcgatgaacgcagactgcatagagggtaatactctaagaacttttcctagatatatattactcaccaagcctttttgattggctcgttcataatgcagctcatgcgtgattccatcgtctaacgcagcgacacgtgtttcataaaaagagtgattaatcaggattttttcgttcatagagataagtaaatgcgtcaatatcaaaggttaagtatagacgagatttgttgaaattttaccagtttattttttaaagattcaatgagtgtggagaacgggaaaaatagtggtttgatgccttgatgagggggtgttacgaaaaagtgtagctgttggcatatcgtgttgtgagctgggtttcaaaaaatatttccaaaaataaaaaaaatgtgtataatgccaagtctgtttgattttattttgtatcgacgataaacagtatctaaaatacaacatagaaaaaaatagttgacaactggaatttttctcttttataattctagtctttcgcttgatgagcgaatctgttctttaacaacgaaacaaccgataagcgtaggcatgctagtggtagggagtgcgagcttcaaataagctagtgtgctacgcgaatgacagaaataaacgagtgaggtttattgctagagatagtgatgaacacattagttaatttttttgagtagacgctagaagtagtggtgcggtaagcgccacgaccaagaaatacagagattaaactcaagagtttgatcctggctcagattgaacgctagcgggatgccttacacatgcaagtcgaacggcagcgagaggaagcttgctttcttgtcggcgagtggcgaacgggtgagtaaagtatcggaacgtacccatcagtgggggataactacgcgaaagcgtagctaataccgcatattatctaaggatgaaagcaggggaccgcaaggccttgcgctaatggagtggccgatatcggattagctagttggtggggtaaaggcctaccaaggcgacgatccgtagctggtttgagaggacgaccagccacactgggactgagacacggcccagactcctacgggaggcagcagtggggaattttggacaatgggggcaaccctgatccagccatcccgcgtgtgcgaagaaggccttcgggttgtaaagcacttttgtcagggaagaaaagcttggtgataataccattgagtgatgacggtacctgaagaataagcaccggctaactacgtgccagcagccgcggtaatacgtagggtgcaagcgttaatcggaattactgggcgtaaagcgtgcgcaggcggcaggaaaagaaagatgtgaaatccccgagcttaacttgggaatggcatttttaactgtcttgctagagtgtgtcagagggaggtggaattccacgtgtagcagtgaaatgcgtagagatctggaggaacaccgatggcgaaggcagcctcctgggataacactgacgctcatgcacgaaagcgtggggagcaaacaggattagataccctggtagtccacgccctaaacgatgtcaactagctgttgggtcaagactgacttagtagcgaagctaacgcgagaagttgaccgcctggggagtacggtcgcaagattaaaactcaaaggaattgacggggacccgcacaagcggtggatgatgtggattaattcgatgcaacgcgaaaaaccttacctacccttgacatgtctggaatgctttagagatagagcagtgctcgcaagagaactggaacacaggtgctgcatggctgtcgtcagctcgtgtcgtgagatgttgggttaagtcccgcaacgagcgcaacccttgtcattagttgccatcattaagttgggcactctaatgagactgccggtgacaaaccggaggaaggtggggatgacgtcaagtcctcatggcccttatgggtagggcttcacacgtcatacaatggtcgggacagagggttgccaagccgcgaggtggagctaatctcacaaacccgatcgtagtccggattgcactctgcaactcgagtgcatgaagtcggaatcgctagtaatcgcggatcagcatgtcgcggtgaatacgttcccgggtcttgtacacaccgcccgtcacaccatgggagcgggttttaccagaagtcgttagcctaaccgaaaggagggcgatgaccacggtaggattcgtgactggggtgaagtcgtaacaaggtagccgtaccggaaggtgcggctggatcacctcctttaagatagcataaagcgaggcttcttatcgattatcgtgcctacacttatcggttgttggaaatgaacagaaggaatctagggtcagtagctcagcaggttagagcaccgtcttgataaggcgggggtcgatggttcgagcccatcttgacccaccaagttaaggtatcttgggggattagctcagttggtagagcacctgctttgcacgcagggggtcgtcggttcgactccgtcatcctccaccattcttgataatgagatatatcagggttaagtggcgttgaaagttacttgacgatgataaaagaattaggttataatgcttagctattttttaatggtgatgtgcgattaaaaagataactaaccattatttcttattgaaataaactgttctttaacaattaggaagaagcacaactaaagtattcaagggtttctagtgtttgaatgaacgctagagacacgttaaatgaagacgggttgtgattgcaaaatgaagttctcgacgtcttaggtagtagcgatactacagaagatgaagaaaacggcacaaacgcgaaacatgtaagagcacaatagtggataaaaaggcgctattgtgtggtagataagaaattatttaccgaagaagttttctataacaagattaagttataggatcaagtgaccaagtgcacatggtggatgccttggcgatcacaggcgaagaaggacgtgatagcctgcgaaaagctgcggggagctggcaaataagcattgatccgcagatatccgaatggggaaacccacagcaataagctgtatcattagctgaatatataggctaaatgaggcgaacctggtgaactgaaacatctaagtaaccagaggaaaagacatcaaccgagattccggcagtagtggcgagcgaacccggagcagcctgagcgagatagccgattgtatagtcaaaagagatggaaagctctgctatagagggtgatagccccgtagacgaaatgcaatcggtggtactaagcgctgaacaagtagagcgggacacgtggaatcctgtttgaagatggggggaccatcctccaaggctaaatactcgtgatcgaccgatagtgaaccagtaccgtgagggaaaggcgaaaagaaccccgggaggggagtgaaatagaacctgaaaccgtgtgcatacaaacagtcggagcagtcaggaactgtgacggcgtaccttttgtataatgggtcagcgacttacattcagtggcaagcttaacgaataaggaaggcgtagcgaaagcgagtccgaatagggcgtctagtcgctgggtgtagacccgaaaccagatgatctatccatggccaggttgaaggcaaggtaacacttgctggaggaccgaacccactaatgttgaaaaattaggggatgagctgtggataggggtgaaaggctaaacaaatctggaaatagctggttctctccgaaaactatttaggtagtgcctcgtagggtatctgtcgggggtagagcactgttatggctagggggtcatggcgacttaccaaaccatggcaaactccgaataccgacaagattgactacgggagacagagcactgggtgctaacgtccagactcaagagggaaacaacccagaccgccagctaaggtccctaaaattggctaagtgggaaacgaagtgggaaggcatagacagtcaggaggttggcttagaagcagccaccctttaaagaaagcgtaatagctcactgatcgagtcgtcctgcgcggaagatgtaacggggctcaagccagttaccgaagctgcgggtttgtaggcaactacaagcggtaggagagcgttctgtaggcctgagaaggtgtgttgagaagcatgctggaggtatcagaagtgcgaatgctgacatgagtagcgataaagcaggtgaaaagcctgctcgccgtaagtccaaggtttcctgcgcaacgttcatcggcgcagggtgagtcggcccctaaggtgaggcagagatgcgtagctgatgggaagtaggttaatattcctacaccggcataggatgcgatggggggacggattgcgaaatgtgatcggggtgatggaagtccccgttgttggtactgagagggtagttaggcaaatccggctacgacaatcaaggtattgagtcgaaggtaagcttgcttaccgaagtcacaggaagtggtcccaagaaaagcctctaagcttcagttctatgttgaccgtaccgcaaaccgacacaggtggacgggatgaatattctaaggcgcttgagagaactcaggagaaggaactcggcaaattgataccgtaacttcgggagaaggtatgccctggtagcgtgttaaagcgtgatagggccgcagagaatcggtggctgcgactgtttattaaaaacacagcactgtgccaacacgaaagtggacgtatacggtgtgacgcctgcccggtgccggaaggttaagtgatggggtgcaagctcttgatcgaagccccggtaaacggcggccgtaactataacggtcctaaggtagcgaaattccttgtcgggtaagttccgacctgcacgaatggcgtaacgatggccacactgtctcctcctgagactcagcgaagttgaaatgtttgtgatgatgcaatctccccgcggctagacggaaagaccccatgaacctttactgtagctttacattggattgtgaaccggcctgtgtaggataggtgggaggcgaagaaaggtggatgctagttcacctggagccgttgttgaaataccaccctggtttgtttgcggttctaacctggtaccgtgatccggtatggggacagtgtatggtgggcagtttgactggggcggtctcctcccaaagtgtaacggaggagttcgaaggtacgctaggtacggtcggaaatcgtgctgatagtgcaatggcaaaagcgtgcttgactgcgagactgacaagtcgagcaggtgcgaaagcaggacatagtgatccggtggttctgaatggaagggccatcgctcaacggataaaaggtactctggggataacaggctgataccgcccaagagttcatatcgacggcggtgtttggcacctcgatgtcggctcatctcatcctggggctgtagccggtcccaagggtatggctgttcgccatttaaagaggtacgtgagctgggtttaaaacgtcgtgagacagtttggtccctatctgccgtgggcgttggatacttgacggaggctgctcctagtacgagaggaccggagtggacgcacctctggtgtaccggttgtcacgccagtggcatcgccgggtagctatgtgcggaagagataaccgctgaaggcatctaagcgggaaactcgtctgaagataaggtatcccggagtcttgaactccctaaagggtcgttgtagaccacaacgttgataggctgggtgtggaagtgcagtaatgcatgcagctaaccagtactaattgcccgtgcggcttgatcctataacttaatgttgttcttacatggttatatgttcaacgtgccgtaacaatgaattaagctcatctatcccaattctcttcattactgaatcctagaagatttgtgcttcttcctaagtgttaaagacactcacaggcttttgcctgacgaccatagcaaggtggtcccacgccttcccatcccgaacaggaccgtgaaacaccttagcgccgatgatagtggatggacatctgtgaaagtaggtcatcgtcaggctctctatacacaaaccctcgttgctcacagcaacgggggttttttgtttttatgaactgtttgtatacaggtacagccattgatttagcttcatgtcttcaaaaagtattagcgtatttaaaataaacgagaggatatccttatcttatctggttacggtcttttgctctaatcctttaaacttgaattaagcaagatttcttttattaggcatagatactagttgaagtttaaagaatatatgattaatcaagatgttgtacaactgtaaagacttgaaaaatttttttatcatataaattgtttagatagaaaagcagagtaatattaaaagttgtgagagagtacactattaaatttaaagataatcaacataaactaagacaactttagtattcctgccttattgatttcgtattttagttaatagagtaatttaaagttaaagtaaaatggaatttgttttatagatagagatttatagatacagatactagtttaagtttaaagtaatagcttaattgaaaataagcaagatttatccctcgttaagcaagatttttatattgctgtaactgcatgaaaatatcgagattaaatcttattaagcacgatagaggtaaaaataagcacgatttacctcttgttaagcaagatttttgtataagcacaactatctgaaatagcgagagaaaatctgattaagtacgattgaggtgaaaataagcaagattttttaaattaatcttgataaacactaaaaaaagagggagtaaataagacgatacccctaaatgataaatcaaataggggtagaacgtcacggtattccttacggattccttattgtagcaacggctctcatctcgtaatgcaacaatacgatcattataacaaagatttatttttaaagtcaatccgtaaatctttgtagtttaaactatatagtgtgatatgattgattttaatagattgattaaaaagtcgcagtaaccgaaatagatgatctgattgcaataatttttaggtaaatcaattggttaataaaaaggcgatatttttatatttcaagcttactaaatgattttattgatgtcatgaaaatggaggcgatggcatgaagattgatgaattggaaaaatatatgaacaagtatcgttatattttaggtttggatttaggtattgcctctgttggttgggcgttggtgtctgttaatgaaaacgaagagccaataggattgctagattgtggggtacgtacgtttgaacgtgctgaagtccctaaaacaggtgaatctttagctaaggcaagacgtgatgcgcgcgtatgcgtagaagaattagaaggcgtgcttttcgtttgttaaggttacgtcgctacttaaaaagaattggcttattaacgaagcaagattttgatgaacatggcttgattaaggatttaccgattaatccttggcaactacgcgtattaggattggaacgttcgcttgcccctaaagaatgggcggccgtattactacatttggtgaagcatcgaggttatttatcacaacgaaaaaatgaaatcaacgacaaagaattaggtagattgttggctggtgtccaagctaatcacgatgaactacaatcgaaaaagtatcggacagctgctgagttggctctcaataaactagccgttgaaagtggtcatgtgcgtaataagggaggtgattattcacatacttttagtcgattggatttacaggaagaactacacttattatttgaaaaacaaagagcatttggaaacccatggacatcaatagaatttgaacaaaaagtcgatgagttattgatgaaacaacgaggagcattgcaaggtgaggcaatactcaaaatgctgggtaagtgtatttatgaaattgatcaatataaagcagctaagcatacttattcagcggaacgttttgtttggttgacgaagttaaataatttgcgcattcaagatagtggtgaagaacgtgctttaactgatgttgaacgtcaaaaacttattgatgagccatataaaaaagcaaaactaacttatgctcaagtacgcacattattagatttatctgaaatcgcaaaattcaaagggttgcgttacggttatcaacagacaaataaggaggttgaaagcaaagaaactttgatggaaatgaaagcctttcatcaaattcgtaaagcattagaaaaagcggatttaaaagatgaatggcaaaaaattagctgtcaacccgatctattagatgatattggcactgccttttcattatataaaacagatgaagatattacgaagcagttaactggtaagttatctgagaatgctttacaagtgttattaacggaattgaattttgatgaatttattcaattatcattacttgctttgcgtaagattttgcctttgatggaaaaaggccaacgctatgatgaggcttgtaaagcagtgtatggcgaccactatggttataaaaaacaagaaagtaacttgttgttgcctcaaataccagcggatgagattcgtaatcctgtggtattgagaacgttaactcaatcacgaaaagtcattaatgaaattattcgacgatatggttctccactgcgtattcatattgaaacgggtagagaagtaggtaagtcatataaagatagaagagaaattgagaaacgacaagaagaaaatcgtaaagagaaagaacgagctgttgcaaggtttaaagagtgtttctctaattttgtaggtgaacctaaagcaatggatattttgaaattcagattatatgaacaacaacatggtaaatgtttgtatacaggtacacccattgatttaaatagactgcttgaaaaggggtatgtagaagtcgatcatgcacttcctttctcacgtacatgggacgacagtttgaataataaagtactggtcttgggcactgcaaaccaaaataaacgtaaccaaacgccttatgagtggttagacggtgcgaatgaaagtgaacgttggcaacagtttgttgggagagtacaacatgcacgtttttcttatggcaaaaaacaaaaactgttagctaagaaaatagatgaagaaggatttattgagcgtaacctcaacgacacaaggtatgtagcccgttttttatgtaattttataagcgataatgttcagttattgggcaaaggaaaacgtagagtttttgcaagtaatggccaaattaccagcttgttgagaggtcgttggggattaagtaaagtcagagaagaaaacgatcgacatcatgctttggatgcgattgttgtggcctgcacaacggtctctatgcaaaaaagaattacggattttgtgcgccgccaagagatggatgtttttgttggtgaaatgattgataagacaacgggggaagttatcaaaattcatttccctgctccttggccatttttccgtcaagatatcatgattcgggtctttgatgacaatcctagagaaactctggcgaaagaactacccgatagacccgaagcgattcatgatttagtgacacctttatttgtttcgcgtgcacctactagaaaagtaacgggacaggggcatttagaaaccattcgttctgcaaaaagattgaatgagcaacttagcgtgacgaaaatgccattaacgaagttaaaaacaaaagatatcgaaaaaatagtgggttaccctcatcgagaacctgctttgtatgaagctttaaaaaacagattagctcaatttaaagatgaccccgtaaaagcttttgaacaacccttttacaaggtggatggaaaaggaaatgccacgactacacaggtaaaatcagttcgcatagaaaatattcaaaaatcaggtgttcttgttcgagaaggtaatggcattgctgataatgccactatggtacgtgtcgatgtatttacgaaagaaggtaagaattatttagttcccgtttatgcatggcaagtcgcgaaagggattttgccgaataaggctgtaaggcaaggaaaagatgaaatggaatgggacgagatgacggaagatttttcttttaagttttcgttatatcctaatgatttgatcaagttgacatataaaaatataacttattttgcgtataatgctggatttgatagagctacaggagccatcacagttaaggcacatgataaatctagtgcttttggtaagaatggacaacaatctggaataggggttaaaacgctcaaagtttttgaaaagtattctgtagatgtcctaggtaaaatcattcgtccttgcaaaaaagaaaaacgacaagatttttctaaaaaacgtaagaaataacacgataaaaaacagaaacaaataaaaacaagcttcgagtatgtgactagaagctttgaaaggtagccaccgtattactacatacggtggtgtaggggatggttactctagtgatttatgatgatctagagtggaccttactcgatggaggtagggagataaaatgtggcgaagtgtcgtgattaaccaagcatccaaattatcgctttggaaacaacaattatacattcagcaaaaagaaaattatttagtgcctttagaagatgttgccgtcatacttattgaggcaaaagaagtgactattactgcaccattgttgtccgcaattgctgagtatggtattaccttattgacttgtgatcaacaatttcttccttgcggtcaatggttacctttttctcaataccatcgaagtttgaagatattgaatttgcagttgaaaatgagtgagcctcttaaaaaacaactttggcagaaaattgttcaacaaaaaataaagaaccaagcttggatactcgattatagtggacatgatattgctgctcatcgattaaataaactagccaatgaagtgaaatcaggagataaagaattagcagaaagtcaggctgctagtatttattttaaagtgttatttaaagaaggatttaataggaaaaatgaacatcctgttaatgcttatttaaattatggatatacgattttacgctcagctgttgccagatcactgactcaatatggttttttgtctattataggtattcatcatcgtagtgagttaaatgcgtttaatttggcagatgactttattgaaccttttagacagctggtggatttagcggtatatcataaaatgattgctgaagaaattaacctttcgcttagtgtgcaagacagacatgagcttgtcaaacttcttaattatgatattagaataaataataaaaattacaatgtattagcagcaattgataaaaccattcaatcttttcaagcttcaatgatacataaagattcttctttgttgaaattgcctgaaatggtttgtttaaaagagcatgcatatgagtgagacaagatttatgagaatgatagtgttttttgatttgcctgtaacaacggcagaaaaaagaaaagcggctggtcaatttagaaattttttaatcaaagatggttatcaaatgttgcaactctcggtgtatgctaggattgttagaggaagagaagcgttgcaaaaacaccacatgcgattaaaaaaagcactgccaaaagagggatctatacgttgtttagaagtcacagaaaagcaattttccagtatgttattgcttttaggggagggaaaagttcaagaaaaaaaggtaaatatgaatcaattattattgttttaaacagtttttttgaactgatgaaatggctgtaatgcctgataaatcaagcattacagccgtcggtattgtagcattacgagatgagagaggaaactacaaccggacaggactacagcaatttagaggcggtattgtagcattacgagatgagagaggaaactacaactttttgtgcttgatttggctagcgtgttgaattgtagcattacgagatgagagaggaaactacaaccttgcacccgccccacccttgcacatagtgattgtagcattacgagatgagagaggaaactacaacactatctataatatggttatatgttgtattattgtagcattacgagatgagagaggaaactacaacttgcacgtgtaatagtgattatcaggtgtgattgtagcattacgagatgagagaggaaactacaactgagctggttggtaaaggatttacgcaaagattgtagcattacgagatgagagaggaaactacaaccttatttacaatggtcaagcaaacaatttgattgtagcattacgagatgagagaggaaactacaacaagtcgattatgctctcgcagttgttgaggattgtagcattacgagatgagagaggaaactacaacaatatataccaaaagaagaacgattaataaattgtagcattacgagatgagagaggaaactacaaccgaaaataagaacaattgtaacgaaaataaattgtagcattacgagatgagagaggaaactacaactagaattgctcaatctaataggcggattacattgtagcattacgagatgagagaggaaactacaacccacgttacgcttgctgaagttgtccatctattgtagcattacgagatgagagaggaaactacaaccaacgttaccgtttgttctttacttttttcattgtagcattacgagatgagagaggaaactacaacgcaatgtataagtgcgccctactaacgtagattgtagcattacgagatgagagaggaaactacaacaggcttcgtttctaaacagaacgccgtttaattgtagcattacgagatgagagaggaaactacaacccaaactgaggacggctttaaaactctagaattgtagcattacgagatgagagaggaaactacaactggactggcggcaatgaaacccgccctaaaattgtagcattacgagatgagagaggaaactacaacaatcagtcgtcgtctcgtattgaccgttagattgtagcattacgagatgagagaggaaactacaactgcttaaaagggttttcctcatatcgatggattgtagcattacgagatgagagaggaaactacaactttaaccgctcttcttctttataaaggtctattgtagcattacgagatgagagaggaaactacaacttcgtatcgttccacgctctattttttttattgtagcattacgagatgagagaggaaactacaaccgaatttattccgcttctcccatttaagatattgtagcattacgagatgagagaggaaactacaactactatctttgacggcttgtgagtcgcgtcattgtagcattacgagatgagagaggaaactacaacggattaattcctaatgttttttcgtgtttaattgtagcattacaagatgagagaggagtataaactgatgatttgtttagtcctagaatttgttcacaattaaaaaaaacgactagactgaatctaatcggcaatatgaaaaaagccactaggctagtagtgacttcttaatcgattgtttcttcgttctctaaatctcggataacttcctctgcggtgaggtcatagtctccgctgacccgttgataaaaatacagtgcgttagggtttgttttgaggtcatgaattagttccgcaatctcggctttagtaggcaagtcatcttccatttctcgcaatcttgcattttcctcaagctctgcacgcatatcctcttgccatgcttctaatgaatcatagccacaaagctttgcacacttttgttgttcatcaatcggcaaatctaaaacgctcattaatctacctccgttatttgaaaaatcagtttttttgagttcccttacctgtggatgacgtattatcagtgttagctattttggctgttcttgatatgatgttatcttttttaagatatatcactttttcttgtccatttattttcataacaacagtacttccaatgtcagaaacaataagaacatttttcaatgtacctacttctttataaacttgacacgagttgttggtttgtagattgatactttcacaagtcttcaaatcgacaatgatggtgtcatattgtttatatgctagacctaagtttgttaatgctatttgagggaatttcactatatagccagtaaagataaacaagactaagatagggattatggaaaacatgaataagtatcggcatagttgagtaagattgtctcgataatatttaacaagactgtgagtataataagcagttatgccaagggcaccaataaccatgataattgcttgaaaatctatagtgctttctgataaccttctactcatatctattaaattataaatgaataagaaagagaaaaagaatagaagaataagttgaaaaattaggttaagcaatattaggatagagaacttctctttctctttataaaatggttgtgaaataagagaagagaatgaatacaggattataataatagagacggcaatagtcgcaagaatagagataaaacatagtttggtaagtaatactaatacgcaaacagaaaatagaattaagttacaaattaaaatcgatattgaaataatcttgtagttgtcatcattaaggcgtaaggtgatagatcgaagaaacagtgcatatataagtggtgacgcaatgtatggtatgactataagggcacccattgtaaaaattgcataggcaacatagggtatatcatttaaattcgcatcaaaaggaagttgatgttgatattgaaatataaaaatgaccagatatcctataaaaataatagctgaaagtataaatttaataggattcttttcaatataagacaataaagtgtcacctaatttttgcaataattttttttctggattttgtgtttctatatttttaccttcattagttgttgctttatcgtctctcattttcattactcccctatgatagattaataccgttgttttatattgatcagatcatcttgtcaagattgcttacctctcaacaacgcaatatcctgtaatttacgtcctaactcatcatcttttgccacgtatttaaagtcctgttctaagcctaacacgccaagtatcatgacgtaatagccaatggctacagcagggtcgccatgcatcatttttctaatcgtgacgcgactgattcctgttctctgagataaaagtgtttgtgtgattttccgtcttttagcagcaagctttatattctctcctaattggtttaaagaggtttggtattttggaaaaagcacgggtgattttttcttgttggacattacaattaccattgttttgagatattgataattataatgctcattttttcaagaatcaatgatggagtcaacgtaatttaaaacagttaagctgtttggaaaaagtagaggtgattttcttttattgagcattataattaccattaattaggtatatcggtaattataacgttcattttgtaataatcagtgatatagtgaaatcaatatcagatgtaacagtcagaaaaaagggtgatacgttaacgtgtatcaagtgtgagttaatgttcgattagttattgattaaatgttataaataatgccttgtgattcgtgcatcatatgagattgattggctctcgattgaaagtaagctagttcacaactcatcaagactgatttcaatcggctgttcttttaagcgttcattgattagttttgcatcctctagctcttttaaatagttaagcaaagcttcatagtattgagcaggaagtaaataagcttgaggcttaccgtacttcaagatagccactggtccgttagctttttttaatatttgatgatagttttgttttaacgcggtcacactaaatttgagataaaaagcagtaaaatgctgttggagggtgaacatcatgcctaaacatactttatattttccgcccacttcaaagcagttgtatatatcagggatagttgctttgaatataattagtccagagggtacaggagattggcactcatttgcagtattttgcaatgaaaaaaatctaaatcctaagtataagtatcgtcatatttttggcgaagggcagccacctcatcgaaatacgaatccttatttaggggatcgaggtatttatgacgctacagatattcttcatcgaatgggctatgatcccgagaatacacctgtatgggcagcgaatcatgcaagggcagtggtggattgtctttatacagctgttttagataatggtataactaattctgttattttagatgagtggtttcccgcgatagaggataaagaaaaggtttatgaactcattgatattctaaagccgcagttagatgagcggcgaagaggagttcttgaaaaatggatacaggagaatccaattacggagtaagtcagcgttataggggaatttgtttaattttgaaataacgtgtttgatcattttatacgatgcctgttcgatgcctgaaattaaatcagtcccaaccttcgtgattaagaaaacgcatatcagtctcctattgaaatactagtatttctttaatgtaggatgactcgttcatatattacaaataagtgccattgacgtgaacgctgtttgttttgtattcatcatatgattaatacttggtccgatgacacaataaacattctttaaagtgattgtaagcataaaaaaatatctttactttttttatttttaatttaaaatgaaaaatagggggaaacaaaaataataagaaatcaaaggtttccattggtgaaataaatgattaatttcattttgtaatagtttttaaacaggtggcagaaatgaaatatatcagaagattgatttctacttacaacgatgggtggaaggagttgacagaaagggaaaaggaagtctgtctgcatcttatccaaggaaaagggaatcgcgatatcgcaaattgtttgggtatctcgattagaacggttgagttacatcggcaaagagctttaggaaagttagagatcagagtgccgactgaacttttgtggaacgtattaattggttgttacggcaccgagttgttgggtaaagaataagcttcgcatcaactagtgttgaatcaagattcaattgtcaatccgtttatcatatggatatatccctatcggttcaataatgcccatgaaacaaggtgttgcgaaaaataggaagtcaatcgcatttatcctgatgattttatgcgattgaccgaaacgtattaaagttatattaaggttttttgatcaaagggataaactctgcataaccttcagccgccatctgttctaaaggaatgaacctgaggctagcaccattaatacaataacgtaagccacctttgtcgctaggtccatcaggaaaaacatgacctaaatgagaatcggcataacgactacgcacttcgattcgtcgcatgttatagcttaaatcttcatgctcagtaatagcttgagcttgaatgggttgtgtaaaactaggccaaccacaacccgaatcatatttgtctgtggaggtaaacaacggttcgccactgacgatatcaacatataaaccaggttcgaataaatgatcataagcatggctaaaagcatattctgttccatttttctgggtgatgcgatattgctcattgctaagctgctgacgcagttcattatcactaggtttttcgtaggtttcccagaaacggacaggtttatcaatatttgtgccacgttccagaggacgatcagccagactaatgtcaatatggcaataaccatttggattctttttcagataatcctgatgatagtcttctgccaagtaaaaattacgtaatggtaagttttcaacgactaacggtttggtatatttcttttgttcgttggctaaagcagcatcgataacagccttgtctttctcatcggtataataaacccctgtgcggtattgcgtaccacgatcattaccttgtttgttcaaactggtggggtcgatcacgcgaaaataatattgcaaaatatctgccaaactcaaacgtctggtatcaaaagttaccttaaccgtttcggcatgtcccgtatggcgataaataacatcttcgtatttggggttttcagttcgaccattcgcataacccgatacggcatcaatgacaccatcaatacgttcaaaatatgcttcaacaccccaaaaacagccacctgctaaataaattgttttttggtacataggatcgattacctcttttttagtcactcggtttgccttctcttgtacgctttttaagtctgcttgagggttgtcaatgagggccaatgcttgcactttactgatactgcctttgatcacacgaacgagatgtcctttttcatcgaacaaagcccaagaaggataagcgcggatattcaaagtacgacttaacgtgcctttggtatctaataataccttagtttgcggataatccaaacttaaaaaccattttgtaaaatcatctttgttcttttctgaatataaagaaggagaaacaacggtgacaaaattaatcgctttaaaacgcttatctttcgaccaagcctccacttcatctaattcggataaacagcttgaacaccaacttgcccataacttcaccaaagtagggcgattcgtgtcaatcagctgtttagctggttgttgatgaatatcatctaatgataataaataagtgaatgccttatcatcagctccttgcgtggctttatccgttgatgaattaggtaacttagcaaaagctaaagtaaccaaagcaattcctaaggttacacataatgcaaatatttttttcatctctacatctcctgatgatttgattcaataaccctttggcatgaaggtggggtagtcatttcattcttgattatgttggcgattgttattatataacatttgttatggtgtaacaattgggggggggtgatgtcaaggttgattatgactgaaagtggtaaataagataaaacctagcaataagttaaaactaggtaaagtagtagattcaaaattagtcaataaaattttttaacacctttaagtaagatattagttagtacatggataattctattttaaacaatgggttatctttgaattcagttgtaaagaatttctttacaactgctcgtgaatcaagtaacacgaataaacaaatagtaattagtttagaatcaggcgaagtaagagatattatttccttaggattgatgaaagatagatatagcttaaaaattataattaagagataatttacatcgtaatctaatcgaacccgattaataaatctgcttatgatgtttatgaatgatcattcttttgcagttgggtaaattttttcaaaatcttctaatagtttttgcattcttaacgtactgaattgttttcggtgagcattgtctttcttactatgacaagcgatacataaacattgtagattactcgcttgattatttaatttgtctccatcaatgtggtcaacatgccaaaaatatcgatcccttggattattaggttttaatccacatttggcgcatgtataatctacgctctccctgaacgcttgactaactttatcccatctaaatacataaccaaagacatcaacttttaattcagtgtcaatgctatatttttttagtaattccacaaaatcttgagttgttttaacttctttgaagttactgttttcagaaaaagtgcgacaatagtggcatagttctaatgtaacatttttgaatacttgatgtgttgttttatcgatgagatcacaaatattactcgttgaaaatacatatcgttgatgaaaatttcctttatcgataaaagattgaatcgtcttgcatttgtaaatatgaaatttaggaaactgaaattttccttcatagttgataaaagcttctttgatatacataaagccgggatattctttgtctaaataacgcagaaaaataccttcttcatctggacgaatttgactttcaaaagagatacgtccttttttataaactttttcaaaatcaacagtgatttgattgtaatcagataattgtggaaagttttgtttattcagccattgttctagtttgctaaattgataaagttcaatatttttcattttctgattccattttacggagtactttctcaattacattggcactgttggtaataatgcgaaactctacgcgtcgagatagttctggactaattggtttgccagtgaggtacgtaagctttttgttactatctagtgttctgccataagatagaccat

SEQ ID NO: 3183 - DNA, 22496 bp, synthetic construct
  misc_feature 1..22496: note = Synthetic
  source 1..22496: mol_type = other DNA
gttctacgccttcgtcaaacccgaacacctgaaagacggctggacgcgcgaccgcatcgtgaacgaactgaacgcgcgcaaagtcccctgctatcaaggcagctgctcagaagtgtatttggaaagagccttcgacaatacgccgtggcggccgaaagagcggctgaaaaacgccgtcgaactgggcgacaccggcctgatgtttttggtgcatccgacgctgaccgacggcgaaatcgcgttttgcaaaaaacacatcgaagccgtcttgaccgaagccgcacgataacccttcagacggcatatgccgcccgaaaacacataccgccccacgatatgaatctggaaaccctgatcgccctgccgcgcaacatcaagaaaatctgtttcctcatacacgattttctgatgattttcattgccttttggttcacccaaagcctgaaggccgactactcggacgaatggttcgattttgccaactggcagtcttttttgctgactgccttgctgaccatcacattatttattcgaatggggctttaccgcgccgttacacgcttcgtcagcttccgcatcctcaccaccgcactggcaggcagcctcgcctccgccgtattgttcttcctcaacacattgatttttgaagaaagactgcgcctcgccctgccgattgtctatttcttactgctgtttgtttccgtgaccggctcgcgtatggttttgcgcggactgttgtccgaacaccccaaaaaacagatgatccccgtcattatttacggcgcggggcgttcgggcagacagcttctcgaggccgtcaaacaaatgcgcgaatattccgccgccgcctttgtggacgacgaccccaaactgtggcacaccgtcatctgcggccttgccgtttaccgtcccgacgacatcgccgccctcatcggacgctgcggcgtgaaaaaaatcctgctcgccatccccggcgcgacccaggcgcaacgccgatccatcatcaaaaaactggaagcctatccctgcgaagtgctgaccatccccggcatcaaagacctgatggacggcaaactcagtatcggcacgctcaaaaaaatctccgtatccgacctgctcggacgcgaccccgtcacgcccgacgaccgcctgatgaatgccgacattgccggcaaaaccgtgatggtaaccggcgccggcggttctatcggttcggaactctgccgccagattatccgccgccgccccgaaaagctgctgctgttcgagttgtccgaattcgccctgtacgccgtcgaaaaagaattgcgcgaatactgcgcccgaaacgataccgataccgaaatcctgcccttcttgggctcggtgcaaaaccgcacgctgctcgcgcgcattatgaccgcctgccgggtatccaccgtttaccacgccgccgcctacaaacatgtccccatggtcgaattcaacaccgccgagggcatacgcaacaacatcttcggcacactcgaatgcgcgcttgccgccacggcttcgggcgtaaaaaccttcgtcctcatctccaccgacaaagccgtccgccccaccaacacgatgggcgcgggcaaacgtatggcggaactctgccttcaggcgctcgcctccgaacccggacagcaaacccgcttcagtatggtgcgtttcggcaatgttttgggttcgtccggctccgtcgtcccgctgtttgaaaaacagattgcccaaggcggcccgctcaccctgacccaccccgaaatcacgcgctatttcatgaccatacccgaagcggcgcaactggttatccaagccggcgcgatgggtaaaggcggcgacgtgttcgtcctcgatatgggcgaatccgtcaaaatcatcgaccttgcccgccaaatgattaccctgagcggactcaaacccaaaacgcccgaacaacccgacggcgacatcgaaatcctcattaccggactgcgtcccggcgaaaaactctacgaagagctgctcatcggcgacaatgtccgccaaaccgcccatccgcgcattatgacggctgacgaggcaatgctgccgtggcacgagcttttgcccatcctcaaccgcctgcgtaccgcctgcgaccgttacgaccagcaggcaatccgcaccctgctcgtcaacgccccgaccggcttttccccgaccggcggcatctgcgacctgctttgggtacgagaaacacacagaaaaaatgccgtctgaaccttcagacggcataacgtacaaaccaacctgccccttacacacacggagtttgatatgcagttttcggcattcggcgaaaaattcacgcaacacagcggcatcctgcaactgatggacgacctcggcgacgcgctcaaaagcgacaagcccgtcaatatgctcggcggcggcaacccggcgcgcattccggaaatcgatcgggcgttcgccgacatattctccaaactggcggcggaacacgctgtcgagaacatcggcaactactccaatccccaaggcgatgccgcgttgattgacgcgctggccgctttcctcaaccgcgaatacggctggaacctgaccgccgacaatatcgcgctgaccaacggttcgcaaaacgcgtttttctatttattcaacctcttcggcggcaaattcaagctttcagacggcacatccgcagaaaaagccattttgttgccgctcgcgcccgaatacatcggctatgccgacgtgcatatcgaagggcggcactttgtttccgtcaaacccaaaatcgaaaacgtcggacacgaaggcgaagcaggcttcttcaaataccgcgtagactttgacgcactggaaaacctgcccgagctgaaagaaggcaaaatcggcgcgatttgctgttcgcgcccgaccaacccgaccggcaacgtgctaaccgacggcgaaatggcgcggctggacgctttggcgcaaaaacacggcattccgctgattatcgacaacgcctacggaatgccgttccccaacatcatttacagcgacgtaacgctgaattggcacgaaaacatcatcctctgcttcagcctgtccaaagtcggcctgccgggcgttcgcaccggcatcattgtcgccgcgccggaagtcgtcaaagccgtcagcagcctgaacgcgattgtaaaccttgcccccacgcgcttcggcgcggccatcgccgccccgctgctggaaagcggcgagatgaaacggcttgccgaccaagtcatccggccgttttaccgtaatcaggcgcaaaccgccgtctcgctgctcaagcgggagctgggcgcgtacccgatgaaaatccacaaacccgaaggcgcgattttcctgtggctctggtttgaaaacctgcccgtttcgtcgcaaaccctgtacgaaatgctcaaagccgaaggtacgctgattattccgggcgaacatttcttcgtcggcatcgacacgcgggattatccgcacgcgggcgagtgcatccgtatgagcatcgcgcaggatgcggaaacgctggaaaaaggcattgccgccatcggtaagaccgtccgaaaactgtacgacaacgtttaaaccgcaaaaaatgccgtctgaaaagttttcagacggcatttttatccgcattcaatgtcgggaaaaatgttcccacaccagtttgcagttttccggcaattcgggacatgcgccgaggatgccgccgccgaagtcgtttaaacggtggaagtcgctgcccgcgctggcgagcataccaaagcgttctgccaaaagcgcgtagttgaggcggtcgtttttgcaacagttgccgctgtggacttcgatgcccgcgccgccgaggtttttaaattcttcaaacagattgcgcttggcggtggcggacaaatcataacgcatcggatgggcgatgaccgccagcccgcccgcgccgttgacggcggaaacgcagtctgccagcgtcgcccattcgtgtcggacggcgcaggatttgccgtcacccaagtatttggcaaacgcctgctgcttgtttttgacgtgtcccgcccgaatgaggaactcggcgacgtgggtgcggctgaccatttctttgtttgccgccagcgcgagtgcgccgtcgtatgcgccgccgatgcctttcttttcgagcttggcggcgatggcttcaagacgtttcagacggccttgccgcacttgcgccaacaggttttgcaggttttcgtcccgttcgtcgaaatccaaaccgacaacgtgtatggtgcgcccgcgccacgttacggaaatttccacaccgttaatcaggcgcaaaccgagcctgtcggcttcggcacgcgcttcggcgatgccgcccgtgtggtcgtggtcggtcaacgccagcagcgtgcagccgttttgatgcgcgaggcgcacgacttcggcgggggaaagcataccgtcggaaacggtggaatggcagtgcaggtctatcatggggtgttatatgtgtgttgtgaatgaaggtcggggggcaatattgtcgggcagtgtggcggcggcggtcattttaaaaaacaggtgtatggcaaattcaaaggaaaagccgctatgctgtcattcccaaccgttttcagacggcattttcgtcttccgcccaacccgcttctttcaatttccgccgttgcgcgtcgtagcgtgccttgtccgcccagtaaatcgtctgaatgcacacctcgccgcagtcgctgccgcagcattcccacgactcggggcggacgggttcgtctaaaagcggctcgcccaaaagggcttcggctttatgcttcagggtcgtatccatctgcgatttccaagcacgcgccgtcaaactcgatgacttcgccgccgcgtattttggccgttttgcgggtttcggtttcgccgttgcgcaacaccagcccttcggcgataaatgcttttgcctgcccgccgctttcggcaagtccggccaatttcaagaggtcgcacagggcgatgtattcgttgtcttcgagatagacggtggcttccataatgttcccttgcagaaagagggcgttattgtagcacctgccgccgccgtacccaaaattaccgcaaaaccggcgatgtatccgcaccgcctgttccgtaaaagtaaaaatgccgtctgaaaccccatatgccgccatccggcccgtcgacgaatccgcattgacgctgatgcacctcctcaaacacgaactgcccgatacaccggcaatcggcatcaaaacgaaatcaaaaacctgtttgaacgtaaaattaatttaactgcttgccatccgtccgaataaggtatatagttctttataactagtttgatagttctttatatctatcaatactccttgggaagcctccgccacacggcaggaggcatttttttgccgtcgtaaaagcgcggaaaccatttgcaggcaatgccgtctgaacccgaaacggcatcttcccgtccgccatcccggggcaagcctgctacaatacgccttttattgttcacgccgattttgccatgaccgagccgacctacatcccgctgcgcctgcataccgagttttcgattaccgacggtatggtgcggattaaaaaactgattgccaaagcgcaggaatacggtttgcctgctttgggcatcagcgatttgatgaacgaatttggtttggtgaaattctataaagcctgccgcagcgcggggattaagcccgtcggcgcggcggacgtatggataggcaatccgaatgcgcccgacaagccgttccgcgctatgctgattatccgcaacgatgcgggctatctgcgcctgagcgagcttttgacggaggcctatgtcggcaaagaccgcaatgtccatcacgcggaactcaatcccgaatggctggaaaacggcgacaacagcggcttgatttgtttgagcggcgcgcattacggcgaagtgggcgtgaatctgttaaacggcaatgaagacgcggcgcgggcggcggcgttgaaatatgcggcgtggtttcccgatgcgttttatctggagttgcaacgcctgcccgaacgccccgaatgggaggcttgcgtttcgggcagcgtgaaactggcggaggaattgggcttaccggtggtggcgacgcatccgacgcagtttatgagccgcgacgatttcaacgcgcacgaggcgcgggtgtgcatcgcgggcggctgggtattgacggacaaaaaacgtccgcgcgatttcacgccgggtcagtttttcattccgccggaaacgatggccgaacgtttcgccgatttacccgaggccttggaaaacacggtggaaatcgccaaacgctgcaacctgcacatcacattgggcaaaaacttcctgccgctcttccccacgccggacggtttgtcgctcgatgactatctcatcaagctctcaaacgagggtttgcaggaacgtatggttcagctttatcccgacgaggcggagcgggcggcaaaaatgccggaatatcaggaacgtttggattttgagctgaacatcatcatccagatgaaattccccggctatttccttatcgtacaagactttatcaactgggcgaaaacacacggctgtccggtcgggccgggtcgtggttcgggcgcgggttcgctggtggcgtattcgctgaagattaccgaccttgatccgctcaaatacgcgctgctgttcgagcgtttcctaaaccccgaacgcgtttctatgcccgacttcgacgtggacttttgccaaagcaaccgcggccgcgtgattgaatatgtacgcgaaaaatacggtgcggaagcggtcagccagattgttaccttcggcacgatgtcgtccaaagcggtcatccgcgacgtagggcgcgtgttggagctgccgtttaccctgtgcgacaaactgtccaagctgattccgttggaagccaacaaacctctggggttggaaaaagccatggaggtcgagccgcagattcaggaattgattgaagcggaagaagcggacgaactgattacgctggcgaaaaagctggaagatttgacgcgcggtctgggtatgcacgcaggcggcgtgttgattgcgccgggcaagatttccgattacagccccgtgtatcaggcggacgaatccgcctcgcccgtatccatgtacgacaaaggcgacgtagaagacgtgggcttggtgaaattcgactttttgggtctgcgcaacctgaccattatcgaaatggcgcagaacaacatcaaaaacaccaccggcgatatcgtcgatgtcggcaagattccgcttgacgaccagaccgcctaccaaatcttccgcgatgcgaacaccaccgccgtgttccagtttgagtcgaccggcatgaaaaaaatgctgaaaacggcgcatacgaccaagtttgaagaactcatcgccttcgtatcgctctaccgccccggcccgatggacaacatccccgacttcgtcgcgcgcatgaagggacaggaattccaatacatccatccgctgctcgaaggcatcctcgcgccgacttacggcattatggtgtatcaggaacaagtgatgcaggcggctcagattatcggcggctactcgctcggcggcgcggatctgctgcgccgcgcgatgggtaagaaaaagcccgaagaaatggtgaaacaccgcgaaatcttcgccgaaggcgcggcaaaacaaggcatttcgcgcgaaaaatccgacgaaatcttcaactacatggaaaaattcgccggctacggtttcaacaaatcccacgccgccgcctacgccctgatttcctaccagaccgcatggctcaaagcccattaccccgccgaatttatggcggcgaccatgtcgtccgaattggacaacaccgaccagctcaagcatttctacgacgactgccgtgccaacggcatcgagttcctgccgcccgacatcaacgaatccgactaccgcttcacgccgtatccggacatgaaaatccgctacgcactcggcgcgattaaaggcacgggcgaagccgccgtcgaatccatcaccgccgcacggcaaagcggcggcaaatttaccggcctcttggacttctgcgagcgcgtcggcaaagaacatatgaaccgccgcaccctcgaagccctgatacgcggcggcgcgttcgacagcatcgaacccaaccgcgccatgctcttggcgaacatcgacctcgctatggacaacgccgaccaaaaagccgccaacgccaatcagggcgggcttttcgatatgatggaagacgccatcgaaccggtgcggctcgtcgacgcgccgatgtggagcgaatcggaaaaacttgccgaagaaaaaaccgtcatcggcttttacctgtccggtcacccgttcggcccgtatgcccaagaagtccaccaaatcgcaccgaccaaattaggctgtctgaaaccgcaagacagcgtgcgcctcgccggattcgtgaccgccgtgcgcaccatgatgggcaaacgcggcaaaatcgccttcgtcagcctcgaagatttgagcgggcaggttgaaatcatgatcggcggccagacgctggaaaactgcgccgactgcctcaaagccgaccaagtgctgattatcgaatccaaagtcagccgcgacgactacggcggcggcgacgggctgcgtattctggcaaaccaagtcatgaccctgcaaacggcgcgcgaacgctacgcccgcagcctcagcctcgccctcgccccgcatcacgacatcggcaaactggtacaactgcttgccgcccaccaactgcccgacacgccgcgcatcccgctgcaactgtcgtatggcaacgaaaaagcgtcgggcaggtttcaagtgccgccgaaatggacggttacaccgagttccaccttattcggcgaactggaaaaactgctcggcagccggtcggtgcgcgtgaattggtaagcaaaaatacaaatgccgtctgaaacccaaaaaccggtttcagacggcattttttaaccgaaataaacgatgccccttaaaacagaagctttaaggggcagagcgttgcggcacatcttttcagacggccttattgtagcaacagttctcatttcgcagtgcgacaatatgttcggaattctagcccttgtgagatgataagtcaataatctatttgtatataaataagacaatcagatatattatcattatttgcaacgttgtttacggagtaataaatggctgccttcaaaccgaacccaatgaattacatcctcggtctcgatatcggcatcgcatccgtcggctgggcgatggtagaaatcgacaaagaagaaaaccccatccgcctgattgatttgggcgtgcgcgtatttgagcgtgcagaaatgccaaaaacaggcgactccctcgccatggcaagacgtttggcacgcagtgtccgccgcctgacccgccgtcgcgcccaccgcctgcttcgagcccgccgcctattaaaacgcgaaggcgtattacaagatgccgattttgacgaaaacggcttggtcaaatccttgccgaatacaccgtggcaacttcgcgcagccgcattagaccgcaaactgacgtgtttggagtggtcggcagtcttgttgcatttagtcaaacaccgcggctatttgtcgcaaagaaaaaacgagggcgaaactgccgataaggagcttggcgctttgcttaaaggcgtagccgacaatgcccatgccttacagacaggcgatttccgcacaccggccgaattggctttaaataaatttgagaaagaaagcggccatatccgcaaccaacgcggcgattattcgcatacgttcagccgcaaagatttgcaggcagagctgaatttactgtttgaaaaacaaaaagaatttggcaatccgcatgtttcagacggccttaaagaaggtattgaaaccctgctgatggcgcaacgccctgccctgtccggcaatgctgttcaaaaaaatgttgggacattgcacctttgagccggcagagccgaaagccgctaaaaacacctacaccgccgaacgtttcatctggctgaccaagctgaacaacctgcgtattttagagcaaggcagcgagcggccattgaccgataccgaacgcgccacgcttatggatgagccatacagaaaatccaagctgacttacgcacaagcccgtaagctgctgggtttagaagataccgcctttttcaaaggcttgcgctatggtaaagacaatgccgaagcctcaacattgatggaaatgaaggcctaccatgccatcagccgtgcgctggaaaaagaaggattgaaagacaaaaaatccccgttaaacctttcaaccgaattacaagacgaaatcggcacggcattctccctgttcaaaaccgataaggacattacaggccgtctgaaagaccgtgtacagcccgaaatattagaagcgctgttaaaacacatcagcttcgacaagttcgtccaaatttccttgaaagcattgcgccgaattgtgcctctaatggagcaaggcaaacgttacgatgaagcctgcgccgaaatctacggagaccattacggcaagaaaaatacggaagaaaaaatttatctgccgcccatccctgccgacgaaatccgcaacccagtcgtcttgcgcgccttatctcaagccagaaaagtcattaacgccgttgtgcgccgttacgactcacctgcgcgtatccatattgaaacggcaagagaagtaggcaaatcgtttaaagaccgcaaagaaatcgaaaaacgccaagaagaaaaccgtaaagaccgggaaaaagccgccgccaaattccgagagtatttccccaattttgtcggcgaacccaaatccaaagatattctgaaactgcgcctgtatgagcaacaacacggcaaatgcctgtattcgggcaaagaaatcaacttagtccgtctgaacgaaaaaggctatgtcgaaatcgaccatgccctgccgttctcgcgcacatgggacgacagtttcaacaataaagtactggtattgggcagcgaaaaccaaaacaaaggcaatcaaaccccttacgaatacttcaacggcaaagacaacagccgcgaatggcaggaatttaaagcgcgtgtcgaaaccagccgtttcccgcgcagtaaaaaacaacggattctgctgcaaaaattcaatgaagaaggatttaaagaacgcaacttgaacgacacgcgctacgtcaaccgtttcctgtgccaatttgttgccgaccatatattgctgacaggtaaagggaaaagacgtgtctttgcctcaaacggacaaattaccaatctgttgcgcggcttttggggattgcgcaaagtgcgtacggaaaacgaccgccatcacgccttggacgccgtcgtcgttgcctgctcgaccgttgccatgcagcagaaaattacccgattcgtacgctataaagagatgaacgcgtttgacggcaaaaccatagacaaagaaacaggagaagtgctgcatcaaaaagcacacttcccgcaaccttgggaatttttcgcacaagaagtcatgattcgcgtcttcggtaaaccggacggcaaacccgaatttgaagaagccgataccccagaaaaactgcggacattgctcgctgaaaaattatcttctcgccccgaagccgtacacgaatacgtgacgccactgtttgtttcacgcgcgcccaatcggaagatgagcgggcaaggccatatggagaccgtcaaatccgccaaacgcctggacgaaggcatcagcgtgttgcgcgtaccactgacacagttaaaactgaaaggcttggaaaaaatggtcaatcgggagcgcgaacctaagctatacgacgcactgaaagcacagctggagacgcataaagacgatcctaccaaagcctttgccgagccattttacaaatacgataaaacaggcaaccgcacccaacaggtaaaagccgtacgcatagagcaagtacagaaaaccggcgtatgggtgcgcaaccataacggtattgccgacaacgcaaccatggtgcgcgtagatgtgtttgagaaaggcggcaagtattatctggtcccgatttacagttggcaggtagcgaaagggattttgccggatagggctgttgtacaaggaaaagatgaagaagattggacggtaatggatgatagttttgagtttaggtttgtactttatgcgaatgatctgattaaagctgaacttaaaaaagaaactttcttcggctatttttctggattagatcgttctactggcaacatttctttgcgttcacatgatttagataaaactaaaggtaaagacggtgtatatcgaatcggaattaaaactgccctttcattccaaaaacaccaaatcgatgaactgggcaaagaaatcagaccatgccgtctgaaaccgcccgtccgttaaattaatctgtccctgcttcagacggcctgaagcagggatttttatatcaaaataaggggaaaaacatgacttggcgcagcctgctcattcaaaacggcggcaaactatccttgcaacgccggcaattgctgattcaacaaaacggcgagtcccataccgtaccattagaggacatcgccgttatcatcattgaaaatcgcgaaaccctgattaccgccccgctcctatcagccttagccgaacatggcgcaaccctgctgacctgcgacgagcagttcctaccctgcggacaatggctgccttatgcccaatatcaccgccagcttaaaatcctcaagctgcaactgaacataagcgaacccttaaaaaagcaattctggcaacatatcgtccgccaaaaaatcctgaatcaagcctttgttgcagacgaaacaggcaatgatcttgcagccaaacggctgcgcactttggcatctgaagtccgttcgggcgatacaggaaaccgtgaagcccaagctgccgccctctacttccaagccctctttggagaaaaatttacccgtaatgacaacaacgccgtcaatgccgcattgaactacacctacgccgtgctccgtgccgcagtcgcacgcaccctcaccttatacggttggttgcccgcattaggcttgtttcatagaagcgaactcaatccattcaatctcgccgatgactttatcgaacccttacgcccattagccgacctgaccgtgatacatttgtacgaacaaggccgtctgaaagccgaactgacccccggcatcaaacaacaccttatcaaaacccttcactgtcaaatcaacatcgaacggcaacatttcagcaccttggctgccatcgacaaaatggtttcgtcatttcaagccggtgtaaccgataaaaacgccaaacaactgaaactgcctgaaatcctaccattgaaagaataccgatatgagtgaggccaaatttatgaggattatcgtcttcttcgacctaccggttatcacggcggcaaagcgcaaagccgccaatcaattccgccagtttttattaaaagacggataccaaatgctccagctttccgtatacagccgtatcgtcaaaggccgagattcgttgcaaaaacaccacaacaggctgtgtgcaaacctgccgcaagaaggctcaatccgctgtttggagataacagaaaagcaatatgccgccatgaaactgctgttgggcgagctgaaaacccaagaaaaaaaggtcaattcagaccaactattattattttaagcccattttttcagaacaaataaaacgggaaacccttacataataaggatttcccgttggggtaattgtagcactgcgaaatgagaaagggagctacaaccaatccaagtcaacatcgccgcaaaaactgattgtagcactgcgaaatgagaaagggagctacaactttttatgggtatgtctgattccgaaatcgattgtagcactgcgaaatgagaaagggagctacaacgcaatttcggcgcaaccgacgcgcaaatcaattgtagcactgcgaaatgagaaagggagctacaactaatatataaggaactttatgagatagattcaggcgcgagaggcgcgaaacttaaagagcggcggggacaaacaaaaatccccaagctgacaacaaggggatttttgcattcctgccaagttttgaaacttcaacaggaaaaatcaaaatgcaaatctctcttaccataggaattttgcaattgactgttacgattgatgctagggttattctagccttaattgtgcttttaagtcaatagaccgccaaaaccgcccgattaagggcggttttctattttgccgcagccattgctaaaacttggggtttttccgctttcgcggactgtacgggctgttccgtcttttgctgttcgtccttgtaagggtaaaggcggactgtttcgggcaaagttgcacatcgcctttgtgaacggcatctgccgtgtatggtttaagggctcgggcggaatttcagcactgcgaaactgctttaaagttcaacataaaattgaaaataaatctgtaccccattgaattaaaatatttaaaatccgcaaattttacacgcggtaaggcgggcgtttcaaaagaaataccttttctcttatcgggatttatgccggtttgtcacgcgatgagccgtcatcttcgattttcttgtctatgtggtacgtaccggcaagcctacgcatcaatgcggcgatgacggcttttttggtcttcttggcttccaaccttgcgataagccttgtatgcccacccctgattccctacctctgccaagccttcctcaaatattcgacgcaatcggtcagcgagtgaaacgggacattgccgtggttggcattcggatattcccggaaaaatacggcggccccgcgcctgtccaactctgccgccatgtgttcggcctgccctgccatgtcgcgttcttccctgcgtttgcaaccgctgccccgttctagcgctccgatgttgaggcagacatcgatgccgtccagccggttttcagacggcataaagtcgagtatctgcctgttgtgccaccaaatcgatggggatacgagccaatgccgtctgaagcggcggtgggaaagcagagaatacagtccgaacagtgcgccgaacgagtgtccgaatacggcggtttcatttttgtccagccggtatttgctttctaaaaaggcggtcagttcgctgtcgataaactcggcaaaacggtctgcctgtccgaactgccgccgttcgtctgctgtggcgttgtctccaagcggcggcgtgtagtcggcggcacgttgtaccaaatcgcgcacactgcctgtcgtgtagccgataccgacaatcaggcagggggcgttgcttcgggtaacggggttgggcatcagcgactgcatgatgttgtacagcgcggggaaaaaggcttcgccgtcgaggacaaagaggacgggatagccttcagacggcatttcgccgagtgttgccgtctgaatccgatagattcgccccgtgcaggtggatttgatttcggtttcaaagacttggggcagtatggcaggttggaatgtgtcggtcggtatgggtttcatgatgttcggcttgtgggtcagactggcggcaagcggtaaaaccgaaccggcaaagcggtctgcctgccggttcggtctgttttccttcgcaatgccatactccggttgtgagagcatagggtatgccgcgcagcttgttgtggtttgatgatgctgcggctgccgtttcagacggcatatttgcctttaaaaactgtaacgcaggtttgccgtcaggctgcgctccgaaccgggaatgttaaaggtgttcgcgctgccgacgcgggcgtagtaatggcggttgaaaatgttgtcggcgttgatttgcagcttcagcttgggcgtgaagcggtatgccgccatcgcatcgaacgtggcataaccgcctgcatgcatccctgcagatgaagtaatgccgctcatcgcgtttacaccgccgccgatggtcagctcgggcgtaacttggtaagtcgtccacaggtttgcgctgtgtttgggcatcagcaggaagatgccgtcgtcgcgcgaattggaggcggttttgatttggctgtgcagatagctgtaacctgcatggatttgccatttcggtgtaaccgcgccgctgatttcggtctcaacaccttccatcacgcgtttgcccaatgcggcgtaacggttttttttgttgttcgggttcaacggtgcggcggcgtttttatccttcatgcggtagaacgaaactcgggtattgaggcggtcgtccatgtagctgcctttgtagccgacttcaaactggttgccttggcgcggtttgagcagcttgccgtcggtgccgaggctggtttgcggtgtgtagagttgggagaagctggcgtacaggctgttgctgccgtctatatcataaaccgcgcctgcgtagccggtgaacttggttcttgaggctttgtgcagggttttgccgtcgcccgactcgattttgtagtgtcccaaacgtccgccgccgatgagcgacagcccgtcgaccggatggaagacggatttgccgtaaacgccgaatttatcaaggtttccagtgtcaagtgtatgtttgtagccgctcgttccggcacgggcattttgtatcaggctgacatagggggtagagtggaaactgtccaaggcgatattgtttgcaacagtcgaacgcccttgttcattagtgctgcggaaacggttgtagtccgcaccaatcacaaattcgttggcggtgttgcccaaggcaaacggccggctgtaacttgcgtcaaccgcaaaggctttttgtttgatgtccgtacccaaacccgccacgtcggcttgtccggcattgttgagtttgctgccggcaaacgtgtaattggaatcggctttccggtcggaatagcgcataccgactttgccgtagccgccgttgccgaagtaatgtttcaaatcggcgaacacgtcgtggctgttcattttgaatcggttccaatccgcgccgacaaatgcgtgttgcggcagggacggcaatttgttattggcatcggcaggcaggccgttgtacggcgcgaggtggcgttgctggtaaagatagcccgcgcccaaaaccgtatcggggttgatgtcccaatccgccgccgcgtagaaggtttcgtgccggttgtttttctcggcgggacgcggagacgcgccgacggtctgcgccatcacgcggccgtgcacgctgccgtctgaattgaggctgcccgatacgtccgcctcggctttatattgtttgtgcgtaccgaaccctgccgccatatgtccttgaaacgctttggtcgggcgtttgcgcaccagattcacgatgccgcccatctcgccgctgctgtcgaacagtccgctcggcccgcgcattacttccacgcggtcgaaggcaaacaggttgggcagcgtgccgttgatactctgcatctgcgcaggcaggccgtcgatgttgtattcgctgtattcgtaaccgcgcgcgtaaaccgaagagcgtccgtcgtcgttgctcaacacgcgcaggccgggcgttttgcgtgccagttggtcgaaggtgtcaacattgcggtctttgacctgccggttggtgatgatactgacggattgcggaatttcgcgcaaagaagccgggatttttgtgccgacggtggcggcaaacgagctgtaatcgccgtttttctcggtggcaatcgcgttgtacgaacgctgccctttgatgtggacggtttccaaatccgccgtttgtgcggcaaaaaccgaagacgaaagtgctgctaaaaccgtggcggcggtcatattgatgcggaaaactgacataaactgtcccattcacataaatgataatggttctattttaataaagcacaacgcggtttgttcggaaaaacatatcgcgcagccgacaaattttgttgaaaatgcgacacgtctgcgttttccgcataaaatctgcctttttactgcaaccaacctgctatgaccacgcccaaactcatcatcttcgactgggacggcacgcttgccgacacgacccaacccatcatcgacaccatgcgccgcagcttcgccgaatgcggttttccgccgcccgaagcggaacgcgtccgcagcctgatcggctacagcctgcccgccatcatccgcgccctgctcaaaatgccgtctgaaaccgccgttgccgacatcgcgcgcacttattccgcgcattacctcaatcccaacaaccgcaatatgacgctctttcccgatgccctgccctgtctggacaaactcaaagcgcaaggatactggcttgctgtcgccacaggcaaagggcgggcaggcttggacggcgccatcagccaaaccgccaccggcggctattggctcgccaccgcctgtgcgggggaatatccctccaaaccctcgcccgaaatggtattcggactctgcggcgaactgggactcgacccaaaagaggcattggtcgtcggcgatacggcgcacgacctgcatatggcggcaaacgcgggggcggcggcagtcggcgtgaccaccggcgcacattcgcgcgaacagctccttggcgcaccgcatctcgccgtattggacgacttgtccgaactgcccggttttcttgcacgacattacgcctgattggtttccgcatcagacactcgaaacaaatgccgtctgaaggttgttcagacggcatttgtgttgcccaaacattcaacgcttgctcaacgtttgcacaaatcgggtttggtttcgccctcgcggcgcagctctttgggcaggacgaacacgatgctttcttccgcaccctctccttcgcgcacggtttcgtgcccccatccgcgtatggttgccaatacttcctgcaccaacacttcgggcgcggacgcgcctgccgttacgccgactttgttcttgccctcaaaccacgcgcgttgcaggtaggacgcgttgtccaccatatacgcatcggttccgatgcctgccgccacttcgcgcaggcggttgctgttggacgaattaggcgaaccgaccacaatcacaatgtcgcactgttccgccaactctttgacggcggtttgccggttggtcgtcgcatagcagatgtcttccttgtgcggattgcggatattggggaaacgctcgttcagcgcggcgatgatgtctttggtttcatcgaccgagagcgtggtttggctgacataggcgagtttgtcggggtttctgacttcgagttttgccacatctccaacggtttcgaccaaaagcattttgcccggcgcaagctgacccatcgttccttcaacctcgacgtgccccttatgcccgatcatgatgatttcacagtcttgggcatccagtcgggcgacttccttatgcactttcgtcaccagtgggcaagtcgcatcaaatacccggaaaccacgttccgccgcttcttgctgcaccgccttcgatacgccgtgtgccgaataaaccagcgtcgcacccggcggcacttccgccaagtcttcgataaacaccgcgcctttttcacgcaggttgtccacgacgaatttgttgtggacgacttcgtggcgcacataaatcggcgcgccgaattcttccaaagcacgctcgacaatactgattgcccgatccacaccggcgcagaaaccgcgcggattggcaaggatgatggtttttccgttcataagttttgcattccgtgttcagacggcattcacgtttttttgccatctttgcgatggacgatattgtcaagcactgccaacaccgcaccgacgcagataaagctgtcggcaatattaaaggcgggataaaaccaattttgccaataaaacaataagaaatcgacgacatgaccgtgtatcaggcgatcgatgacattgcctaacgcaccgccgataatcattgccgccccgattttgccgagggctgcaaactcgtcgcggaagatggcgcgtaccaaatacgcgctcaccgccaccgccaacaccaaaaaaaagtatttctgccagccgccctgatcggcaaggaagctgaacgccgcgcccgggttgtacaccaaggtcagatcgaaaaacgaaggaatgacattgacgcgttcccgatactgaaacgacgacagcaccgcccacttcgaccactgatccagcacgatggcggcaagtgccaatacccaatagcgcgttttacttgaaacagatgaagacatatttttcaacagccggataaaagagtgccattttacccgaaaaccccctgcctgtacccgaaacggcaaatgccgtctgaaacgcttaatgtgcccaaaaaaatcgggcaaaaccgccggccgattaagagacggatttttaccggccgatgccaaccggccttcgggtaatcagtggttgagaataaagaaatgaaaaatatgaaatgtatcggaaatgccgagattttagattgcaaggatttatccgccccgccgtcattcccacgaaagtggggatctagaaataaaaagcagcaggaatttatcggaaatgactgaaaccgaacggactagattcccgccttcgcgggaatgacggggttttaagttgctgtttcgagttgctgttttttgtggaaatgccgaggtcttagagtgcgagaacttatcgacaaacagcccactccgccgtcattcccacggaagtgggaatctagaaatgaaaagcaacaggcatttatcggaaatgactgaaaccgaacggactagattcccgcctgcgcgggagtgacggcatatttttgcattcgataaaaaagaccgtttgaaattttttcagcagacgcaaagtgttgcataaagtattgcgtaaaatgccgaggttttagattgcgcgaatttatcccctccgccattatgaagacaaatcgcggcacaaaaaatgccgtctgaaacaccgtttggcggtttcagacggcatttgctcaaactttatcaggcgtaatggcgcgtttcgccttctccgccgacattctctgcacagcgtttgcagacggtttcatagcctgcaaccgcgcccacatcgcgggtgtagtgccagcagcgttcgcatttttcgccgtcgccggctttggcggcaacggcaagttcatcaccgactttcacttctgctttagacaccagcatggcaaagcgcaattcttcgcccaaagcattcagatagccggccatttcttccggcgcggtgatttcgacttccgcctgcaaggacgaaccgacggtcttgtcggcgcgcaaaggctcgatggcggcggtaacggcttcgcgggcttcgcggattaccgtccattttttcaccaattcggcttcggctttttcattgatggtcgggaactcgtgccaagtatggaagaggacgctgtcttcttcgccgccgccgatgatgtcccacgcttcttcgccggtgaaacacaaaatcggtgcaatcaagagaaccaggctgcgcgtgatgtgatacagggcggtttgcgcgctgcggcgggcgcggctgtcggcttgggtggtgtagaggcggtctttcaggatgtcgaggtagaacgcgcccaagtcttccgagcagaaagaaaccatttctttcacggcaaagtggaaggcataacgcggataaaaatcaccggcaacgcgttcttgcagccgcctcgccaataccagggcgtagcggtcgatttccaccatatccgcctgttgcacggcatcttcaataggattgaaatcgctcaagttggcaaacaaaaagctcaaggtattgcggatacggcggtagctttcggttacgcgtttgaggatttctttggaaatcgccaattcgccgctgtaatcggtggatgccgcccacaggcgcaggatgtccgcgccgaactcgttatacacttcttgcggcgcgacgacgttgccgatggatttcgacattttgcgcccgttttgatccaccacgaaaccgtgggtcagaagctgtttgtacggcgcgcgacccattgatgaggcgcagccggtcagcatagacgattggaaccagccccggtgctggtcgctgccttcgagatacaaatccgccggccattccaattcttcgcgttgtttcagaacggaataatgggtcgaaccggaatcgaaccatacgtccatcgtatcggggagtttgtcgtaatgttcgcaatcttccgcgcttaataattcgcttttatcgagggagaaccaagcctcaatgcctttttcttcgattttttgggcgactttttccaaaagctcggcggagttcggatgcagctcgcccgtttctttatggacgaagaaagtcatcggcgtgccccagtag

SEQ ID NO: 3184 - DNA, 22330 bp, synthetic construct
  source 1..22330: mol_type = other DNA
  misc_feature 1..22330: note = Synthetic
aagttgatgctcaacctataggtacagggccttttgaatttgtctcttatcaaaaagattctacgattcgttataaagcctttgaaaattattgggaaggcaaaacaccagtagatcgtttagttttttcaattacaccagatgctacggtacgtgcagctaagttggcaaaaaatgaatgtcaggttatggcatatccaaatccagcagatattgaaaaaatgaaagcggatgctaatttaaccatgctagaacaaccaggtttaaatattggttacttaaactttaacgttcagaaaaaaccatttgataacatcaaagttcgtcaagctttgaactatgcggtaaataaagatgccattgttaaatcggtatatcaaggagctggaacggtagctaaaaatccaatcccttctaccatgtggagctataacgatgaggttaaagattatgaatattcaccagaaaaagccaaagctttattaaaagaagctggtttagaagctggctttgaaactgaaatttgggcaatgccagtttctcgtccatacaaccctaatgcacgtcgtgcagctgaaatgatccaggctgactgggaaaaagtcggcgtgaagagtaaaatcgtcagttatgagtggggtgaatatctgaaacgtatgcgtgatggtgaacatccaacaggcttcatgggatggaacggtgataatggcgatcctgataatttcttcggtgttttattaaattgtgcatccgtagcacagggatctaactatgcgaaattctgtaataaagactttgatgctttaattactaaagctgcgcaagtttcagataaagcacagcgtacagatctttataaacaagctcaagttttattcaaagaacaagcaccttggatcaccattgcgcattcagtgaactatgaaccaattcgtaaagaagtaaaaggttatgtaatgagtccttttgcattacataacttctatggtgttgatttagctgaataacgctattaaaagtgcggtataaaatcgcaaaatttgttgatgagaattgctttgatattctttttatcaaatagaaattttcaaattttgaccgcactttcatatcctaatgataacaaaacctaacgagaagtttttatgtttcaatttgttctcaaacgtattctaatggttattcctacatttttagccattactttaattacgtttgctttagtccatttaattccaggcgatcctgtggaaattcgtatgggagaacgtggcgttgaccctgctgttcatgcacaaatgatgtcacaaatgggcttagataaaccattggcagagcagtattttaattatgttaaaggtattgcacagggcgattttggtcagtcatttagaaataatgaacccgtattaaaagaattttttaccttatttccagcaacagttgaattagctttttttgctttgttgtggtcactgattgtaggaatatttcttggtgtcattgctgcggtaaagaaggatagttggatatctcactcagtcaccgcactttctttaacaggttactcaatgcctattttctggtggggattaattctaattctttatgtgtctgatttctttggactacctgcaggaggtcgtttatccgatgaattttggatcgattttgatacaggatttatgttgattgatacttggaattcgggagaacctggtgcttttgtagcggcaattaaatcgcttatcttgcctgctattgttttaggtactatccctcttgcagtagtaacacgtatgacacgttcatctatgttggaagtattaggggaagactatattcgtacagcgaaagcaaaaggtttaagcaccacaagagtcgttattatccatgctttacgtaatgcattgatccctgttgtgactgtcgttggtttaattgttggacagcttttatcaggggcagtattaaccgagaatattttctcttggccgggtattggcaagtggatcattgatgctattaatgctcgtgattaccctgtattacaaggttcagttttaattattgctacgattattattgttgtaaatttatttgttgatgtgctttatggcgtggtgaatccgcgtatccgccataattcatagaatttgtgggatcttttaatggcaactgaaataatttcacctatacctaaaacgccgttacaggaattttggtattattttaaacagaataaaggtgctgtcattggattggcttttattgctgtggttttctttgtgtgtgtattcgcgcaatatgtctctccttatgatccaattgctcaacatcgagatgccttattgttaccacctgcttggttagaaaaaggctctagtgcatttttattaggaacagatgatattggtcgtgatattctttctcgtattatttatggtgcaagattgtcggtatttattggcttgatcattgtcgtattatcttgtgtacttggcattttgcttggcgttttagcaggttactacggtggcatggttgatatcgtgattatgcgtatggttgatattatgatggcaattccaagtttattattaactattgcattagtcaccatacttgagccttcattatttaatgcagcaattgccatcgcaatagtttctgtgcccagttatgtaagattaactcgtgcttctgtattgaatgaaaaaaatcgtgattatgtaatggcatctcgagtcgctggtgcgggcgtattacgattaatgtttatcgttattttgcctaattgcttggctccactgattgtgcaaatgaccatgggaatttccaatgctatcctagaattagcagcactcggttttttaggcattggcgctcaaccgcctactccagagctaggtacaatgttggcagaagctcgtagctttatgcaatcagctaactggttagtgacgattcctggcattgctattttgcttctcgtattagcattcaatttaatgggtgatggcttacgtgatgcactcgatccaaaattaaaacagtaaggagaggatgatgtcattattaaatgtaaaccaactttctgtccattttggcgatcacaacataccatttaaagcggtagatggtattagttattccattgataatggtgagatattaggaatcgtaggtgaatctggatcgggtaaatctgttagttctttagctattatggggttaattgattatccgggacgtgtttcagcagagtctctttcatttgatggcgtagatttattaagcttaacggaaaaacaaaaaaggaaattagtgggagctgaagtctcaatgattttccaagatccaatgaccagtttaaatccttgctataccgttggttatcagattatggaggcactaaaagcacatcaaggtggaagtaaaaaacaacgccgtgaacgcacaattgaattactcaaacaagttggcattcctgcccctgaatcacgattagaggtttatccacatcagttgtctggggggatgtcacaacgggtaatgattgctatggctatcgcgtgtaaaccgaaactattaattgctgatgagccgacaactgcattagatgttaccattcaggcacaaattgtagatttattattaagtctacaaaaacaagaaaatatggcattagtgctgataacccatgatttagccttagtcgccgaggctgctcatcgtattattgtgatgtatgcaggtcaagttgttgaggaaggaattgcagatgaaattttcaaggcacctaagcatccttatactcaagctttattaagatccttacccgagtttgcagaaggtaaatctcatttagattctttgcctggtgtagttcctggcaaatatgatcgaccgcaaggttgcttgttaaatccacgttgcccttatgcgacagagcattgtcgtcaagtagaacctgaattaagacagttagattcaggtcgtgtgaaatgccatacaccattaaatgcacaaggagaaccaagtaatgactgagcaaccgaatcaaacagcaccattgcttgatgctgtcaaacttaaaaaatattatcctgtgaagaaagggctatttgctaaacctcaaatggtcaaggctttagatggtgtttctttccgtctagagcgtggcagaactttagctgtggtaggagagtctggttgtggtaaatcgacattaggtcgccttttaacgatgattgaaacgccaacagcaggagaattattttataacgggcaaaattttttagttaatgataaagccacacagaaattacgtcgtcaaaaaattcaaattgttttccaaaatccttatggttcactgaatcctcgcaagaaaattgggacaattttagaagaacctttagtcattaatactgatctttccgctacagaacggaaaaaacgagtgctagaaattatggctaaagtagggcttcgcccagaattttatgatcgttatccacatatgttctctggtggtcagcgtcaacgtattgctattgctcgaggactaatgctacaacctgatatcgtcgttgcagatgaacctgtttctgcattagatgtttcagtacgtgctcaagtattaaacttaatgatggatctacaacatgaaatgggattatcttatgtgtttatttcccacgatctttctgtagtagagcatattgctgatgaagtcatggtgatgtatttagggcgttgtgtagaacaaggaacagtggagtctattttccaaaatccacgccatccttatactcaagctttgctttccgctacaccaagattatcgcctgagttacgcacagagcgtattaaattggaaggggaactaccgagcccattgaatccgccaaaaggttgtgcttttcatgctcgttgtcgtttagcaacagacaaatgccgacaagaacagcctgtattaaaaacctatccagatggcactcgtattgcttgttttatggtggattaatttaaaaagtgcggtagtggaatagaaaatttttgtaaattttaccgcactttgctctcaattttataattatcagcgcgtaataaaaaacggtaagacaatatcttaccgttttctttttgtgttatcttaaatagctggcttatacataaccataattcattaaacgttcaaaacgacgttctaataaactttctttatcaagtgtatctaattcttctaaatcatttaaaatacgctcttttaaggctttagccatttcatcataatgacgatgtgcaccacctaaaggctcttgaacaatattatcaattagatttaattcttttagacgacttgcagttagccccatgacttctgctgcggttgaagctttttctgcacttttccaaaggattgaagcacagccctcaggagaaatcacagagtaagtactatattgcaacatattaactttatcaccaacaccgatggctaaggcaccgccagaaccaccttcaccgataacagtacaaataactggtacagttaacgttgacatttcacgtaagtttcgagcgatcgcttcagattgtccacgttcttcagcacctactccagggtaagctccaggagtatcaataaaggtaataattggtaagcggaaacgttctgccatttgcattaaacgtaatgctttacgatagccctcaggtgcgggcatgccaaaattacgtaacactttgtcttttactgtacgacctttttggtgaccaataaccattactgggcgtccatctaaacgagctagcccgccaacaatagctttatcatcagaaaaagcacgatcaccagccaattcttcaaattctgtgaaaatacgagaaatatagtctaaggtataagggcgattaggatggcgagccatacgagaaacttgccatgcatctaaatcagcaaaagttttctttgttaattctttactttttttctgtaatcgtttgatttcatcattaagatcgattttattatctttatctgtcacagaacgtaatgattcgatttttgcctcaagttcagcaatcggtagttcaaaatctaaatattcagtttggttttgttgactcatttttgttctcaatatccttaacacaaaataataattgcactttaccagtatttttatagtggtgcaaatgtgagacttattttacgctcttttggtataaaaatctgtgattttttatgaggtttatccactttgactatgaacaaattagcaatataaaaaaagcatttcttcgacgaatttaggtacaacttcagttgcaggtccgtaatgaccaattctgaaagctgctcgacctttactaggttctagattcaattcaatggttttagcaccattgaaattagcttcttgtacaaaacctgcggcaggatatacatttccagaggttccaatagaaataaaatataaacaatcgcgaatttcttcattaatacgatccattgccagaggcatttcattgaaccatacaatattaggacgcaaaggttgaggagtatggcaacaagtgcatttatcttgcgcagtccagtctttttcccacgcatacactttgcctgaatgctcacaacgaagctccaataaactaccatgcatatgaataacgttttttgagcctgcacgttcatgcaaattatcaatattttgtgtaacaattagcagattattgccgaatttttcttctaattttgcaagtgcaagatgtgccgcattaggttgaattttaggatcaaataatttatgacgtaaaccattataaaattcacgcactaactgaggatttctggcataaccttcaggtgttgcaacatcttcaatatgatgttcttcccataacccatcttcagaacgaaaggtgcggattcctgattcagctgaaatacccgcgccagttaatacaacaattttaggtaattttggcatagcttaactctcaatataaaatcaactgttttatgatactcctatctcaataaaattgggcaattaaatatagatatggatcaaaaaattgtagagtaatttaagattggtaaagtgcggtggcaaagccgaaaattttggttttttatagcgcactattaaattaaataattttataaaatttcattgccttttatagcaaagaaaatggctaagaatattgttatttttgatatttgccggtattaaaccagttgacataatttagctggtcataaaattttttaccattccaacctgaaaattcaaacaaatctcctacttgtgattgatgctcaaaaccaggaatataaagtgaagatgcaaactctggatattttttgtgagtaaatattattttatttgggaacggcagtgcatcaaaggcttgtaagtgctcataagtacaaccgtcacgatctgtcattaaaataaaaagattatctaaattcatccgtttagttcgttctgcccatttacgacttgcctcatcttcagaatggtagtgcataaaatggatcgttagatcttctaatttccctacaggataatgcttatcggaagccacaaaatttaatttagcttgcatataatgatcaatattttgcaaatatttaataaaatcagcaggctctaaatataaattcacaaaaggtgaattaaatttttcgcctaaatcatgcaagataaaagcaccattgcaattactggaaattacagtcatatcatggtttgtcagatgttgacgatctttttgattaatggattgacgtaaaaatctattgattgctttttttattaaattttgcatgatatttattctctagctaatagggtaaaattttagacttcaattaggattattttactcattatgagatgaaataaaagtgcggtcttattccgcaaaattttcttttatttttcatataaataccagcaaccgtttgcttgcgaaatagatcacaaatagaaaagaaaagtataataaaacatttgaattttctttattttccgataggctaataacatttttactcatatttgttcaaaaacgaaaggaagaacgatgaaaactattttaaatattgctgagaagtggttagcacaagatcccgatagtgaaactcgtgcagaattatctcaattaattgaaaaaacaaaactaggtgatgaacaagctttaattgaactagaaagccgttttgatggacgtttggaattcggtactgcgggtttacgtggacgcttacaagcaggttctatggggatgaaccgtgttttagttgtacaagctgctggcggtttggctgaatacattaaaggctacgataaacaaccatctattgtgattggttatgatggacgtaaaaattcggatgtttttgctcgtgacacggctgaaattatggctggtgcaggagtaaaagcctatttattacctcgtaaattaccaacaccagtgttagcttatgcgattaatcatttaaacacttcagcaggtgttatggttactgcaagccataatcctccagatgataatgggtataaagtttatttaggtaaagaaaatggtggtggacaaattgtttctccagcagataaagagattgcagcattaattaataaagtagcggaaggaagtattgctgatttacctcgtagtcaaaatattgttgttttagatgatgaagtagtgaatgcatatattgaaaaaacagccgccttagcaaaacagccatcatctgaaattaattatgtttatacggctatgcatggcgtaggctatgaagttttaagtaaaacgcttgaaaaagcaggtttacctcagccacaattagtgccagaacaaatttatcctgatggcacattcccaactgtgaattttccaaacccagaagaaaaaggtgcattggatttagcgattaaagtggcaaaagagaaaaatgcagaattcattattgctaatgacccagatgcggatcgtttggcagtcgctatccctgatgctcaaggcaattggaaaagtttacatggtaatgtattaggttgcttatttggttggtatttagctcaacaatatcatgcccaaaataaaaagggcgtgctagcttgttcattagtttcctcaccagcactagcagaaattgctaaaaaatataatttagactctgaagaaaccctaacaggctttaaatatattggtaaagtaaaagggttactatttggctttgaagaagcaataggttacttagtggatccggataaagtccgtgataaagatggtatttcagctgccgttatgttcttagatttagttcgttacttaaaacatcaaggtaaaactattctagattatatggaagattttaaccaaacctttggtgcttatgtgagcggacaaatttcaattcgtgttagtgatcttagtgaaatttctaaattaatgaccgcacttcgtaacaattcaccaactgaaattggcgggtttaaagttacacaagcactcgatcatttaaaaactgaacgccaaaataatattttggtatttatgttagaaaatggaagtcgcttaattgtacgtccatctggaacagaaccaaaaatcaaattctacttagacgctaaaggcaaagattcagcagatgcagaccaagtattagcaaactttgatgcatcagtgagagcaatgcttagacaagagcaatatggtaaacaagattgctaaaaataaaaactaaacaaaagcgaacaaatatgttcgctttttttataaacgatgccccttgaaccgaagtccaaggggcagagcgttgcgagaaatttttctcttattgtaacaacgtttttcatttcgcagtgctattacaacgggaaaataatatctaggcactagctgaaagtcaatatattttctattgatattatggtaaaagtagagtctataatattcaattctaatgagtgtgagaataacgaatatgtttaaaccattaaactatattttaggtctagatttaggaatagcatctgtgggttgggctgtagtggagattgatgagcagggaaatccgcttcgcttaattgatgtgggcgtgcgtacttttgagcgagctgaagtagcaaaaacaggtgaaagtttggcgttagctcgtcgtttggctcgttcttctcgccgttcagtgaaacgccgtgcagtgcggattaaaaaggcgaaacgcttgcttaaagctgaaaatattctgctttcagttgatgagattttaccaaacgatgtttggcaatttcgtgtaaaaggcttagatcataaattagaacgccaagaatgggcagcagtattgttacatttattgaaacgtcgtggctatttgtcgcaacgcaaaaatgaaagcaaacgtgaaaataaggaactgggggcgttgctgtcaggtgtatcgaccaatcatcaaattttacaatctgctgaatatcgcacgccagcggaaattgcagtgcataagttccaagcggaagatgggcatattcgcaatcaacgtggggattatacgcacacctttagccgtttggatttattggcggaaatggaattgctatttcaacgtcaaaccgaattgggcaatcaatacacttcttcaaaattattggaaaatttgaccgcacttttaatgtggcaaaagccagcattgacaggtgaagccattttaaaaatgttggggaaatgtacttttgagccaaccgaatgtaaagcagcgaaaaatagctactctgccgagcgttttgtgtggctgacgaaactgaacaatttacgcattttagaacaaggagcggagcgagctttaactgatagcgagcgttttgctttgctcgatcagccttataaaaaagcgaaactcacttatgctcaagttagaacactgttgaaattgtctgatgaagcaatttttaaaggtgtgcgttatcaaggcgaagataaaaaaacggtggaaaataaaaccacgttaatggaaatgaaagcctaccaccaaattcgtaaggcattggatggggcagatttaaaagacgaatggaataggcttaaaaatgattctgcgttgcttgatgaaatcggtatggcattttcgctatataaaaccgatgatgatattagccattatttaggcggtaaattgtctgaaaaggtattgaacgtgttattggaaaatctgaatttcgataaatttattcagctttcactcaaagccttgcagcaaattttgccattgatgttacaggggcaacgttatgatgaagcggtttcaacagtttatggcgatcattatggtaaaaaatcagcagaatcttgccgtttgttgcctgccattccagctaatgaaatccgcaatcctgtagtgttacgcacactgacccaagcccgcaaagtgatcaatgcggtggtgcgtttatacggctcgcctgctcgtattcatattgaaacagggcgtgaagtgggcaaatcctatcaagatcgtaaaaaactggaaaaacagcaggaagaaaaccgcaaacagcgtgaaagtgcggtgaaaaaattcaaagaatatttcccgaattttgtcggcgagccaaaaggtaaagacattttgaaaatgcgtctgtatgagttgcaacaatcgaaatgtttatattcaggcaaatcatttgatcctaatcgcttgttggaaaaaggctatgtggaagtggatcacgccctgcctttttctcgtacgtgggatgacagctttaacaacaaagtattagtgcttgccaatgaaaaccagaacaaaggtaatttaacaccttatgaatggttagatggcaaaaataatagtaaacgttggcaagattttgtggctcgagtacaaacttgctgtttctctcattggaaaaaacaacatattttaagtcataaattagatgaaaaaagctttattgaacggaatttaaacgacactcgttatgtggctcgttttttgtgtaattttattgctgataatatgttgttgacgggtaaaggtaaacgcaaagtgtttgcttcaaatgggcaaattacggcgttattgcgtggacgttgggggttacagaaagtgcgagatgataacgatcgccatcatgccttagatgcagtggtgattgcttgttcaacggtggcaatgcagcaaaaaattactcgctttgtgaaatatgaagagggtaatgtatttagtggtgaacgtattgatcgtgaaacaggtgaaattattcctctgcattttcctacaccttggaagtttttcaaagaaaatgtggagattcgtatttttagtgagaatcctaaattagaacttgaaaatcgtttgcctgattacccgcaatataatcacgaatttgtgcaaccattgtttgtgtcgagaatgcctactcgcaaaatgacgggacaagggcatgaagtgaaattacgttcagcaagaaagcttgatactacaggaaagagtattaaaaaagagtttttaactgatctaacgcttaagaatcttgataatatgatgaataaagagcgtgagccagaactttatcaatcactggttgaacattttaagaaatatggagataagcctaaagaaaaattttttaagaaaggtggtacagaagttaagtcaattcgaatctgtaaaacccaaaataaatttgtagatttaggtaataaaactattgccgataatggagatattgttcgcacggatctatttttaaaagggaaaaaatactattttgttaatatctatgcttggcaggttgcagaagatattttgccaagagagacaacaacaggagatttattggacgattcttatatattccaatttagcttgtttaagaatgatgtattagagatttctcaccctgaagatgaaaataaaagcgtttttgtttattttattcgtccagatgatgaaagaagatggattttaaaatttcatgataacgctaaaattccgaacatatatggaaaaaaagatgaaacttctattcgtttaagtattcaagggcaaaaatttattcgtaaataccaagtcgatgaacttggtaaaaatatccgcccttgtcgtccaactaaacgacaaaatgtacgttaattcaatccccacacttttacgagtgtggggatttttgtatttaaggaataatctatgacttggcgtagtattttaattagcaaaggtggaaaattatctttgcaacaaaatcaaatgttaattcagcaagagggcaatgagtttactgtgccgttggaagatattgcgattgtggtggtggaaagtcgggaaaccgtgattaccattccgttattgtctgcttttggattgtatggcattacgcttttaacttgtgatgagcaatttttgccttgtgggcaatggttgccgtttaatcaatatcatcggcaattaaaaacgctaaaattacagctagatgcgagtttgccacagaaaaaacaactatggcaggcgattgtacagcagaaaatccgtaatcaagccagtgtgctgaaaatttgcaaatttcagatagaatctgaccgcttattgaaaatggctgaacaagtgaaatctggcgataaggagaatttagaggctcaaagtgcggtcatttattttcaaactttatttggtaaaggatttaaacgtacggaagatgaaaatgcagtaaacagtgccttaaattatggctatacggttatgcgttcggctgtggctagggcgttagtactgtatggctggttaccgcaaattggcttatttcatcgcagtgaactcaatgcctttaatttatccgacgattttatcgaaccatttcgtccattggtagacttgcttgtggttaagctcgccaatgaagataaactctcctttcatttatcacctacgttaaaacagtgtttaattaaggtgctgaattatcagctactgtttaaacaagaaaaagttaatgctttaacggcaatagatcgaacggtaagttctttacaagctgctctgataagtagaaatagtgatttgctaaaattacctggaattttaccacttgcggagcatcaatatgagtgagaatgtttttatgcgtatgattgtgttatttgatttgcctgtcacaaccaaggcaaaaatgcgtgccgccaaccagtttcgtcaatttttactgaaagatggctaccaaatgttgcaactttccatttacacacgtcttgtgcgaggtcgtgattcaatggaaaaacatcataaacgattagtcgaacatttgcctgaagaaggagcaattcgctgtatctccatcacagaaaagcaatttgccaatatggaaattctagttggtgagaaaaaactgcaagaaaaaaaggttaattccaaccaacttttgctgttttagtgttattttttatgtaagaaaaaagccttgaaacgctgtatctcaaggctttttaacatccctattatagcactgcgaaatgaaaaagggagctacaaccaatgtagcccgtttatgttttccagacctattatagcactgcgaaatgaaaaagggagctacaacatggaactgtatgctaatgtagtgccatcgattatagcactgcgaaatgaaaaagggagctacaacaagtatggatttattagcagccctgatattattatagcactgcgaaatgaaaaagggagctacaacgagggtttaatgatcttaccttatgatgtgattatagtactgcgaaatataacacttgtattattaaacgtaattttttgacttattattaaaaagtaaattacttgatataggttttatttaaatattcgagaaaaattattttcaatataacaaaaataagccctaaaaagggcttattttaataaagtttattcccactcaatcgttgctggtggttttccgctgacatcatacactacgcgggaaatgccgctgacttcgttgatgattcggttggagattttgcctaataaatcatacggcaagtgtgcccaatgtgcggtcataaagtcgatggtttctactgcacgtaggctgacaacccagtcatatttacgaccatcgcccattacgccgacggattttactggtaggaatacagtaaaggcttggctcactttgtagtaccagcctgaattgtagagttcctcgatgaaaatcgcatctgctttacgtaataaatcacagtattcttttttgatttcgcctagcacacgcacacctaagcctgggcctgggaatgggtggcggtttagcatttctgctggcaagcctaacgccaagccgattttgcgaacttcgtctttgaacaattcacgtaatggctcaactaagccgagtttcatataatctggtaagccaccaacgttgtggtgtgatttgattacgtgggctttgcccgttttacttgcggcagattcaatcacatcagggtaaattgtgccttgagccagccatttcacgctggtgagttttttgctttcgtcatcaaatacatcaacaaacactttgccgatagttttgcgttttgcttcaggctcatcaatgccttttaaagcgtctaagaaacgctcttctgcattcacacgaatgatgttcaagccgaatttgtcgccaaacatttccattacttgatcgccttcgtttaagcggagtaagccgttatccacgaacacgcagtgcaagtttttgccgatagcacggtgtaataacagtgcagttacggaggaatctacgccgcctgacaagcctaaaatcacttcatcattgcctacttgttctttaatgcgagctactgcatcttcaataatgttttcaggtgtccagttacgctcacagccacagatattcactacgaaattagttaacaatgctaagccacttttggtatgagtcacttctgggtggaactgcacaccatagaaatggcggctttcatctgacattgctgcaatcggacaagttggcgtaacacctgtaacttggaagccagtaggtaagcgagtcactttatcaccatggctcatccaaacatctaattttggatcgcaagcggtcacatcatcatttaatttttcaaataatttgtccgcactttgtagttgaaccgatgcataaccaaactcacgatgatcggacgtttcagttaaaccgcccaactgcattgccatggtttgcataccgtagcacacgccaagcacaggtacgccagcgttaaacacatattcaggggctcgtgggctattgtcttcagtggtgctttctggaccacccgaaagaataatccccgttgggttaaattcacggatttgctcttccgtgacatcccacgcccaaagctcgcaataaaccccaatttcacgcacacggcgtgctatcagctgcgtatattgtgagccaaagtctaaaattaaaattttatgattgtgaatgttgttcattggttttctctttaagtaaatcatttctctgaattttcacatccagaggtatcaagaacttgtaatccttcttttttatagattgcaaatttgccttgtcggcaactagcaccaaaaatattttgaaactgcttagttggctttccttcagcaattaaatatagatcgccacgttcatctgtcatttgttttttgatgacccaattatttttttgtaaggctttcagtacgctttcttgggactggccttcatacatatcaggcacgccactggatgaccaatcatttgcacaagctgaaatcataaataccactgaaagtaaaattaattttttcatttgatttattctcctaactaaatatacaagtgcttaaatttattcaaaattttataaaatctaaccgtttgtattatagcttagcccatacggtagtttggtgcttctttagtaatggttacatcgtgaacatggctttctttgatgcctgcaccgctgattcgcacaaattgggctttggtgcgaagttcttcgatggtggcacagcctgttaagcccatacaagaacgcaagccacccatttgttggtggataatttcttttaagaaacctttgtaagcaatgcggccttcaatgccttctggtactaatttgtcagcggcgttgtccgactggaaataacggtctgacgagcctttgctcattgcccctaaagatcccattccacggtaagatttgaatgctctgccttggtaaagttcgatttcacccggagcttcttccgtgccggcgaacattgagcccaccattacacagcttgcacctgccgcaatcgctttagaaatatcgcctgagtagcgaataccgccatcagcaatcacaggaataccacgatcttttaatgcttcagcagcttctgcaatagccgtaatttgtggcacgcccacgcctgtcacgatacgagtagtacagattgaaccagggccaatacctactttcaccgcacttgcaccagcgtcagcaagagcaattgccccttcagcagtagcgatgtttcccgctacaattggtaaattaggatatttagcacgagtttcacgcacacgttgtaacacaccttcggagtgaccgtgtgagctgtcaattaaaagtacgtctacgcccgcagcaactaatgcctcaatacgctcttcattaccagggcccgcgccaacagcagcgcccacacgtaagcgaccgaattcatctttacaagcattaggtttttgttccgctttttggaagtcttttagggtaatcataccttttaatttgaatgcatcatcaacaactaatactttttcaatacggtgttggtgcattaattcaaaaatttcttcacgagcagcaccttctttaacggtaacaaggcgttctttaggtgtcataacatcagcaactaatgtatctttgtcgctcacaaaacgtgtatcacggccagttacgattcctactaaatcaccattttcagtggtaacaggataacctgcaaatttattttctttcaccatttctgccaattcgcctaatgttgcagtcggacgaacagtaacagggctagaaacaataccactttcaaattttttcactttacgcactcggtctgcttggcgttcaatagacatatttttatggataaaaccgatgccaccttcttgtgctaaagaaatagctagttttgcttcagtaactgtatccattgccgctgataacataggaatgtttaaacgaatggttttggttaattgagtagaaaggtccgcggtatttggaagcacagttgagtgtgcagggacgagaagaacgtcatcaaaagtgagggcttcttgtttgattcgtaacattgcaatatctctctttgttataaggttaagttaaaaaatattgcggacgtattatacagggttcaaaatcatttgaaaataaaatttaaaaaaaattcagtttctgttaaaagtatgatacaaagataaattaaatttttactgagggaatttatgtctaccttattagaagttttagcggatgggcagccacattcttttgaagaacttaccgcacttttaaacctttcaaaaatagacttactcgatcaacttgaaacattacaatttcaaggtctccattttcatagttcattaaatgatgttcaattaattcctcaattagatttattagatcaacaccgtttatctgaggcattaaaaccaagcaatgtgattattaaaccgattattgattcgactaatcaatatattattgaacatttggatgaattaaaaaaaggcgatttatgtttatctgaacaccagaccgctgggcgaggtcgaagaggtcgtcaatggctatcaccttttgccggtcagttaattatgagtttttattggacctttgatcctagaaaatctttagatgggttaagccttgtgattggtatggcgattgcggatgcattaaaaagtgcgggggcaaatgcaataaatttaaaatggcccaatgatctttatttatcggggcgtaaattggcgggaattctaattgaaattgctaatcgaaaaaatggcttattaaatgtaattgttggaatcggtattaatttgtctttgcctaaacaagagcatctgattgatcaaccttgggcagaattatgcgaatctctaccgcacttagatcgcaatcaattagttattcaggttgttaataaactatatcagtatttagaccagtttgaacgggatggaattgacgaaacttttcgtaaaaaatggagtgaaatggattttgctattaatgaactcgttaatgttattacggataaacagattattgttggagtcaatcaaggcattgatgagagaggttacattgttattaaaacagaatctggcgaaatcatgaaatttaatggcggtgaagtgtcgttgagaaaaggtagttagctactatattatagagaattaaaagtgcggcggaattttaaaaaattttaccgcactttttattgaagattagataactttttggatcaatgcagaaacatcactcgggaaagtttgagttttagccatatcttcaatttgttgtgccgtataactattagcgttatacaccacaacaatgctggtatcatctttttgtaaataatatgtttcaccaaatttagtataacgagttgcgcctatgctgataatcgcttgtttaggatagttagccaaagcgattaattcagcaatattattcattggtccctgatctggctgaatattcatacgatctatcatccaattaagtaatttttcgtgaaaataactatagccagtcacagggctatccacgccatatacattagtttcaccattacgttcgtgaaaacaggcaatatgatattgatctacttcgcatcctgttttaaaacttgttaatgggaataaagtgtttgatagacctttagtatttgccccccagtttttcttttcacaaatcttatttgcatttggacgacgaatagaacagtcattataagcaccaaatgcacagggtattaaattaaccactttattattttcatagacgatatcaaatagaatcgccaattcaggttcaatttgaagattatctgagtcactaccagggtgggacagcgtatctgaacttaaaggataaatggataagaaacctgctttttcagaaggcacataaaaagggaagattgctttaggttggattttttcatcagtttttacagcaacaaagtccgcagcttctcctgcttgctctaaatggccagcaaaattcccagctacacctaagccaataatatttctatatttcatttcttatacctattataaagtaaataatgaattactttactggtaatctgtgcacaaaacaatctaaattggttgattaatatgcaaaagcaaaaaaaattttaaatttttgaaaaaagcgcttgcaaaggtttctgaaatccctataatacgcagcacacaacgacgcactgttgtgaaacgataagaaaacactgtgcgtcgttattttttgctctttaacaatttatcagacaatctgtgtgggcacttgtaagatttggttttgaaaaaaatatgaagtcttaaggtgctgaacaaagttaatttaattagcgattaaagtcagtattttgagcgattaaactttttaaattgaagagtttgatcatggctcagattgaacgctggcggcaggcttaacacatgcaagtcgaacggtagcacaggggagcttgctccctgggtgacgagtggcggacgggtgagtaatgcttgggaatttggcttatggagggggataactacgggaaactgtagctaataccgcgtaatgtctacggactaaagggtgggactatttggccacctgccatgagatgagcccaagtgggattaggtagttggtggggtaaaggcctaccaagccgacgatctctagctggtctgagaggatgaccagccacactggaactgagacacggtccagactcctacgggaggcagcagtggggaatattgcacaatggggggaaccctgatgcagccatgccgcgtgaatgaagaaggccttcgggttgtaaagttctttcggtgatgaggaaggcaagtattttaatagaatacttgattgacgttaatcacagaagaagcaccggctaactccgtgccagcagccgcggtaatacggagggtgcgagcgttaatcggaataactgggcgtaaagggcatgcaggcggttgtttaagtgaggtgtgaaagccccgggcttaacctgggaattgcatttcagactggacagctagagtactttagggaggggtagaattccacgtgtagcggtgaaatgcgtagagatgtggaggaataccgaaggcgaaggcagccccttgggaatgtactgacgctcatatgcgaaagcgtggggagcaaacaggattagataccctggtagtccacgctgtaaacgatgtcgatttggggattgggcaataagcttggtgcccgaagctaacgtgataaatcgaccgcctggggagtacggccgcaaggttaaaactcaaatgaattgacgggggcccgcacaagcggtggagcatgtggtttaattcgatgcaacgcgaagaaccttacctactcttgacatccaaagaatcctgtagagatacgggagtgccttcgggagctttgagacaggtgctgcatggctgtcgtcagctcgtgttgtgaaatgttgggttaagtcccgcaacgagcgcaacccttatcctttgttgccagcgacatggtcgggaactcaaaggagactgccagtgataaactggaggaaggtggggatgacgtcaagtcatcatggcccttacgagtagggctacacacgtgctacaatggtgcatacagagggaagcgagcctgcgagggggagcgaatctcagaaagtgcatctaagtccggattggagtctgcaactcgactccatgaagtcggaatcgctagtaatcgcaaatcagaatgttgcggtgaatacgttcccgggccttgtacacaccgcccgtcacaccatgggagtgggttgtaccagaagtagatagcttaacggaaacgggggcgtttaccacggtatgattcatgactggggtgaagtcgtaacaaggtaaccgtaggggaacctgcggttggatcacctccttaccgaagaccgacttgcacgtgctcacacagattgtttgatagaaag

SEQ ID NO: 3185 - DNA, 22277 bp, synthetic construct
  source 1..22277: mol_type = other DNA
  misc_feature 1..22277: note = Synthetic
acacgcaccgtgccttcaatcgtatcgcctgtgtgcaaattgaagcggcgaatttggttgggcgaaacgtaaatatcatcagggcaagccaaatacgatgtggcagcggaacgcaaaaagccatagccatcgggcaaggtttctagcgtgccagaacagataaattcttgtccgtctttcatcagctcgcgcacaatggtaaacacaaggtcttgcttgcgtaggcggttggcgttttcaatacccatttgttcggcttgtgccaacagttcggtaatgtgtttggtttgtaattcagaaacgtgcataaagataatttttcagataaaaagcagcctgcactttttgtgtgatgcaaatacgcggtgcattgggctgggttggaataatcaaaataaatatatagtgagataaatcggaaagttgtgcctgatttggcagagaacgtaaagtggcggattataagaataagtcgcaaaataagtcaagaaagcgtaaatgtgcaggttgctttttttgcttattcggtttatgatgccattttcagactttatcaaacagcacaatatgtcagaactaaaccacattttgcaacacaatcaatcgtttgtagacagcggcgcatacgaacactttttaaccaacaaatacccagagcgcaaattggcaattttgtcgtgcatggacacgcgcatggtggagcttttgcctgccgcgctgggtttgcgtaacggcgatgtcaagctcatcaaaaatgcaggcgcggtggtgacgcacccttggggttcggtgatgcgttcgctgttggtggcggtgctggaattgcgcgtagaagaaatcatggttatcgcgcattacgactgcggtatgcgcggactgaacgcccaagcctttcttgccaaagccgaagagcaaggcgttcccgaagaccgcatcaccacgctgcgccacgcaggcattgatttggacaactggctcacaggttttgatagcgtggaagacagcgtgcgccacacgattagcctgattcgcaaacacccgttgatgcctgccaatattgctgttcatgggctggtgattcaccctgttacaggcaaattgacggttgtggttcatggtgatgaaagttgcgcgatttagcataaaaagcagcctgcactttttacaaattgaaagtgcaggctgcttttatattatttgattattcccactcaatcgttgcaggcggtttaccgctcacatcataaactacgcggttaatccctttgatttcattgataatacggttcgacactttaccgagcaacgaataaggcaattccgcccaatgcgccgtcataaaatcactggtaatcaccgcacgcaatgccaccacataatcataagtgcgtccatcgcccatcacgcccaccgatttcacaggcaaaaacaccgtaaacgcttgacttgtcaaatcataccaagatttgcccgactgctcgtcaatcgtgttgcgcaattcttcaatgaaaatatcatcggcacggcgcaacaaatccgcgtattcgcgtttcacttcgcccaaaatccgcacgcccaaaccagggccggggaatgggtggcgatacaccatttcacgcggtaaacccaacgccacgcccaattcgcgcacttcatctttaaacaaatcgcgcaacggttcaagcaatttcaatttcatgttttcaggcagccctcccacattgtggtgcgatttaatcgcgtgggcttttttcgttttcgcgccagccgattcaattacatcggggtaaatcgtgccttgcgccaaccatttcgcgttggttaattttttctcttctgcgtcaaagacttcaacaaattccgcgccaataattttgcgtttttgttcagggtcggtaacgccagccaatttgcccataaattgctcagtcgcgtcaatgtgaaccactttcacgcccaaattacgcgcaaacatatccatcacatttttgccttcattcaaacgcagcaagccatggtccacaaacacacaggttaattggtcgccaatcgcacgatgaatcaacgccgccgccacagaagaatccacgccgcccgacaagcccaaaattacttcttcattgccgacttgttcacggattttcacaatcgcttcttcgatgtaattcggcatcgtccagctcggtttcgcgccacaaatatccaaaacaaaacgatttaacaaagccttaccttgtttcgtgtgggtaacttcggggtggaattgaatgccgtagaattgtttttccgcgtgttccatcatcgcaatcgggcaagacggcgtgtcgccaatcacagcgaaacccattggcaatttagacactttgtcgccatgactcatccacacgtccaacacgtttggcgtgccgtcatgaatatcgcgcgtgagttcgcaatcaatcgttttcacttgcgcgtaaccaaattcgcgctgattgcccgccgacacttcgcctcccaaatggtgcgccataaattgcataccgtagcaaatacccagcacaggcacgcccaaatcaaacaaacccacgtccgcttgataatccgattcatacaccgaattaggaccgccagataaaataataccctttggattgaatgctttaatttcgtccaaaggcatatcaaaagaatgaagttcgcagtaaacgtgcgcttcacgaacacgacgcgcaatcagttgggtaacttgcgagccgaaatctaaaatcagaattttgtcttggtttgtcataagtattgatattggtcaaaagtcaagtgaaaaaacggttattccagcatttcctagaatacagcgactcaaaagcgtggtaattttaacacacttttcttcctaaaaagtacttggtattaatactcaaaattaaagataatacctttcattataaacatagttttttgattattcgatagaatgtacactccaaataaaataaaaattgatatttttcctttccaatcatggttttcctaatcagaaagactaattttgcatccgaaatgcagctttactattttttttgggagatttataattcgaaccagtttctaggcagcaaaacaagtcagtaacaaaaggctggcaagtgggaacctggtaaccgtttggaaatacctatttcttggttttacgagtcaccagttttgactcaaaagtattttttgttatttttaggagcttttagaatgaattacgataaaaccgtatcagaaatgttgaacgttgatggtgctttggctgctgctgtagtagactactcaagtggtatgttgttggcaggtggtggttctgctgcaatcgatttggaaatcgctgctgctggtaacaccgaagtgatgcgtgcaaaaatgaaaactatgggcatgttgggtttgaaagacaacatcgaagacatcttgattactttgggtaaacaataccacttgttgcgcccattggctaaacacgacggcttgttcttgtactctgtgttggatcgttctaaatctaacttggctttggctcgtcgttctttggttgatgctgaaaacaatttgaactaatcactcaacttaatcttaaccgcgctgagttttttaatctgacgcggtttttgtttcaatataaaaagcagcctgcacttttaatcaacaaaaagtgcaggctgctttttatagtgaattaaatttagattagtacagcgttgccaactcccttatgtactagctgtacacggcggtcgttgtcgtcttatcctaatctaaatttaatccactatatatttacacaataatcgcatcaacttgtgccgcgcaagccaatgcccacaaggtttgcttgtccatgtggcgatgtgcaagctggctaatgtttgccaacacaggcaaatggctcaattttttggcggcgactagcgcatcaacgtccaatctcaacggctcgccatgcaaactcaatgtgcctgcatcacccaaaataacgtgttgattgccgcgcaacacgatttgttctgccgccaccaaccaatcgcgaactcgatgatggctgtctttgcacacaatagttgggatatttaggctgcctacttcttgcaacaagctgcggttggcaagcaattcgccgcccaaatacagaatatcggcttggacggataaggcgacttccaagtgtgcgctgtctcgaatccgcatgacgatgattttgttattttgccgacagatttggctgatgtcgtgtagcgtttgcgtggtgttttccagcgaaaagcagcctgcacgcgcataaggattagctggcgtgtaaaaagggtcaaacaaagcggcatcgctgtcggcatttaggtgcaggctgcttgcgtctgtttgcgcgattgcttgaattttgcgtatgccagaatgtccacccaatgccatgccgcgcacggtgatttgtgtgtcttgcgcccatgcttcgcggctgatgatgcgccaatcttgcacaatgcgaatggcgcgttctacttgtggcaaggcttcgatttgggcgatgtcaaacacgcgctcatcgcccactgcaccgataatggtgcattctttgccgcgcgaaatgtgttcgctcagcccttgttgacgaatggtttgcacgactctttgcacgtcttcgtcttgcgcggtggcttgcatcacaataatcatgttgatttctttctgcttaaaaaaatggacggatacgaaatccgcccaaaaatggagtgcttactgttgattaaaatgggatataggtagttggattgactgctttgccgtctgaacggacttcgaataacaatttattgctgcctaaggttgccactggctgaccgcgcaccactttttgaccattttgtaccaaggctgatgcaatctgtgcataagcggtcaaatgctggtcggagtgctgaacaataagcagattgccataattacgcaatgcaccaatatgaatcacttgaccatcggctgcggctacggcatttgcgcctttgccatcaatcaacataccgcgatttgtgccaaattcttgcgtaacgctaccgtttggcaaaggactttgccacacaatgccgtctttggtttgtgtacgaacactggcaacgacaggcgtaggcgtagcgacaactgctggggttgtagcggttgttgtcgcggctgctgtgttagtggtagtgactgcggcaggtgcaggctgcttggctggtacataaggcgcggcagcagcggttgtagcagtgcttgttgttctacccgattggcttacgcgcaacacttgtcccaactgaatattgttgccgttcaggttattccattggcgcagttgttcttggctgatgccgtagcgtttggaaatattgtaaaccgtgtcgcctgcaaccactttatgttgcgaacctgtgccagttttagctgctgttacaggtgcagcatttgtacggctgctgctaccaactggctttacccgcaaagtttgtccaatagaaagggttgtaccagacaagttgttccattgcattaactgctcttggctgatgccatagcgtttggaaatgttgtaaaccgtgtcgcctgcttgaactcggtgcgtgctggcatttttgtccacaggtgaatagttggggataaatgtgctgcctgttgatgcagttggcgtgtacgcagtgccagtcgctggggtataaggtgcagcagttggggttgtggttgctgctggggtatacggtgtagcagacggagttgtggttgctgctgaggcataaggtgctgtattgtaaggattattagccgtatcggttggcgaaccagtagtgccataaggtgtattgactgtgccgtatggtgtggtaaccgtgccattgtcgtagccatagccgcctgtatttgtgccagatacgactggtgcaggtgcttgttgtgcagaactacacgccgacaaaattgcagcggcaactaaactcaataataaacaagctgtttttttgttcgtgttcatgatatttcgctttcttaaatcatcattcaaagtgcaggctgctttgcgctgcaatcggctgaatcataccgttttatcggcatcacgacaatgctttacgggcattcttgcaggcgaaaatcttgccaagcagcctgcaatttgtctatttgattatgcgcggtcaaatccatttgcaaaggcgtgatgctaatccagcctgcatcgcacgcggcaaaatcggtgtcggcttgattatcgcgtacttcgcctgctgggcctatccaataaatcggtgcgccgcgtgggtcggtggattcaattacgttttgttcgtggtggcgcaaacccagtcgcgttactttaatgccacgcaaatcttgtaccgctacggctggaatgttcacgttccacaacatgggcgatgtgggcggctgctgcataatgtgcgacaacacgctccacacggctttttctaccgtttcggtaaacaaatcaaagcgatgtgaattgagcgaaaacgctacggctgaaatgcccattaaatacgcttcggtggcggcggcaactgtgcctgaatacacggtgtcatcgcccatattcgcgccgtggttcacgcccgatagcaccaaatctggtttaaaatccgactgtgccaaaacgtgcataccaacgtgaatgcagtcggtgggcgtgccgtttacaaattgaaagccgttgctggcggtgcggattcgcaacggtttgtctagtgtgagcgaattgcttgtgccacttttatcgcgctctggggcaactacgcgcacattggcaaattcgccagccagtcgcgccaacagggcaatgccttgtgataagtaaccgtcatcattggaaatgagaatattcattgcaggctgcttttttgtgtgttgaaacataagggtggcattgtagcggaatattggattttctgcgaaaccattgaatcactgcaaatctattccctctcctttgggagagggaactgggttgctgaacatgacataacctacgagcatcatcatgaccctaaatctccctgtttacgcatggaacgtgtcacctacttggtcgcaagtcgtgcaatttgaacaacacaatccacacgaaaaacatgtggtttggtgcgtgttgcctgattccgttccgcactacgaattgacatcgccccaaaatgaatacgaaagcagcctgcacttggcgatacaaaacgcgctatcgtgtgccaccacgcaagcggtgcattgtgtccccaatgcttggaataacacgcatttgtggctgataccgcacacacatgcaagcagcctgcacacgcatttttctgtgccgattcaatggcaaaccgaagcgattgcgcctgcgcccgaagtctcgccaaaagcatggcaaacgccgcccgccgccgattgtcgcgacccaagcagcctgcacattttgattattggcgcaggcattgcaggcgcggcaacggcgtatgaatgcgcgattcggggcgcaaaagtaaccgtgttggaagcgcaatcgcaagtggcgcaggcaggcagcggcaaccgtcagggcttgttgtatgccaaaatttcgccccacgccaccgagcaaaccgaattgctgttgtctggttatggctacacgcgccacttgctgcggcggttgttgcccgaacaaaccacttggcaggcgtgtggcgtgctgcatttgaatcacaacgccaaagaagccgaacgcaaccgcaaattggcgcaacaaacgcaacacgcgcatttgtatcgtgctgtatcggcgcagcaggcgagcgagttggcaggcatttgcattgagcaggacggtttgttttggcaacaaggcgcgtggttgaatcctgcatcgttggtacaaaaactgttgtcgcacccgaatattacgttgcacaccaaccagcgtttgattcaggcggactacgatggcgtgatgtggcacgttcgcagcaacacgcacacttggcagggcagtcatttggtgttttgcacaggcgcaagcagcctgcacacaccgattgcgcagactttgccgttgcagattattcgcggtcaaaccagtttggttgcagcaaacaaaagcagcctgcaactcaaaatcgccttatcgggcgcgagttacatttcgccagcgtggcaaggcgaacattgttttggggcgacttttgcgccaaattgcgcggacgatacttggcaaagcgcggacgaacagcacaaccgaaatgaattggctaaactaaataacacgctgtatcaatcgtttagcacattatggaacgaaccaagcagcctgcacgaatcatcgcacggtcatgcggcgttgcgttgcgattgtcatgaccatttgcctgccgttggcgcgttgggcgatgccgatgccatgcgccgcgtctatgcccaatacgcgctggacaaaaattaccgcatcaacacgccgtgtccctatttaccgaatgcctacatcaacaccgcgcacggttcacgtggcttggcaaccgcgcctttgtgtgctgccgacatcgccgcgcaaattatgaacacgcccagattattgtcgctacgattgcgccacgcgctcaatccaaatcgcttgattattaaagaattggtgcatgggaaggtgggtgcgaaatcgcaataaaaagtgcaggctgcttttcgtgttactgaaaaagcagcctgcactattcatcacaaaacgatgccccctaaaaaccgaaatttttagggggcagagcgttacgaatttcttttcagaacttcttattgtagcaacgtttctcatttcgcaatgcaacaatagcgagaatcatacaacacaatgatttcactgtcaatctaatcatttcatgttacaaaaatatttttgtttacgattgccagagtagccatttttctttatattttgtccttggcagcgaggacaaattaaagttatttctgttttcacacactcaaatatactctgttttcgctgcttttttattgcttattttttacagcacacttttcaggacaccaccaaatattttttaaacaggggtaatacatcatggctgcaaaatcattaaattacattttgggtttggatttggggattgcgtcttgcggttgggcggttgtggaaatggacgaacaagaaaatccacttcgtttgattgatgtgggcgtgcggacgtttgaagaagccgaaaaccccaaagacggttcatcgttggcggaaacgcgccgattggctcgcgctcaacgccgtttaatcagtcgccgcgccaatcgcatgaacaaattgcgccgtttgttgaaacaagaaaatgttttgcaagccaatgattatgatgaaaaaggtttaatcatcggtttacccaatcaggcgtgggaacttcgcgcacaaggtttggacagaaaacttgaacccaaagaatgggcagcggtgttgattcatttggttaaacatcgcggctatttgtcgcagcgcaaaaacgaaagccaaacggcggataaagaattgggcgcgttgctgtcgggcatgaatcacaatcatcaattattacaatctcaatctaatcaatatcgtacgccagcagaattggcgattaaacaatttgccacgcaagacggacacattcgcaatcaacgtggcgcgtacacgcacacatttaatcgtttggatttgcaaaatgagttaaatcaattatttgacgcgcaaacacgtttgggcaatccgcacgtttcaggcagcctgaaaaccgcgattaatgatttattgatgaaccaaaaagccgctttatcgggcgatgcgattctggaaatgttggggcgttgcacgtctgaaccgagcgaatacaaagccgcaaaaaatacatacagcgcagagcgttttgtgtggctggggaaattgacgaatttacgtattcaagacaatggcttggaatctgctttatcgcgtgaatagcgtgaattgttattgaacgagccatacaacaaaacaaaattgacctatcaacaagttcgtaaattgttaaggctgcctgaaaccgcatttttcaaaggtttgcgttatggaaaagacaatgccgaatctgccactttcatggaaatgaaatcgtatcacgccattagaaaatctttggaaaacaaatcgttgaaatcagaatgggaaaagctgaaaacgcagcctaaactattagatttaatcggtacggcattttccatttacaaaaccgatgatgagattgcaggctgcctgaaaaatcaattacccgaaaatgtgataattgccttgcaagagcagttaaatttcagcaattttatggaattgtcgttaaaagcgttggaaaaattgttgccgttaatggaacaaggtttgcgctacgatgaagcggatacgcaaatttacggtaatcgtcacgaaaaaattgccgatgaaaccgaaaaattcttgccgaatattcctgccgataaactgcgaaatcctgttgtattgcggacgctcacgcaagcgcgaaaagtgattaacgcgattattcgccgatacggttcgccagcgcgtgtgcatattgagacaggacgagaagtcggtaaatcattctctgaccgcgataaattaaaaaaacaacaagaagaaaatcaagaacaacgccaacgcgctattgatgaatggaaacagtttttccccaatgcagcgcatgaacccaaagcggtggatattttgaaattgcgcttatatcaattacagcagggcaaatgtttgtattcaggtttgccaattgatgttcgcaggctgcctgaaaaagggtatgtggaaattgaccacgcgctgccattttcgcggacttgggacgacagtttcaataataaaatcttggtgttggcttcggaaaaccaaaacaaaggcaatcaaacgccatacgaatatttacgtggtgcggacaacagcgagagttggcggttgtttgtggaaaatgtgcaaaattgccagttttcgcccaataaaaagcaaaaaatcatggcaaaacagcttgatgagaaaggttttcttgaacgcaatttgaacgacacgcgctatgtttcacgctttttgtgtcaatttatcagcgagtatttgcatttaacaggcaaaggcaaaaagcgcgtgtttgccagcaatgggcaaattaccgcgttgttgcgtgggcgttggggtttgagcaaaaatcgtgaagaaaatgaccgtcatcatgcggtagatgcagtggtggtagcgtgtagcacggttgccatgcagcaaaaaatcacgcaatttgtgcgttatcaaaaaggcaatgtgttcacaggcgaacgcattgacaaggaaacaggcgaagtgatttcaatccattttccaacgccttgggaacatttccgtgaagaagtgatgattcgtgtatttgatgataatccgctccgaacgctgcctgaaaaattaccaaaccgccccgaagccttgcatgaatacgttatgccgttgtttgtgtcgcgtatgccaacgcgaaaaatgactgggcaaggacacaaagaaaccattaaatctgccaagcgtttagacgagaaaatcagcgttttgcgcgtgccattaacgcagttgaaattgaatgatttggaaaacatggttaatcgtgaacgtgaacctgctttatacgaagccttgaaagcgcgtttggaacaatttaaaaatgaccctgcaaaagcctttgctgaaccattcttcaaacaaggcggacagcaagtcaaagccgtgcgcgtggaaatcgtacaaaaatcaggtatgttgttacgcaaaatcaatggtgtggcggataacggttctatggtgcgcgttgatgtgtttgagaaatcaggaaaattttatcttgtgccaatttatgcgtggcaagtggcagaaggcattttgcctaatcatgctgttgtacacagtaaagatgaaagcgattggattttaatggacgaaagctatcattttaaatttgctttgtataaaaatgatttgctagaagtgcaaacgaagaaagggtgcattatgggttattttgcaagtttagaccgtgcaacaggtgcaattaccattcgtgaacatgaccgtgataagaaaaaatgtaaagatggcgaacatcgaagcattggtgtgaaaatggcttcatcattcaaaaaactgcaagttgatgaattaggtaaaaacattcacgaaacacgtagcagaaaacgcccaaatattggctaaacccaatcccccaaacgatgatttaaagtaatattaaatcatcgtttgggggatttttttcaaggagcataaaaatgagttggcgaagtttgttaatcagcaaaggcggtaaattatctttacacaacaatcaattattgattgcacaacaagacggcagccacaccgtaccattagaagacattgccataattgtggtggaaaaccgcgaaaccgttttgactgcgcccttgctatcggctttggcgcaaaatgggattggtttattgacgtgtgatgagcaatttttgccatgcggtcaatggttgccattcgcgcaatatcatcgcccactcaaaacgctgaatttgcaattaaacgcgactttgccgcagaaaaaacagctttggcaaaaaattgttcgtcaaaaaatcatcaatcaatcgtttgtgttaaatgaaatgggtgcggacaaagccgccgagcgattgttgcattttgccgaaaaagtcaaatcgggcgacagcgacaatcaagaagcgcaagcggcggcttattattttcaggtagcttttggcgatgaattcacgcgccaacaagaaaacagcctgaacgcgcatttaaattatggctacaccattttgcgttcggcggtggcgcgagcgttggtgcaatatggttggttgccagcgttgggattacatcatcacaacgagcaaaatccgtttaatttagctgatgatgttattgagccgtttcgtcctttggtggatttatgggtgcataccgccacgctttcaggcagcctgcaagatgaattaacgccacacaataagcaaaatttgattcaattattgcattatcaaatgcgttggcgtgggcaaattttcactacattgggcgcgatagaccgtgcggtagcgagtttgcaggctgctttgaaagaaaaagatgcacaaaaattgacgctgcctgaattattgtctttgaaagaacataactatgagtgagaaccaatttatgcgaatcatcgtcttttttgatttacccgtaaccagtcgcgccaaacgcaaggcggctaatgattttcgccgttttttggtaaaagacggttacattcggttgcaattatccgtttatacacggattgtgcgtgggcgagatatgttggaaaaataccacaaacggctttgcgcgaatctgccaaaagaaggttcggtgcgctgtttggaagtaacggaaaaacaatttgtcgcgatgaaagtgctgcttggcgataaaccaacgcaagaaaaacgggtgaatgcacagcaatttttgctgttttagcgtgattttttgaagtgaaaaaatgcccgaaaccttgaatttatcagggtttcgggcagtggtattgtagcattgcgaaacgagaaagggaactacaacttgaacgctttgctcaaacagttacacaaaattgtagcattgcgaaacgagaaagggaactacaacaactggattgcaacattgcgctattcttatattgtagcattgcgaaatgagaaagggagctacactctcaaactcaattgaattaaataaaaagtgcagactgcttttcgtgttactgaaaaagcagcctgcactttatttacaacgatttacttgccttcttcgctatccaagaagctcttcaatttatccgagcgcgttgggtggcgcaatttacgcaatgctttggcttcaatctgacgaatacgctcgcgcgttacatcaaactgcttgcccacttcttccaacgtgtggtcggtattcatgtcaatgccaaaacgcatacgcagcactttggcttcacgcggcgttaggctttccagaatatcggaagttacttcgcgcaagctcgaatacatggctgcatcggctggcgcaacgttgttcacatcttcaataaaatcgcccaagtgtgaatcatcgtcatcgccaatcggcgtttccatagaaatcggctctttggcgattttcatgattttgcggattttgtcttcgggcatctccatcaattccgccaattttgctgaatcgggttcttcgcccgtttcctgcaaatactgacgcgaaatgcggttcattttattaattgtttcaatcatatgaacagggatacgaattgtgcgggcttggtcagcaatcgagcgcgtaatcgcttggcgaatccaccaagtcgcataagtcgaaaacttataaccacggcgatattcaaacttatccaccgctttcatcaaaccaatattgccttcctgaatcaaatccaagaattgcaagccgcgattggtgtattttttggcgatagaaatcaccaaacgcaagttcgcttgaatcattttttgcttggcggcagcggtttctttttcgcttttcaccatgtttttgctgatgtcttttagctcggcaatcgaaattcgcgcgtgagattccaacgccgccatttcagtttgtttttccaaaatcgcgtgtttgaaacgccccaaggcatcgctccacacacgatttttggcgacttcttcatcaatccaatccaaattggtggcattgggcataaattgctcaataaagtattctctgtccatgcgaacgcggtctaggcaaatatcgcggatttcgcgttccagcttgcggatttgttctacacgactacgcaagttatcgctcaatttttcgatttgacgcgtagagaagcgcacttccaacaatttttgcgcgatattgttgcggtgttccaaatatttggcgtgtttgctgtcgtttttatccagcgcacgaatcatcaagccgtagcttttttcgatttgcttgaaatgctccaacacttcggctttgagctcttccaagttttgttgattgtccatgccgcctgcatcgccactgtcgctgtcgtcgtcttcgtccgactcgtcgctgctgtcatcgctatctgtggcagcatcgttatcactttgcagactgctttctaaatgtcccaaacccaattcgttgagcaacacttcgttggggtcgataatcgcttctaccacttcatctacgcggatttcgtcttttttgatttgctcaatcaattccaagatttcgccaaccgaacctgggcaagcggaaatggcttgaatcatgtttttgagtgcgttttcaatctctttggcgattttgatttcgtcttcgcgcgtcaaaagttccacttgacccatttcgcgcatatacatacgcacggggtcggtggtgcgcccgaattcggaatcggcttgcgacaaggcggcttcggcttcggcaaccgcgtcgtcatcggtgatgcctgtgctgttgtcgttcatcagcaaggcatcagcatcgggtgcttcttcggttacttgaataccaaggctttgaatcatattgacaatgccgtcaatttgttcggcatcggacatatcgtctggcagggagtcgttgatttcggcataggttatgtagccgcgctctttgcccagcataatcaaacggcgcaaacgctcgcgctgttcttcaggcgtgagtgggcgtgagtcgtccaatgtgttgtcatcggtatcgttgtcttgaaaatgttgatttgacatgatatttctcgttattgcggataaagtgcaggctgctttgaaatattaatagcgcgttattcagaaatacggttgggatttttcccattcaaaagcagcctgcacttggtgtttaacctgcaatagccatgttttgggctttcaggcaaaaagtaaaacaaaacggtgtggctcgcaatataagggcaaatgttgagattgcaatccttatttgcggatttaggggcgcgattatagcaaaaaagcagcctgcacttttatttatcgcatcacaagcgcatcacgccactcacgcctttgacttctgccagcgatgccaacacgcgcggcaattcatctacttttttcacttccagcgtaaagcgcatactggcttccaagtcgcgcgtttgtgtatgcacggcggttacgttcactttgtggcgagccagcgcatcggacacatcgcgcaataagccgttgcggtcttgggcgcggacttcgatgtctatcgcgaacatttgtcctgcgtctatgcctgcccagcttgctgtcatcactttttcgggcgattgcgttgccaagtgttcaaaatcggcacagccttggcgatgaatcgacacgcctttgtcgcgcgttacaaagccgacaatcaaatcgggcggtgcaggtttgcaacatttggcaagattggtcagcaaaccgccttcgccgcccaccaacacgccatttttgccgcctgattggattttggattttttaacgatgctggtttcgctaatcggcacaggcggcggttcgttgagcacaccagcggctttttgtatggcgtgtggcgacacttcgccctgcccgactgcggtaaacaaatcgtccaaatgtttaaaaccgagcttttcgcacaactgttgatgattgggcttggggttgattttggcaatcgctttatcaaactgatttttgccatcttcgcgaatcgcttcggcgttttgttggcggatataagcccggattttgctaatcgctttgttggatttgacccagccttcgtgcagccagttcacagacggaacgccttctttggcggcgatgatttctacgcgctgaccgttttccaatggcgtggacaacggcacgatttgtccgtttacttttgcgccgcgacaacggtctcccaaattactgtgcaaggcgtaggcaaaatcaatcggcgttgcgcctgctggcaacgacaatactttgccgtgcggtgttaaaacgtaaatggtgtcgttgaacaattcggttttgaacgcggcggctaaatcttctttgccgctttctgccatgttttcgcgccaatctagcaactgacgcagccacgcgattttttgttcgtatgccgaatcgcctttgccgccttctttgtatcgccagtgcgctgccacgccaaattcgttgaattcgtgcatttcgtgggtgcggatttgtacttcaatgcctttgtcttctggtccgacaatcacagtgtgcagacttttgtagccgttgcctttggggttggcgatgtaatcatcaaattcgcctgggattggctgccacaggctatgcacaatgccgagcgtggtgtagcactccgacacgctgtttaccaacacgcgcacggcacgaatgtcgtacaagccgtcaaaatccagctttttcttgaccatttttttgtagatggaataaatgtgcttggggcggcctgccacatcgcattgaatgcctgcttggtttacggcggtttgcaggctgcttaaaaattgttcgatgtattccaaacgctcggtgcgtttttcgtccaacaatttggcgatgcgtttgtattcttcggggttgtagtggcgaaaacccaagtcttcgagctgccatttgagttgccatacgcccaaacggttggcaagcggcgcaaaaatatccagcgtttctttggcaaggacgcgtttttgtgggctgtcgggcgtttgcgataaatattgcatagagcgtgttcgcaacgccaatttaatcagcaccacgcgaatatcggacaccatggcaagcaacattttccgcatcgtttcggcttgattggcgcgttcttcgggcgtggcaagtgcatctactttggcaaaatgcgtcagtttttgtacttcgtctatgcctgctactagcgtggcaacggcttgtccgcattgctcgctcacttgcgttttccaatcggtgcaataagtggaaatatcggttaaaagcgtggcagcaacggcttcggcaagcaaatccatatcgcgcaccatcaaagcagcctgcaataaatgttgcaacaaaggttcgtgcgccgatgtggttacggcatcgtctggataatgggtttgcgccaattttaaagcagcctgcaatagtttttgttcgggtgcaggctggttgttggcatagtccaaataatcttgcaaatgggctgggttcattttggcttccttttttatgcaacaacgagaacggtaaagtttgcgattatacaaagtattgttttattttgtgctacaaaagtccacacagccaacaaaaatagttaaaatccaaatatgtggatatttaacatttcttggcattaacttaacaatccaagattgggctgtccaccttaattgatgacttgatacactaggagtaacaactatgcgtttgacacattctgcactcgcacttgcattggctttttcttttggcaactttgctcacgccaacacgctggcatgtagcaacagttatggttttcgcgttgatgtgtcgggcaatactggcgcaacagtctgctccaatacttctagcgatttgattgatttggttaaagatttctctctatccaatagcggctacacgcaatcttctgctgcctttgccgttggacgaattaacgatgtggactttaccgcgtcgtatgccgccaattcgaacgatttggtttttaatgcaccagacttgggcattgaaaacaaagtgttcactggtgcaacccgtaaaaaagcccaagatgcttttgaagattgggtcaaacacagtggcattattggcgacatgatgcgctaccaatctaaacattctgccgccagccccatcacaggtgcagcagggattatgcccactatggcagccaccgatttcaatactgaaattcaatcggttagcaatattgccaccacgccgtctagcagcacagacaacaaagaaagcaccaccaatgccgatgccactcctatcaacaatctcatcggaacaggtgtgagcattggttcgttctccaacaatggcgagcgcatcaattcttataccctgccgttgtcgtattcgattggaacgggcgacgattcgcgtcagcagcttattattagcgtgcctttaaccatgtacaccattggtaaagcaaaaggttatcatgcaggtgttggtatcgcacatcgcttcccaatcacccaaaattggacgctgacacctggtattcgctatgccctaacaggctcggttgaccgcgcaacgattgcatcggtaaccagtgcgagcttaaccagtacctatcatattccttttgagcagtttgatttgaatatcgccaatatgattggctactaccgcacaggcaaattcaaagcaggcgattattcatttgaccccgatatcaaacaaacaatgttacgcaatggtgtgatgctatcccaaccgattacgctgggaagccaacaattagccattgaatattcattgattgacacgcgctatattggcggacaaaaaccgtttatgcgcgatatgcaagaatttggcgtgacattgggcacgcatcgcaacaacaatagccaccaatcgttcttacgcgcaggtgtcagctatattcgtgccaaagacaataatggctttacgttcaactttggctattggttttaatatagcttaaccatttcaaatcaccaatatagtgaattcaattcaaccgaataatcaacaagccacagtgtgcctaaatcacacaaaagagcattgtgccttgaattgaattcactatctattttcgcgctataatcacaccctttctccatcgattcaaccaaacggaacaatcatgagtcgcatcgcacaaacttttgctcaactgggcaagcgcaaagccctgattccctacatcaccgtgggcgaccccaatcttgccaccactgttcaactaatgcacagcatggcgcaagctggcgcaagcattttggaattgggtgtaccgttttccgaccccatggcagatggcccgaccattcaacgcgccgtagaacgcgctcttgccaaccacgtttcgctgcacgatgttttgaacgtggtgcgcgaatttcgtcaaagcaaccaacacacgcctgtggtgttgatgggctacttaaatcccattcacaaaatgggttacgaagcctttgcccaagccgctgccgaagctggcgtggacggtgtgctaaccgtagatagcccgattgaacacatcgcgcccttgcaagaagccttaaaatcgcgtggcgtggactgcattttcctgattgcacccaccaccaccgaagcgcgtatgcaagaaatcgccaaacgtgccagcggttttgtgtactatgtttcgctcaaaggcgtaacgggttcagcgcagctagacacgcaagccgttgctgacaaaatcgcggtattgcgccaacacattcacattccgattggcgtgggctttggtattcacgatgccaacagcgcggcgcaaatcgcccaagttgccgatgcggttattgtgggcagtcgcattgtcaaacaaattgaagaacacggcagcaacgcactgcaagccgtgggcgatttggtgcgcgaattgattgtcgcgatttaaatcatgccaactcaatacgctcccttttcggttttgatgtcgctatacaagcgcgagcagcctgcatttttaaaccaatgtttaagcagcctgcacgcgcaaacttgccttgccgatgaaattgtcattgtgttagacggcaacatcacgccccaattgcaggctgctttggacgattgggcaacgcgattgcctttgcgcgtgttgcctttgtcgcacaatgtgggcttgggcaaagcactcaatcacggcttggcgcattgtcagcacgattgggtatttcgcatggacacagacgacattgccgcgccgcatcgctttgagcgacaactggcgtatttagccgcgcaccccaatgtggcgttactgggcgcacaaatcgccgagttcacgcaatcgcccgaacaagcacacggcaatcgccgcgttcccgaatcccatcaacagattcaacaattttcacaaaaacgcaatccattcaaccacatgactattgcctatcgcaaaagcgcggtgcagcaagcaggcggttatcaacatcattggtttatggaagactacaatttgtggctgcgaatgctggcgcaaaatgtgcaggctgctaatttgcccgatgtgctggtttacgcgcgaacaggcacaaatatggtgcaacgccgccgcggttggcaatacgtccaaagcgaatggcagttatatcaactcaaacgccaactgcacctacacaaaccgctcgccgccgcgttttgcctgctgcaacgcaccttgccgcgcctgctccccacttttttattgcaacacctttacacttggctacgccgaacatgaaacccacgccttctctttttattcgcttgctcacaggcattgtattagccgccatcaccacagaattgtatttatttttcaaagacatcaatccgctcaacagcaaagtcatcaacagcaatttgattagcctgcttgcctacacgcttgccgccatttccatcaacaaactgctgtattttcctggcaaacaaagctggctgcacattttgcccgccgttggcttgtcatacagcagcgtgtttggcatgagtgccgtgttttttgttaccttttccaacagctttgtcatcaccaacggcattttggcgaccgcgttttttgtgggcgacttcattcgccgcaaccgccacattccacacattgcctatattccaatcggacgcgccagccaagcccagcaaatcccccatgtaaactggatagaactgcaacaacccgttttgccacaaagcagcctgcaatccgttgttgccgatttacacagccccgatttaacccccgaatggcaaaaatttttagcagcctgcaccctgcgcggcatacccgtgtacaacattcgccaaatccaagaatcgctcacagggcgcgtgcaaattcatcacatgtatgaaaacgacttgggctcactgttgccatcgccagcctatatgctagtcaaacgcctgctcgacatcgtatgcgtattgtgcgccctaccctttgc

SEQ ID NO: 3186 - DNA, 21802 bp, synthetic construct
  source 1..21802: mol_type = other DNA
  misc_feature 1..21802: note = Synthetic
acacttgaggtgtctttcactttaatgcgtttataacgttctttcagctctgcaattttcgccacggttttatccatactttcttgagtacggtaaataccacagccttcttccattgagtcgcccatttcattacggatttgtgaccaagattcttcaccttcttggcgagctaacgcataaacccgatttaatacatcttgtgcttgtgcgtcgatcaccgcttgattacgcaggcttgcttcaacagctcgacgagctgccatttcacctgctactttaccgaataccaccagttcagcgagcgagttagaacctaaacggttcgcaccgtgtaaaccagaagaagcacattcacccacagcgaacaagcctttgatattggtttccgcttgttgatccacttcaataccgcccattgtgtagtgaactacaggacgcactggaattggagctttagctggatccacgccttcataagctttggctaattcacaaatgaatggtaaacgctcaagcaggtatttttcacctaagtggcgtaaatctaagtgcaccacgtccacgccttttgcggtttttaaggtgttgcctttacgccattcttgccagaaggcttgggataccttatcacgaggccctaattccatatatttgttttcaggtttaccgattggcgtttcaggccctaagccgtagtcttgtaagtaacggtagccatctttgttcaccaaaatcccgccttcaccacggcaaccttcggtcattaaaatccccgtattcggcaagcctgttgggtgatattgcacaaattccatatcacgcaatggcacgccgtggcgatatgccattgataaaccgtcgcccgttacgataccgccgttggtgttaaagcgatatgcacggcagccaccgcccgttgcaataactacggcatttgcgttgatttgtacgaaagtcccttccatcatattcattgctacacagccacgagcttgcccttcatcgactaaaatatcgaccacgaagtgctcgtcaaagcgaataatttgcggatatttaatggaggtttggaaaagggtatgaagtaagtggaagccagttttatcggcagcgaaccaagtacgttcaattttcattccaccgaaacggcgaacattaatatcaccgtcatctttacggctccaagggcagccccaacgctctaactgggtcatttcaactggggaatgttcaacgaagtattccaccacgtcttgttcacataaccagtcgccaccgcccacggtgtcgtggaagtgtttatcgtaagaatcggtgtctttcaccacagctgcggccccaccttctgctgcaaccgtatggctacgcatcgggtaaacctttgaaattaaagcaatttttaaatttggattagcttcagctgctgcgatcgccgctcttaaaccaccgccgcctgcacccacaatggcgacatcaacattaacagtttgcacaatttcctccttgggaaagtaaaatatgtcaacttagaacactattattgtgccactatttcagccgatttataaccgttttttacaatttggtaacataaaaaaatgcgttttgtgatctacctcaaaaaacgatttccgaaaagccaagttattgataatcgctattattaagtagcaaaaattcttatcattttgcctaacaagcggtcagatcgctgatattttttgcaaaaaaacctgcggatctgaccgcttgtctaagtcatcaggttcctgatacaatttcgccatttttattctgacgaatcttacgatgcaacctgtattcaaaaccccatttatgatgagtggcatactcttgttgtccgcctgttcccccaatcaaacggagttgccttttcctggcgagtttttaggggcagactatattctttccgatgaaaacgcagagcgttgggcaatcgctagccgtcaagcggaacaatgtatttatcccaatttaacccgtattcaacaacagcacttctctcccgaagatgcttatgttcacgcccagtatgtgctgttttatccacttgaaaatattattggcgaagaatatgtcaaaattctgcaagaagatgaaaaatcaatgggttatgcacaacgccaatttaaaaaatataaaaccgctgatgtgaaaccacttgatcagcagagttgccaaaccattcgtgccaatgctaaagatgatcttgccgtactaaaaggcgaatataagaatggtatggcccacgaagggaaagcaactgaacccaaagatcctgatggcgtagcaacaaatcaaaacaaatttttctttgacatcattaaatggggtgccgcattgttgctgtaatgcgataaatcttccccgcctatcacaacaagcggtaagatttgttcataaatttgcaaatttcttgtagaatcgagccgctgttatcactttatagtcaatttatgtcgaacaattcgcacgaagagtcagaaactcttgtcaaaaaaccttattttatccccacttttttaaaaatcttgttgttgggagcctgttgcgtgggactctacggcatctaccttgacggtaagatccgttccaaaatggacgggcaagtgtggcaattaccagctgaagtctatagccgtattgagagcattcgggtcgatgatgatttgagtttagaacaagtcaaactggcattgattgacaacggctatcgggaagtatcgctgattgccacccctggcgatttcaaaattgaaggcaacaatttggtagtgctacgtcgggcgttccccttccctcaaaatcctgaagctcaacgagtgctgcgtttgcgatttgtcggcaataaactggctcgcattgaagatttggttcgcttaaaagaagtggatgaatttcgcctcgacccaaaattgatcgcaatgctccattccgataacgatgaagaacgggtagcactacgcttacgggattatccaagtttgctgatcgacacgttgattttgaccgaagacaaacgcttttacgaacacaacggcatcagcccgttgagtatcgggcgggcgttgatcaccaactatcaagcaggcagaacagtgcaaggggcgagtacgctaacccagcaattggtgaaaaatctgtttttgagcagtgaaaaatcactcgaacgtaaaatcaacgaagccttgatgtcgatcattttagacgctcgctacgacaaaaatcgcattctcgaaacctatctcaacgaaatctatctcgggcaaaacggcagctaccaaatccacggctttgctttggcaagccagttctattttggcagacccgtgcaagaaatcagcttatcgcaaatggcgttgctcgtcggtatggcgaaaggggcatcactttataacccgtggcgaaatccgcaagcggcgttggaaagacgcaatgtggtgctgaaaattttgctagaccaccaaaaaatttcccaagcggattatgattttctcattcaacaaccacttggcgtgaaagaaaaaggcaacgtctatcgtcaacagcctgcctttatgcacgcattaaatcaagacatcaagactgaactgggcgaatccaaactgaatttgctttctggggcgaaaattttcaccactcttgaccgcaaacagcaacgttctgctgaattagcagtgatcaacggcgtggcagatctggaaaatagcaacaagaaaatcaaagacttgcagtctgcgatagtggtcgctgaatattcaacgggcaaagtgcgagccatcgtaggcggcgtgcaaacccaatacgcaggttttaaccgagcgttacaaaccaaacgccaaatcggctcattggtgaagccatctatctatgccattgcgttggctcaccccgaattattccgtttgaacacgcccgtaaacaaccaacccatcaccattaccatcaaaggcagcccaccttggtcaccacgcaactacgatcgccgtttcagcggttcggtaatgttcatggatgcactggttcgctcactgaatattccaacggtgaatattgggatgaaaatcggcttacgtaaagtgattgaaaaacaaaaagaaatgggctgggacaatgccgaaattccgccgtatcccgctaccttgctcggttcctattcgatttcgccttatgatgtcacgaaatcctatcaagtgctggcaaatgcggggcaaaaaacaccgctaaccaccattgatgccattatttcccgtcaaggtgaaatgatttatcaaccgaatgtttctgaacaaagcaaacaagtgttacccgcagaagctgcgatccaaacactgtatgccatgcagcaagttgttgaacggggaaccgcccgcagtctccaaacggatttcgcccaactcagacttgcaggcaaaacagggacaaccaacaacgctcgcgatacgtggtttgttggcattgatgggaaaaatgtcaccacggtttggcttggaaaagacaacaacggcgacacagggctaacaggctcaagtggtgcattacagatctataaagaatatttaaaacgagctttgccacaaccgtttacattaccacaatctccaaatattcaatgggtagggatcaacagctacggctcttgggattgtactagctcacggcaaattcctgtttggaaagataaaggacagcggtattgtagtggcggttccagcatggatgccaaaccaagcgtttgggatgccctctcacttggtaaagaagcctctgctcctgcaaccaccgcagaagaagccgaaggtcaagccccaattgaagaagtcgccccaagggaataacatttgcaaaattttgcttagaactgaccgcttgtagatgcgttttttaccttgacaagcggtcagatccgacgaattttttgcaaatcagctcagcctaaccatttcagcgtacaactgttcatttttcgctagctttttcagacgtaaccttttatattaacgggcatttgccaaactactatttaacaggtcttatacaatggatttactcgattttcactttgtaaatcgatttcgctatcaagcggagcgactcgtagatcgtgtcgcattacgttttctagacgaaggaaaatggatgacattatcgtgggcacagtttcaatctcacgtcaatcaactctcccatgccttgcttgccaatggaattggcgttcaagataaaatcgctattttcgccaacaatatgccccgctggacgattaccgatatcggcacgatgcaaattcgtgccgtaacggtgccaatttatgccacgaatacggcgaaacaagtcgaatacattttgaacaatgccgacatcaaaattctgtttgtgggcgatcaagagcagtacgatcaagcgatcgaaatagcgaacagctgtccacaattaacaaaaatcgtggcgatgaagccatccattaacctattcagccaaccgattgcgtgctattgggaagagtttatccaagttgagccacaagcgggcgaattaaaccaacgttttaccacgaaacgtttagacgatctgttcacgctaatttacacctcaggtaccacgggcgagcccaaaggggtgatgctcgattatgccaacctagcctgccaattccaaaaccacgaccaagccttggacgtgaacgaagacgatgtatcgctttcgtttctaccgttttcacatattttcgagcgggcgtggatttcctacattttgcatcgtggggcaaccaactgctatttggaagataccaatttagtgcgtgaaaccttggcggaagtgaagccgaccttaatgtgtgccgttccccgtttgtacgaaaaaatttacgcagccattttagataaagtgcaaaaagccccagctcaccgccgagccttgttcaactgggcaatccgtgttggcgaaaagcattttatggcgaaaaaaccatcattatggctgcaaactcaatatgcgatcgccaacaaattagtgctgtcgaaattgcgatcgttattgggcggacgtattcgtatgatgccgtgtggcggtgcgaagttagaaccgacaattggaatgttcttccacagtattgggatcaacatcaaacttggctacgggatgaccgaaaccaccgctaccgtgtcttgttggagtgataaaggcttcaacccaaattctatcggcacactgatgccaaatgtggaagtcaaaattggcgaagacaacgaaattctagtcaaaggtgggatggtgatgcggggctactacaaaaagcctgaagaaaccgcagcagcatttaccgaagacggctttttgagaacgggcgatgccggcgaactagatgcaagcggtcatttattcattaccgatcgcatcaaagagctgatgaaaacctcaaacggcaaatacatcgccccacaatatatcgaaggtaaaatcggtaaagacaaatttatcgagcaaattgcagtcatcgctgatgcgaaaaaatacgtttccgctttaattgtgccttgctttgagagcttggaagaatacgccaaacagctaaatatcaaatatcacgaccgcttggacttgattaaaaattccgaaatcgtgcagatgtttgaaaagcggatcaatgagctacaaaaagagctggcgagcttcgagcaagtgaaaaaattcaccctgctacccgaagcctttacgcagaagatggaagagatcaccccaacgctcaaactccgccgcaaagtcattttgcaacgttacaaagaacagattgaaaaaatgtatcgctaaaaagaagggcttatatctcaaatataagcccttcttactcctatcaattaccttgattttcttgatacaaccattcagccacttgtttagcgaagtaggttaaaataccgtccgcccctgctcgtttgaagcaaagcagcgactccataatgcactctctttctttcaaccaaccgttttgaattgctgccatatgcatcgcatattcgccagaaacttgataagcaaaggttggcattccaaaggtttctttcacacgataaaccaaatctaaatacggcattcctggtttcaccatcaccatatccgccccttcttgaatatcgagagcaacttcgtgcaagccttcgttggcattggcggggtcaagctgataggttttcttgttgccgcctttgagattgcctgcagagccaacggcatcacggaatgggccgtaatagttagacgcatatttggcggagtacgccataatttgcgtgttgataaagccgttttgttccaacgcctgacgaattgcccctatacgcccgtccatcatatcgctcggtgccaccacatccgaacctgcttgtgcatgagaaagagcttgtttgatcagcacttctgtggtgacatcgtttagcacatagccttcatcatcaacaataccgtcttgtccgtgagtggtgaatgggtcgagagccacgtcggtaatcacccccaatttctcgccaaaggcttgtttcaaggatctcactgcacgctgggctaagccatttggattgtaggcttcttctgccatcaacgattttttatcgccttccaccacaggaaacaacgccaccgcaggcacgccatatttcaccaacagttcggcttcaattagtaattggtcgatggttaaacgctctacaccaggcattgacggcactttaacccgttgattttcgccttcaattacgaaaacagggtagatcaaatcgttggcggtcagtacattttcggcgactaaacggcgactgaaatcgtgcttacgcaagcggcgtaaacggcgagtggggaaagaagacgacagaaattgggtcattttattgtccttttgcgattaagattaggaagtccaatatggaatttttgtaggagcggacctgcgtgtccgcccattacaagcggtcagttttactcacaaattccttagggaatttgttcgccccttcggggccgttggcaaagccaacgttcaaaatgctaaagcattttgtaccgaattttttgcaaatcgaaaacgggcggacacaggtccgccctacataattatatccactaaatccgattttctgtttcgatgtcttcgctcttcacataaaaacgagaaacgagcaatccaacttcaaatagtagcaccattggcacggcaagcagagtctgtgagaaaatatcgggtggtgtcagcaacataccaataacaaatgctgcaacgataatatacggtcgtttcgctcgcaaatcttcagggttagtcacacctgaccagcaaagcaaaataatcgctacgggtacttcaaagcagagaccaaatgccaagaaaatcgtcagcacaaaatccaaatagctgctgatatctgttgcgattgtcacgccttctggtgccgtgctggttaaaaaaccgaatacaagcggaaagaccacataataggcaaacgccacgccgatatagaatagtaaggtgcttgaaaccaacagtggatacaccaaccgtttttcttgcttgtataatgcaggtgcaacaaacgcccaaatctgatacagaatgtacggcaccgataagaacacagcgacgatcgccgtcagtttaatcggggtaaaaaatggcgttgcgacattggtcgcaatcatcgttgccccagcgggcaaacgctcggtcagcgggctggcaagtaaggcataaatatcatttgcccaatacaccaacaccacaaacacaattaaaacgcaaataaccgctcgaagtaagcggttacgcagttcaattaaatggctaatcaggggttgcgattcatcaactgacattctttttatcctgtacttcaggggaagctaaatcatcgtctggcggataatacgccatcagcttttcttcatcggcttcagcaagctcggcgatttctgcaggggaaagttcagcgtgttcaggctctgcaagcggtacgttttcatcgatattttgcaaatcgactaacgaattgtcggcaagttgctgattttcctgctcaatccgagtttgaatttcagcgacttgctcatcagtcagaacttgaacttgcccttttgccgacgccaattcgtctttcattttttccgccgattgctttaaatccgctaccgttttttctaactcaggcgatagacggcttaaattcagctcttccgcttttttgatactctcttgcaattcctgcaatttgagctcttgtgctaattcattctgcacatttgctgctaagccacgaatcgtccgcacccagcccatcaccgtacgaatggcgattggcaaccgtttcgggccaagcaccaccaagccgatgataaaaatcagaatgagttcagaaaaaccaatatcaaacacgaattacgcctgctctttttctttcgctttttgttctacggcttgctccgctttttgctcaactttgttgaactcagcatcctgcggtttgtcttcgctcatcgcttttttgaaacctttgaccgattcgccaagatcagaacctaaattacgcaatttttttgtaccgaaaagcaacaaaataattaccgcaacaatcaccagttgccaaatactgataccacccatagtgtttacctctttttgtataaaattaaagaaaaagtgtgccgattatacgagtttttgctggggaaaacagtgaaaatttacaagaaattggtagaaaagtagattaaatggaaaacgacaaaaacgatgccccttgaaaccgtagtctcaaggggcagagcgttgcggtatattcttttcagaaaaaccttattgtagcaacgtttctcatttcgcagtgcaacaatatgtgagcaagtctacattattacgtaaaattgatcaacacatcttggattttcatttaaaatatttacattatattgtgtactcaaggagattatgatgaaactcaaaccgataaactacattttaggcttagatttaggcatcgcttcggttggctgggcagtagttgaaattgatgaaaatgaatatccgctgcgtttaattgatgtcggtgttcgcacatttgaacgggctgaagtcgccaaaacaggcgattcgttagcagcggctcggcgtgctgcacgtagcgttcgccgactaattcgtcgtcgagcacatcgcttactcagagccaagcgactactcaaacgaatcggtttaattactcaagcagatcttgattcaggtttacctaacacgccttggcaactacgtttagacggactgaatcgccagctttctaacacagaatgggctgccgtcttgctacatttaatcaaacatcgtggctatttatcgcaacgtaaaaatgaaaacaaaacagataacaaggagcttggtgctttattagcaggtgtttccgctaaccatcaactccttcaatcagctgaatatcaaacaccagctgaattagcactcaaaaaatttgcagaagaagatgggcatattcgtaatcagcgtggtacttacactcataccttcaaccgattagacatcgctgccgaactcgccttgctttttaaatatcaacgagaattaggcaatcatttcgcctctgtagatctcgagcaagaaattggtgcattattgataacacagcgtgcagccctttcaggcgaagccgtattaaagatgcttggcaaatgtacctttgagcctgctgaatttaaagcggcaaaaaatacttacagtgcagagcgttttatttggctgacgaaacttaataatttacgcattttagaaaatggaacagagcgtgcattaagtgaagatgagcgacagctattgattgaacagccttaccaaaaagcaaaattgacttatgcccaagtgcgtaaactattagaactgtccgaacaagcctttttcaaaggtttgccatatcgtaaagagaatgcggaatctgccacgcttatggaactcaaagcctaccacgccattcgtaaggcattggaaggggctaatttgaaaaccgaatggcaaggactagcaacgcagccagaattactcgatgcgattggtacggcattttcgctctataaaaccgatgacgatattgctcaatttcttgatggtaagctatctgaacaagtattaaccgcattacaggaaaatcttaatttcgatagatttattcaactgtctttattaagcttgagcaaaatcttacctttgatggaacaaggcaaacggtatgatgaagcatgcaaaatggtttatggcgatcattacggctatcgcaaacagaaagaatccctgtttctccctgctatcccctcagacgatattcgcaacccagtcgtattgcgtaccttatcacaggctcgtaaagtgattaacggcattgtccgattgtatggctcacccgctcgtattcatattgaaactgggcgtgaggttggtaaatccttcaaagatcgccaagaaattcaaaaacgtcaagatcaaaatcgcagcgagcgtgaacaatctgctaaaaaattcaaagaacttttcccaaacttcgctggcgagccaaaagccaaagatattttaaaattgcgtttgtatgaacagcaacacggtaaatgtctctattctggaaaagccctagaactcaaccgcttgcttgaaaagggctatgttgaaattgatcacgccttaccgttttctcgcacttgggatgatagctttaataacaaagtactggtgcttgctcaagaaaaccaaaataaaggtaatcaaacaccttatgaatggcttaacggaaaagacaattcagagcagtggaaacattttgtcgcattagtaacaggcagccgatttagttatggtaaaaaacagcggattctgacccaaaaattagacgaaaaaggctttttagaacgcaatttgaacgacactcgctatatagctcgttttttatgccagcatattgaggacaatatgttgctcgtgggcaaaggcaaaaaacgagtatttgcttcaaatgggcaaatcaccgcattgctccgcaatcgttggggactaacgaaaatccgtgaagccaatgatcgtcatcacgctatcgatgccattgtggtggcatgttcaaccattgcaatgcagcaaaaaataactcgtttcgtccgctttgaagaaggcaatgtttacaaaggagaacgtgtcgatcatgaaacaggtgaaattatcccacttcacttccctgatccttggaaatatttcagacaagatgtgaccattcgtgtctttgatgataatccaacaacggcattggaaaaaatgttgtctgatcgccctgaagctaaccacgaatttgtgcaaccattatttgtttcacgagcccctacacggaaaatgagtggacaaggacatttggaaaccatcaaatccgctaaacgattagatgaaaaaataagtacatcacgagtaccattaacacaaattaagttaaaagatttggagagaatggtaaatagagagcgtgaagtcgcactttatgaagcgttaaaagagcgtttaactacctttaatgatgatccaataaaagcctttaccgaaccattctataaaaaaggcggtcagcaagtgaaagctatccgccttgaacaagtacaaaaatcaggtgtattagttcgtcaaaataatggcatagccgataatgcttctatggtgcgtgttgatgtgtttatcaaaaatggaaaatattttcttgttccgatctacacttggcaagtagcaaaaggcattttgccgaataaagcggtcatccaaggaaaagatgaaaatgaatgggaagaaatggatgaagcagctcaattccagttttctttatttccaaacgagttaataaaattaactacaaagaaaaaagtattctttgggtactattcgggaatgaaccgtgcgattgcaagtattaatatcagagagcatgacttagatataagcaaaggtaaagatggagaacatttaagcgttggtgtaaaactagcactttcctttgaaaaataccaagtcgatgaactcggtaaaaatatccgaccttgtcgtccaactaaacgacaacccgtaaaataatccaatcaagccgtaccctgtatttaggggcggcttttattttaggagaacacaatgagctggcgaagtgtgctgattagcactggtggaaaactctctctgcaacgcaatcaaatgctgattcagcaagagaaaaatgaatttacggtgcctatagaagacattgctgtggtcgtcatcgaaagcaaagaagtggtgctcactaccccgttactgtccgctcttgccctaaacggcgtaacactactgacttgcgatgagcaatttctaccttgtgggcaatggctaccttttaatcaatatcaccgccaactcaaaaatcttaaattgcagcttggtgcatcgcttccactaaaaaagcaattatggcaaaaaatcgtccagcagaagatccataatcaagcctttgtacttcacactctttccttcgaaactcaggctaaacgactaaccaaaatggcaaatgaagtcaaatcaggcgataagcaaaatttagaaggacaagccgcattgatctactttcaagccctatttggcaaagcctttcatcgtgatgatgataatgacatcaatgctcatctcaattacgcctataccgtactacgctctgctgtcgctcgtgcgattgtgctttatggctggctacctcagctaggattatttcaccgcagtgaactcaatccttttaatttagctgatgactttattgaaccatttcgacctttggtcgatctgctcgtttggcagctttggaaagaagaaaaattagccgaacacctcaccccacacagcaagcaacgacttatcaaaattctgcattaccaaatgcaattccagcaagaaacctttagcgtattggcagccattgatcgaactatcggatcactacaagccagccttattgcgaaaagtgctaacttgctgaaattacccgaacttctcccgctaaaggaacaccactatgagtgaggcaaaatttatgcgactaatcgttttcttcgatctccccgtcaccaccaaagccaaacgccgagcagccaaccaatttcgtcaatttttgcttaaagatggttatcaaatgctacaactttctgtttacgccagaatcgttcgtggtagagacaccttggcaaaacataacaaacgtctcagtgagcatctaccagaagaaggatcgattcgctgtttagaagtgaccgaaaaacagtttgccagtatgactattttgctcggtgagctcaaaccacaagagaaaaaagtcaacgcaaaccaaatgttacttttttaacagaataaatagcaaaaattgagacaatgctacattgtaaagatttgttaactgcttattttttactctaaaatgcaaatatctatccgcctaaacttacctttaggtgcaagataatatgctctttcacacccaatttccttcttaaacacaggctaaatttgcaaaaaattccaagaaagtgaccgcttgtaaaaagcaaaacagacttttttcataaaataaaaatgccccaaaaccttattatataaggctttggagcaatgagattgtagcactgcgaaatgagaaagggagctacaacgcgtaaagccaacggtccgccttggtgcatattgtagcactgcgaaatgagaaagggagctacaactttatcatagactgttgccttaaccgttgaattgtagcactgcgaaatgagaaagggagctacaacctggtcagtcgttgattggagtaaatcaaaattgtagcactgcgaaatgagaaagggagctacaacacacaggggctgattaaggatgatctgaccattgtagcactgcgaaatgagaaagggagctacaacaaaaacgaatgtcttagggatagtaatccgattgtagcactgcgaaatgagaaagggagctacaactttatcatttatgcaataaaaagcagtattattgtagcactgcgaaatgagaaagggagctacaacccaccaatctgtacgttgttactacccgatattgtagcactgcgaaatgagaaagggagctacaaccacccatcatggcattgtccctttggcaacattgtagcactgcgaaatgagaaagggagctacaacgcttgttcgctgttttggcggtataatcggattgtagcactgcgaaatgagaaagggagctacaactaaaggccacaatgtaactgggtagatgggattgtagcactgcgaaatgagaaagggagctacaacaactgtttatttaaggaaattttatggcttattgtagcactgcgaaatgagaaagggagctacaacggcaaccgttttgaaatcacttggatttttattgtagcactgcgaaatgagaaagggagctacaacgaatcacccgatccccatctaaatgaaaaaattgtagcactgcgaaatgagaaagggagctacaacctacatcacgcacataagcaaccaacggtaattgtagcactgcgaaatgagaaagggagctacaaccgcccatactttgacaaaatgccttataagattgtagcactgcgaaatgagaaagggagctacaacttactttcattgcaactctttttgtgtactattgtagcactgcgaaatgagaaagggagctacaacgtgcaataacatctatcccaccaatagttaattgtagcactgcgaaatgagaaagggagctacaactaaccccaacaaataaaacactaataatacattgtagcactgcgaaatgagaaagggagctacaacttactttcattgcaactctttttgtgtactattgtagcactgcgaaatgagaaagggagctacaaccataactgaataccttttcgaattggttggattgtagcactgcgaaatgagaaagggagctacaaccattggcaatgactgcgtgagtgtgaagctattgtagcactgcgaaatgagaaagggagctacaactcgctctgacaacccttgaaacttgctccgattgtagcactgcgaaatgagaaagggagctacaacaaaattctacgtcattccaattaccgtctaattgtagcactgcgaaatgagaaagggagctacaacgagagcctattttgtcaaaaatggaacaatattgtagcactgcgaaatgagaaagggagctacaaccctttccattgcctcatcaaaactaaatttattgtagcactgcgaaatgagaaagggagctacaactgagcttggcgacgttgatagagcttgaacattgtagcactgcgaaatgagaaagggagctacaacctgcaataacaaggtgattgttttcgatttattgtagcactgcgaaatgagaaagggagctacaactcaggcaaccaaaacaaacccgaggattatattgtagcactgcgaaatgagaaagggagctacaaccaagagatctggccatctcgttacgaatagattgtagcactgcgaaatgagaaagggagctacaactttatcatagactgttgccttaaccgttgaattgtagcactgcgaaatgagaaagggagctacaacctggtcagtcgttgattggagtaaatcaaaattgtagcactgcgaaatgagaaagggagctacaacacacaggggctgattaaggatgatctgaccattgtagcactgcgaaatgagaaagggagctacaacaaaaacgaatgtcttagggatagtaatccgattgtagcactgcgaaatgagaaagggagctacaactttatcatttatgcaataaaaagcagtattattgtagcactgcgaaatgagaaagggagctacaacccaccaatctgtacgttgttactacccgatattgtagcactgcgaaatgagaaagggagctacaaccacccatcatggcattgtccctttggcaacattgtagcactgcgaaatgagaaagggagctacaacgcttgttcgctgttttggcggtataatcggattgtagcactgcgaaatgagaaagggagctacaactaaaggccacaatgtaactgggtagatgggattgtagcactgcgaaatgagaaagggagctacaacaactgtttatttaaggaaattttatggcttattgtagcactgcgaaatgagaaagggagctacaacggcaaccgttttgaaatcacttggatttttattgtagcactgcgaaatgagaaagggagctacaacgaatcacccgatccccatctaaatgaaaaaattgtagcactgcgaaatgagaaagggagctacaacctacatcacgcacataagcaaccaacggtaattgtagcactgcgaaatgagaaagggagctacaaccgcccatactttgacaaaatgccttataagattgtagcactgcgaaatgagaaagggagctacaacttactttcattgcaactctttttgtgtactattgtagcactgcgaaatgagaaagggagctacaacgtgcaataacatctatcccaccaatagttaattgtagcactgcgaaatgagaaagggagctacaactaaccccaacaaataaaacactaataatacattgtagcactgcgaaatgagaaagggagctacaacttactttcattgcaactctttttgtgtactattgtagcactgcgaaatgagaaagggagctacaaccataactgaataccttttcgaattggttggattgtagcactgcgaaatgagaaagggagctacaaccattggcaatgactgcgtgagtgtgaagctattgtagcactgcgaaatgagaaagggagctacaactcgctctgacaacccttgaaacttgctccgattgtagcactgcgaaatgagaaagggagctacaacaaaattctacgtcattccaattaccgtctaattgtagcactgcgaaatgagaaagggagctacaacgagagcctattttgtcaaaaatggaacaatattgtagcactgcgaaatgagaaagggagctacaaccctttccattgcctcatcaaaactaaatttattgtagcactgcgaaatgagaaagggagctacaactgagcttggcgacgttgatagagcttgaacattgtagcactgcgaaatgagaaagggagctacaacctgcaataacaaggtgattgttttcgatttattgtagcactgcgaaatgagaaagggagctacaactcaggcaaccaaaacaaacccgaggattatattgtagcactgcgaaatgagaaagggagctacaaccaagagatctggccatctcgttacgaatagattgtagcactgcgaaatgagaaagggagctacaacccacctaccgaaacccccgcacctgcgtaaattgtagcactgcgaaatgagaaagggagctacaacacaccttgtcgtgtaagttggctgggtcatattgtagcactgcgaaatgagaaagggagctacaacgaaaagcggcaagtatttagtagctgcaaaattgtagcactgcgaaatgagaaagggagctacaacaaaaacgaatgtcttagggatagtaatccgattgtagcactgcgaaatgagaaagggagctacaacccatagcaacgagatacgaagctataaacaattgtagcactgcgaaatgagaaagggagctacaacaataagaccttgccctgaatgtggcagagaattgtagcactgcgaaatgagaaagggagctacaactttcttcttcttcggttgttagcccagttgattgtagcactgcgaaatgagaaagggagctacaacctgttgcgtcaatcattacattctccttttattgtagcactgcgaaatgagaaagggagctacaactatctttatttgaacaaaatggagttatccattgtagcactgcgaaatgagaaagggagctacaacgttttgatgatgtggcaacaatgagccagcattgtagcactgcgaaatgagaaagggagctacaacatggaaacataaattatcttaatactattgattgtagcactgcgaaatgagaaagggagctacaaccaggtgttgtaaaatgtcattattattcatattgtagcactgcgaaatgagaaagggagctacaacaccaagccccgttacctttcacggggcagaattgtagcactgcgaaatgagaaagggagctacaacctttggtctgcggttgagtaagccgtggctattgtagcactgcgaaatgagaaagggagctacaaccaaaaatggttgattgatatgttgctcaaaattgtagcactgcgaaatgagaaagggagctacaacatcatgttttctgtagtgcgatatttcttaattgtagcactgcgaaatgagaaagggagctacaacaccaaagcagaaggggtgattcatttcaccattgtagcactgcgaaatgagaaagggagctacaacctttcttgggtggtgttggtaaagctcaaaattgtagcactgcgaaatgagaaagggagctacaacagagctccagaacgtatctcgcaagaagtcattgtagcactgcgaaatgagaaagggagctacaaccccaaaaagaacagaatgcagcgaagcctaattgtagcactgcgaaatgagaaagggagctacaaccaaaatcacgctgaacaatattcattgcgtattgtagcactgcgaaatgagaaagggagctacaacgcaatttgacgggcttgctcaccaagttgcattgtagcactgcgaaatgagaaagggagctacaactcctgttagattagctgcttccccccatctattgtagcactgcgaaatgagaaagggagctacaaccggatattcgtgccaaagtggaagctgctgattgtagcactgcgaaatgagaaagggagctacaacctttattaagatagtcaaaatgctcttgcgattgtagcactgcgaaatgagaaagggagctacaacttaaccacttatggttcgcaattgtttgctattgtagcactgcgaaatgagaaagggagctacaaccggtttagaggacaacaaagcgaacacattattgtagcactgcgaaatgagaaagggagctacaacggctattgatgtctgccaccttgccgatttattgtagcactgcgaaatgagaaagggagctacaacctgttagattcaactcagaaggtgaggtaaattgtagcactgcgaaatgagaaagggagctacaaccagatacctgtgagattagtcgccctgatgattgtagcactgcgaaatcagccattcagattcctcattttcaccaaaggctttaaataccaacttatcagcacctttttgcgaaaggcggcgtagtgcgtggatttgccctgaaatgtacacattcagtaattgcccttgctgtgcaagactgtcaaaaagttgcagatcctgcgttgaaaggctttgcggctgaatttttactgcgatttcttcaaatctcgctatacgcttgcccgtttcgtccgtctgtgtccctgtattgagtttgagtgttgcgggaatgtttggattgaccgagcgaatagctcgattcgcaatcttacgtaggttcattttgttcctcgcgttaatttttcttaaataaccgatttaatcgctgatggatattgctattttgagcatttttgctagtttatgaatgccctctacagggcggattgaagtcgggtcaagcccatcagcttgaacagtcgagtcaacccattgagctgaaggggatttttcatttaattcaattgcttcaatcgtgtagaacttattcgcttggtctttgcgggagatttctttcagtgtcaatttaaccaaatactgctcattttcattctctagcactgaaaacgaggtacggtaaacaaaaatgttggttttgattatttactttaatcatcacaaactctttttattcaaaaagtctttaataaacataatcttatgtttctttgttaatccattatgtgcaattaaactccgtttaagctcactaaataagccttctatacgatttgtcgttttttcaatattaagctctagatacttttcataggtaaataaataatcaaaatagcgtcgaatactggcgtaagtactccttacattacgatgtttataaggaaaataacctttctcattggctttatctgaacgctcatttaaaaaatcttgatgttttcgtttccaatgatgtaagagtagataaaattcattttttgtgcttgcttttaacgtttttgcgataagtttcaattcctttcccgcaacagattgatgcttttttcgtaaggctctcatcaccattgccacaagatgaaactggcacatctgtgtcggcgtgtccaaaaaatctttcagtaatccgcgtcgtacatcacaggtaattgattgaataatacagtctttttctctaaattggttgatagcaagtttggaataaacatccttttccgtacggacaatttgatgataaatcacgtttcctgaacacgaatccattaacactaatacgccaaaatcacgacaaaaaatgtcgtatccgcaataatatttaatttccgttgagtag

SEQ ID NO: 3187 - DNA, 21179 bp, synthetic construct
  misc_feature 1..21179: note = Synthetic
  source 1..21179: mol_type = other DNA
gattaataatcttttcgatatcagcaaacccgaccagatctaccatttctaacacgatttcaggtaaataacctgcaacattttcaagttcagactgcataaaatttcccctttgtgaccatttaggcggattgtctcacggaaatttcaaaaagcaggtttctacacctaaaaatatgataaaaaaatcccgcacgtggcgggattagtgcgttatttattgcaattttctttcaaaagattattaactttaaggtatttttgctcgttgtgggcattgagaaaaaatcctttagctacctccaaagcaaggcaggcttctttcatatcgctatgtttctttgccatttcaaaactctttaatttatcttcaccgaggttgttttgtaattcttcggtattttttgccattgtttcagcatcaataatggggttagcgtctgtgatttcgacaaagtatcggcggttttcaacccataccgaatataaaatttctaatttattataagtttctgtttgcaaaagcgcataacatgacctactgtctttgtcctgtcccttttcttttatttctcttactacaaatacatctttaagactaaaatcaattcctgtctcttttgttctattatctaaaatctgttctatggtatctccaacttcttcacattttggtatatcttggcttgttaagctggcgtgcgaaaataaagggatggataggataaagagtgcaatagtttttttcataatttccccaataaaaaaggctccataggagcctttaatttacgcttaatttgttgttatgcaactaatttttagctttctgttttcttcggtcatacactgccaacatttgcaccacttttttcaactgccacacctccaaccaatgcacgaaatctatgttaaatgcttttttcgccatactgtctgcgtaactctgtggcagtccgtattctgttaaaagtgcggttatttttgccatatatttcgctttatccgcccttggcgcgggacgttttggcgcatttttcgcactaaacaccacgccttttgcttttatggctcgcaatactcgcatcaattcggcatctgtcatcacggtgcaactgtgtttatctaccgtgtccaacaaaaagcatttatattggtcatcagtcattttaagcatgcctttgccgatgtggatcttttggatcatctgtttacgggtttgtggttgcattttgttcctctttccatgctttccagactaaatattctggcatattcttaacaaactccaatttaccaatagccgcataacgttcgatatactgtattgccgctgtccgtttgtcttctgctaatttatccacattttcgaccgcgcttttgccctgttcgttacgcaccacggcaaataacggtttagccccctcatacacttttttaagatagttatgattggttagcgccaccacgtttcgggtctcacgacggtttttcatcacgccattggtggtttccgtgagcgcatgggacaacaacggactcggctgatacatatctaacacttcgcgcattaatttaagcgcacggccgttagataacgccgctttctcgggtctaaatagggcaatataactcaccaacgcacgggcattatcgccgcgtaaattggtaataatacccaacatttcacgccccgcatcatcttccaacagtgcatccaaatggatgtcgctatggcaaaccgggcaacgacataatttcattctttcgtctccttcgttacatcagcaacagcccattttaaaaatgctttgattgatatagttttcaatgtcgcttttaaaccatttttaagccatttcatttcacaatatgtcacactttcattagcacgattaactttaaaaatacgtctccagcttactaaattgcctctatatatttttacgttatttgatacataatcatgatcttcaagtaaatcgctttcttttaacattgttgctcctttagttaataaaacacattattcagcccactttatctaagtatccccctctttcgtaaagaggggctaggggagatttaatgggctgtaaatgggttttagtcctcaaaataaatttcatcaacgttcggcactaaccgataccatgggctcacacggaaaattgagtaccgttcattcccttgttctctgatggcgagaaaaacatattcatcctcttcataacactgccaatcgctataattacgcataaataattcttcggcgacacttgactctaaataaaatggtcgtttttttcggtcgaattctaaccactcgctatctttaatgattttctctacttcttctttttctggttcttcgtcatctagatcatcaataagtaaccattcgtattcgatatccataatttattcccccattcgaattgaaaatccaccgtgacgaaatacaacattctgatcgtcttcagtaagttttttcattaattgatatgttttagggcatctgccagagcctttttcttcgttaaataaacgttctaactcgtcccaatgttccactaattttgcccaaatgggagacacggttttcatcttgtaaagataattgcgcatttctggcacacgttctaataacttcgcacaacgagataaatcgctctgatcaagcggatagctcttacgtcttggcactacatcaaaaccaattacaaacgccatacatttactgcttaatccgacatcttcatcagctgccaaccattgaatgatttttgtctgcatttttcctccttattaattgaaaacacattattcagcccactttatctaactcattcccctcttttgtaaagatgggttagggaagatttgaatgggctgtaaatgggttttatcaatctaaccctgaccactcatgatatgcggtagcctggataaccaaactaagacgcacatcaaataactcttgttcttctggctttcctttcggatagattgatatataaatattttcatcttcctccagttcccaatcccaattattttcttcaacaatctgctcaacaaggctatcaacatcatcgtgatcgctttcatactttttactttcactttgttttatcttcgcctttatatcttctactgttggctctttgctaccaaaaacgatatattcccattgatatttcatattttatccttagtcgattggtggttgtggcaacggttgccagtgggtaacctgtgcacattcgccattaaatccataaaaacgatttccctttatcatatacgcgaagaaatatgtagatcttttatctacatcttcttctcgaccgaaacaaataacaatattgcttcgttctgaaccatcatgatcaaatattgctggtaattcgtcagaacacttaatccaaccattgttttcactcattttcatcccccttattttgctcgctgaaggatctcgtcaataactggatccttcagaagaattttctcaatgaagccaatcaacatacgaccagtttcattaggattttcgactttcgcactaacatcccattcgtccccatcttgggtgcaaaaatctaattttattttgtgctcgaaaccacttttaacgttatcgtccataccctcaagcacaatccaacccgctctcacaatttcaggtaacttaaacatcaaacaagtcatcgcatccttaacatataaagctgtcatttgatggtattttgtgttgacattaaaagttaaatcgtcatcactgactccaactttaaactcaaacgttactgcatattttttttcttccatttcacttatctccccaatctcattctcaatcctggcaacaagttttgcacatttccaacataaaccgccgcatgttgattttgtccagttcgtaaggctctaagcgcgcttattagctgttttgctgcttgttcaagttgttcatccaaccgcactttttcttgctcagtcatacttcctccacttcaactacatcatcaatttctgtaatggtgtgtggcagtttattgacatcacacacatttaaatcacacatatctaaaacttgttcattgctttcggcttcaacaacagcctcaaccaaacaataaaaacgtgccacatacttagccatgcttcacctccggtcttctgcttggatttttgacataatgcgcacacatcttttgacggtttaatgcccattcttcattttcgctttttcgagcaacaatagctgctctctgccatgcagcttcagcggttgcccatgcaccagcacgctccatttcgaccgctagcgtgctaaaatctttataggttcgtagtttttccatatatgctccttagttgttaatgattaaaacctattactaatgcccctcattccgtccccctcttttgtaaagaggggttaggggagatttaaagggcatttaaataagttttatagacttcctaaaactaaaattgcggtaagaataattgcacatagaatgcattgaaaaatacttgtgaaatacatctacgcccccgctacatctaacgcaatcggcacatactgatcggtttcgcccacacgctcataaagtcgcacataagccttactgcttaccacttgcacgctttcgctaattgcttgcattgcgttttgccagcggctatcttggatttctacgcggcgtaagcccaaaatacgtgaagtgttcaaattgccttccttatccacgttaaaagcacgttcaattaatgcttttaattcagggcgtgagccttcgctccattcattcaagcactcatcaatcaatactttggcagcctgaatacgttcgtcaaactgcaaactttcattgatggcgcgctgaattttgtatttaccgtcatagctaaacagcgtcacattgcctttattaccacccactttcgcaccatatttctcggcagaaagctcaataaaggcttgtacatcaccaaaaataccttccttaaaatggctgatggctttgcttaaatcatgaccacgttccacccattcatgcacgagcgcatcacgcgctttgtcgatttctttcaccaactcagctggcgttaaattgcctttggcatcacgccaatattctttaccttcaatcatcactttcatggtttaaacctcttctttatctaatttgattacaatcaatctgttgcctttgttacgcttgaggatcgcttctgaccccatcgcatacagtgtttttttcctaatattaaatttctttgctagttcttccgccgtgccgtcgcctagattctcttctccgcgatatacggcgtagatttgacgatatttaggcacctctcccccttaagcccaatagaccataacgccttgttcatttgctacgtttcgcacaatatgcacgccatttttgacggtggtcatttgcacgcctttttcttgtaatcgacggcttgggtttaaaatcaccatttttggaaaacggccgtctttactctcaacgatttgtacgccttcacgtcttaacgcatacgctacgcggttcatttgttcgctcatttggttgctcctttggtttaattagttgattaacatgcctgcgtaagaattgattaacttctcgtcaatctgtttgccgtgcatttcggccacacggatcacaccgcgcataagtttggttaatcgacgggcgttgccatggctggctttaaataggacttggttaaattcatctgtacctaagccgttttcggctaatttatggatgtcttcctcacttaactggttacccaagtcacaagccaagcccacacggctataaagttgcgctaattcaccgtatttacctttcaagttcaccagtaggcgaggcatacctgcaagcaccacaccgcagcctgtcaagtcatggattcggcggatatattccaggcttttcgtgcttaacaattccgcttcgtctacaataattaagcgaccttcgcccaatttttcggtgatacgagtaaacaattcatgattagccccgacttcattcaatcccaactggtggcagaggtttttcaataaaacttttgggctacaacttggctcaacttcgataaaaatcgtttctgggttttggctgacatactgttttaatgccttggttttgcccaagcctgccgcgccgtaaactacgctgatttcgccttcgacgtgggcgatatgcaccacatcaaggcaacgttctgcggcataagtcggcacaaatttgttgttaaaattgcgctcaaccactttgtctttttcgcgacggattaagcgttccactgcttcgtcgatgtctttggtcacgcctttataaatgccttttaaatactgactgataacggcgttggacttgccgagggcttttgccacttgtgtttgggttagccctttctgttgcataaatcttgcgagttgttctttcatgctaatgctcctgtatttgtaattaatcttgatgcggtgcaaattaaattgccttttaagctataaacttctaaaaagtcttgttttggtctaatttcaaccagctttcctttatatttaatcagctgataagaaaaatactcattacgcttgtacccaattcgcccttggtggacgtatctcagaatgcgttctttcattatttaactcctgcaatcttgcgttgttggcgtctcatttcgcttggcaataacggaatttcttcgtcatcataaaagcggttaacttgttttgcgcgtaagctgtgtaatagctctgcaccttgttgatgttcgatcgtaataaccggatttaactcgtctaaaatctcattttcacggtgtttaatacggtttaatctacctttcgcgcggttttcacgttgttgttcaaccataggtaccgggaatgcggctttcttgtgtgcctcgaattcagcgttacagataaaacgaccatctaacgtgcgcacctgcacaaaatccgcgttgtgaatatccacaccgaccaccacttctttcccttgatggtttagcagttcaaggtggaaatatttgtggtttttccactcaatcagtccgcgtttcgtcacccgtttaaagtgcgggcgctcaatgtcgcgtaattccacgtcggaaaggtaaacaatcagttctggattagttacgcgttcatacttgacagcaggagtgcaacgaatttcagagtgcacatgctcgttgttgtaccaatcaatcacttcttggataccaaccatcaactcttcccaactcaccagtttttctttcgctttgcgttgtaacggcgttaaaaccgccccttttttcgcattggaaagggaaatcatggattgcaacatccgtcttttgctatcagggtctgcatccgccccgtaataggttggaaaacgttgtgcaatgcgtttaccgacggttttatttaagcgttcaataatccctcgtccttgcggattacctgcaatcccagtggcgtgataaatgctaaagcgaggtaaaatcccagttacttcggcatcaagtaaaatatttttctcaccgcccccgttatcggagtaataaatacaaggtaaaccatgctgagaaatggcatggcgtaaagcgtccaacactgcaaaagcactttcagataacgccaacgaccaccccacaatttttcggcttgcaccatcaataatcatggttaattcaggcgtaaatggtcgcccatgaatagggtgtgccactttcatcttcagcgagtgaccgtcaccaatccaaatatcattagccttaaacaatgaccaatcacgctcaacataaggcaataaacctttgtattttgagccggttaagcggccaaactctcggatatgcaatggcaacttagccaatgcacgacgcactcggtcaaggcttggtaacatttcgcgtaacatgtcgtcattttcgtggcgagtaagccattcggtttcaaaaatgcgatacgcatccactacgctaatgccgttggtttggcgataaatccccataaaccaagacatccaccaaatactttccactttatctgcctgacgttgactcggcgccaacgcacgcaaacgttcttccgctgttttgcatttgtgataatcaatcacccactgattcagggttcttggtgataacacacggccgcagttattgccgtttttgctgttagccttggagatcaacgccatcaaatcttccgaaatttcaccgcactttgccgcattgcagaggtgggtaatagctttgattcggctttgcacctgctccaactcgctcacataagccactaaagccatgcgtgcatcagcgatttcacgctgtttggtggtgaggtcgccaaggttcagatttttaaccgttgggagttgttttggtttacttatcaccgcaacagcaaaacgatctctaattgcggtttgtacatcttccggcaaggtagaaactgcatattcaacaccgccacctttaccaactcttttttgagttgcccaaccattcttcttagcttgataaataattccttgcactgaattaggtaaacaggataaacttaaattaagtagttccttggctgagtagtgtgtttttaggttgtcgtttctcataaataacctcaaaactatctatcggcatattttttatggttacgttgctcataacgtgatgcccaaataacttcggcaggaacgccaatggcttcagctataatgcgttcacctttgagccaaggacggtctagcgcgttttttaatgtgctaccgttgctataaccatgctttaaagatagttggcgcaatgaccaacctttttttgctagtgcagctttgatatcttctcgatgccaatcaatagctgtttttttagtttccattaatgtcctcattagataaccttatttgttaatctgatgaggatattaaactacaaaagtaatcatttcaactttaaaaatacacttttaaagttaagtgattactttttaatctatgcttttatagttatttaatataattgtttgattttaatgattatatttgtaactttaaaaataattaaaaattcatatggagtttttaaagttatgaaggttaagtttaaaaatacatctctaatagggaatcggattagagaggagagagaaagaattggaaaaagtaggaatgaattagcagatagacttggattatctctttcaacactgcaattatgggaaacaaacgaaagagagcctcaagcctcaatgattatcgtgatagcaaaagagttaggagtttcaccgagttatttattaacaggagaaactaatgaaacgctagatgaaaaatcagataaaatagcagagccaatggctcaatattcacataacgccattgataatgactttgaattcattgatgattgccgcgatgttattgtaacggcgggttatggcggtataaacggagattaccccgaaatcaaaaaaaccaagatagagagcgaatggttgcgtgcaagagggttaaaggccgaagactgcggcaaatataaagtatgcggcgatagcatggacgacacgctaaaagacggtgaagacatcatcgtcaatcatgccagcaaaacgttaattgatggcaaaatctttgttttaaataatcaaggatcaatgctgataaaacgcattcaacgcacatttagcggggtagagctactcagcgacaatagcgcataccgcccaataaaactcacggcagaagaggcggacagcctacttgtgattggtcaagttgtgttaggttaccgcaatttttaaatgtaaattcagttctcaagtattacttgatacctcaaattaaaagcggtttttaaaagtgtttaaaaaccatttaaaaaccgcctattcctatgcaaataaaaacacaaatttcacccatttttcaccaatccccaccattttcattatttgcataactctaaccccttaaaaacaacaaagccccataaacagaggcttcaccgcattttttcgagccaaatttttttatttctttctatgcaaatattgtcactaccccacataatcaaccaaccttatgagaaagctaaattaaattatgcacaagtacgttcaagattaaatttatctgatgaggcaatctttaaaggcgtccgttattccggtgaagataaaaaagccattgaaaccaaaacaactctgatggaaatgaaagcctatcaccaaattcgcaaggtattagaaggtaataacctaaaagctgaatgggctgaattaaaggcaaatccaacattattagatgaaattggcacggcattttcattatataaaactgatgaagatatcagtggttacttagcaggaaaactctctcaacctgtattagatgtattattggaaaatcttagttttgataaatttatccaattatctcttaaagctttatataaacttctgccattaatgcaacaaggactacgctatgatgaggcttgtagtgaaatttatggcgatcattatggtaaaaaaacagaagaaaaccatcacttcttaccacagattccagctgatgaaatccgtaatcctgtagttttaagaacactcacgcaggctcgtaaagtaattaatggcgtagtgagattatatggttcacctgctcgtattcatattgaaacaggacgagaaattggcaaatcttacaaagatcgccgtgaactagaaaaacgtcaggaagaaaatcgtaaacagcgtgaaaacgcaatcaaggaatttaaagagtacttccctcattttgctggtgaacctaaagccaaagacattttaaaaatgcgactttataaacagcaaaatgcaaaatgtttatattccggtaaacctatcgaattgcaccgtttattagaaagaggctatgtagaagtcgatcatgccttgccgttttcccgtacttgggatgatagtttcaataataaagtattagtacttgctaatgaaaatcaaaacaaaggcaatttaaccccttttgaatggcttgatggtaaacataatagtgaacgttggagagctttcaaagcattagttgaaacgaccgcatttccttatgcgaaaaaacaacgcatcctaagccaaaaacttgatgaaaagggctttattgagcgtaacttaaatgatacgcgctacgttgctcgcttcttatgtaactttattgcagataatatgcgcttaacaggtgaaggaaaacgcaaggtatttgcttccaatgggcaaattaccgccttacttcgtggccgttggggattagcaaaatcacgggaagacaatgaccgccatcacgctttagatgccgttgtggttgcttgctcaaccgtagccatgcagcaaaaaatcacacgttttgttcgttttgaagcaggcgatgtattcactggtgaacgaatagatcgtgaaacgggtgaaattattccattacacttccctacaccatggcaatttttcaagcaagaagttgaaattcgtatttttagtgataatcctaaactggagctagaaaatagattgccagatcgtccgcaagccaatcatgaatttgtccaacctctatttgtatctagaatgcctacacgcaaaatgacaggtcaaggacacatggaaaccgtgaagtccgcgaaacgtctcaataaagggataagcgtgattaaaatgccactcactaaattaaaattaaaagatttagaattgatggtaaatcgtgaacgtgaaaaatatctttatgatactttaaaagctcgtctagaggcttttaatgatgatcctgctaaagcgtttgctgaaccttttataaaaaaaggtggggctattgttaaatcagtacgagtagaacaaatacaaaaatctggcgtattagtccgtgaggggaatggtgtcgcggataatgcctcaatggtgagagtggatgtattcactaaaggtggaaaatatttccttgtacctatttatacttggcaggtagctaaaggtattttgcctaataaagcaatagttgctctcaaagatgaaaatgagtggatagaaatagacaataaccacatattcctattttctctatatcaaaatgacttaataaaagttaaaacaaaaaaagatgaactctttggatattttaactcgttaaatagagctaccgctgctattgatataaaagttcatgatcttgacaaatcaaaagggaaaaacggtatttatcaaagtgtcggagtaaaacttgctctttcctttgaaaaatatcaagtagatgaacttggtaaaaatattcgtttatgtaaacctagtaaacgccaagctgttcgttaatctcaatttaatcctcatacgtattacgtatggggattttttgtaaggatacattatgacatggagaagtcttcttattagtaaagggggaaaactctctttacatcagcaacaaatgctgattcaacaagaagggaatgaatttactgtccctttagaagatattgctattgttgttgtggaaagccgagaaacagtgattacccttccgttgctctcggcattcggtttatacgggattactttattgagttgtgatgaacaatttttaccttgtggtcaatggctcccttttaatcaatattatcgacaattaaaaacccttaaattacaacttgaaaccactttgccactgaaaaaacaactttggcaacgtattgtgcaacaaaaaattcgtaatcaagcaaaagtcttatcactctgtcagcatcaagaaaaatcagaacggttactccaactcgctaatttagtgaaatcaggcgataaagataatattgaggcacaaagtgcggtcatttatttctctggattattcggagctcatttcagacgaaaagaagaagacaatgcgattaatatacatctgaactatgcttataccattatgcgttcagctgtggcaagaaaccttgtactttatggttggctaccacaattaggcttatttcatcatagcgaactgaatgcctttaatttagcggatgattttattgaaccatttcgccctcttgttgatttgcttgtatggaacttgctcgaaaaaggattactcaccacaaaccttagtcctatatccaaacagcaattaatcaaaatcctgcatcatcaactgcgctttaaccaggaaaaagtgagtgttttgactgctattgataaaaccattgcctctttacaaattgcacttattcaaaaaaatgcaacattattgcagttaccagagatcgatgcactacaggaataccaatatgagtgaggaagtctttatgcgtatgatcgttttatttgatttaccggttaccactaaagcgaaaatgcgggcagcaaaccaatttcgtcaatttttacttaaagatggttatcaaatgttgcaactttctatttacactcgaattattaaagggcgagatgcgttagaaaaacatcataaaagactcgtcgcacacttacctgaagagggctcaattcgatgtttatctattacagaaaaacaatttgcgagcatggaaattttagtgggagagaaaaaaacgcaagaaaaaaaggtcaattcaaatcaattattgcttttttagccgttttttagacaaaacaaaagcccctaaaccttgcggtatggggcttttggctgtccctattatagcactgcgaaatgaaaaagggagctacaacacggcttggcggcaagtatggcgagcgttaattatagcactgcgaaatgaaaaagggagctacaacatctttttgcatgtctgttgctggtgcgtaattatagcactgcgaaatgaaaaagggagctacaacgattggagttatggttgcatttttatctggattatagcactgcgaaatgaaaaagggagctacaacctgtatcgttaaaagatgcacgtcaaaaagattatagcactgcgaaatgaaaaagggagctacaactaaaattatgtgtttaactgcttccaatttattatagcactgcgaaatgaaaaagggagctacaactgattaacgatttgggcgttgatgagattgattatagcactgcgaaatgaaaaagggagctacaactcctgtgtcatctaactgttgcctattttaattatagcactgcgaaatgaaaaagggagctacaacacaaaatataacgataacgacgcgcagttgattatagcactgcgaaatgaaaaagggagctacaaccaaaaatacaatcgaaccgctttttctgaaattatagcactgcgaaatgaaaaagggagctacaacacgacaacgttttcatcaaagaagaaaaaaattatagcactgcgaaatgaaaaagggagctacaacacaatatgcgcatttatcagccttagatagattatagcactgcgaaatgaaaaagggagctacaacgattctaccgatcctaaatcaagaattgagattatagcactgcgaaatgaaaaagggagctacaactatactgttaaacttttaaaagacggttcgattatagcactgcgaaatgaaaaagggagctacaacttgacggaacaatgagtaaattagccttgaattatagcactgcgaaatgaaaaagggagctacaactcactgtcgaaacgtatgttggttttgtgcattatagcactgcgaaatgaaaaagggagctacaacatgtttgattatctatatacacaaaggaaaattatagcactgcgaaatgaaaaagggagctacaaccatattgtcctcatactcgccttggtagttattatagcactgcgaaatgaaaaagggagctacaacattgaacagcgctttgtctgcgccgattcgattatagcactgcgaaatgaaaaagggagttattacaatacagtataaatttattatttaataataatgtatttaactttattctcttctcgcatttgtttccgatgagctttctcccattttttatataaaaaatggattaatatcctaaataagataagaaagacgaggcaagtaaaggcaatacctaaaagtacgttccatattacaccattaataacgccaatcagcactaaaactatcaaaagcggaaatagaaaaaacacattaaacatggcaataaactctctgtctaaaaagcgaataagagcaatttcatctttaaacatatttcctccttatagtaatcttaattaactatatccctcttgcttttaaataattctccactgtatccacaatcgcttgtgtctgtggatcaatttcgatattcactaaatcaccgatttgtcgtttgccaatcagagttctatgtaaggtttcagggattaaattcacgcagaattcatcgtctttcacttcaccaatagtaagactgatgccgtcaatcgcaataaaacctttggtgagaatatatttcatcacgtctttagtaggtaatttaaaccaaacctgacgattgttttcgctttcaataatttgtgaaacgcttgcggtacaataaacatggccagataaaatatgcccaccaatttctgcgcccatttgcattgcgcgttcgatattgacaaaatcccctgcgtttaagttgccaagattggtgatacgcaaggtttcttgcattaagtcaaagctcacaagatcgtcatgaatttcagtcaccgtcaagcacacgccgttattcgccactgatgcaccgacatctaagccttttctcatttcagctggtaattttacgatctgtgttctaaaattatcgctatctttaattgcatgaatttgggcgatgccctgtacaatacctgtaaacattattattccttcattaaaaatttttccaatattatagcaaaatttatgaattctcgtcttttttctcaataccgtattgatattcaaaaacttatccgaattgcaacacctatcgggcttgcccagttagcacaaacaggcatgggcaccgtggatgtgattatggcggggcgtgtgagctcggctgatgtaggcggtgtcggtattggagcctccatttggctgcctttggtacttttcggacaaggtttattactcgccttgccaccaacgatttcctatttaaacggttcaggacaacgctatcgcattgctcaccaagtgagacaaggcctttggatttcatttttagtgatgataccccttgcactcatcatctatcataatgatttcatattgcagtttatgaatatggatgcccacatggcagatgtgacgatgaattatttgcgtgcgatggtgtggggcttacctgcctatttattgctgattaatttccgctgtttgaatgatggcattgctaagaccaaacctgccatggtgattaccttcatggggttaatgctgaatattccgctgaattatatgtttatttacggcaaatttggtgcacctgcattgggtggtgtcggttgtggtgtagcaacggctattgttaactgggcgatggcaatcttgatgattacctattctgccaaaaactataatgaacgtagtttaaaagtctttgaaaagattattgaaaagcctgacatcaaaacactgaaaaaattaaccgcacttggattgccgatcgcaattgcactatgtagtgaagtgtcactgtttgccttgagtagtttattactttccccattaggcgcagatgtggtcgccagccaccaaattgccttaaacaccagtgctgtagcctttatgtttccaatgtctattgcgatggcagccaccattttagtggcgcaagaactgggtaatcatgtaccacaaaaagccaaaatcatggctcacgcggctattattcttggcttgattgcggcaagtgtattggcgttggtgatttgggtatttagtgcagaaatcgctgcattaattgtcggcgataatgccaccgttattgctctatctggcagcttattagcgatggcagcgatttatcaattttcagattcagtacaagtcgttgtgagcggtattttacgtggctataaagacactaaaattatcctttatatcacgttacttgcctattggggcgtgggtatccctgttggttatattctttcccgcacggattggattgttccaagcatcggtgcaaaaggtttctgggttgcctttatcattgcattaaccattgccgcagctttactctttatgaggatgcgaaaaatccaatcacaatctgatgaagccattattcaacagttggaaagattgaagtagtgaaagtaaaaagtgcggtcgaatttgaccgcacttttattcttgaatttaaagttagacgttttttaaactgcatcctatgtatataagttaccctcatcttcatatcgtttatatacacacagataatcatcaaaagataatgatatagggtaatcgactcttattaaattctcatcaatattataattttcattgaagttagaaataatacttgtaccaatttcatatatctcctcattccaataatcggagattggaccgtcaatcacaacacaaatactgatacaatttttatctattttcacataaacgcctcgaacttcttttgttatttttccaagtaaagcattctgtgtaacaattcttaatcttataatttcattattcattgaaaccctatacctttttatctccctaaaaattaacgctcatcaggaaatttatgccatcaaaaggcaaaaagtgcggtcgaatttaaccgcacttttatcttttacatcactaccacatcaaattgttcttggttgtagtactgctctgttttaacttgaacttgtttgctgatgaacatttcaatctctggcaataaaccgtgcgattcttctttgattaagtaatctgccacggctggagaggcataaaccacaaattgttcactcgagaataagtggttgacgcgaatgatctcacgcataatttcataacataccgtttcaacggttttcacgcgtccacgaccttggcaagttgggcattcatcacacaaaacgtgctctaaactttcacgtgtgcgtttacgggtcatttccactaaaccaagttgagtaaaaccattcacattcgtttttacgcgatctttcgatagggcctcttccaaggattcaatcacgcgattgcgatgctcatcggtttgcatatcaataaaatcaataatgataataccgcctaaattacgcagttgtaactgctgtgcaatggctttagtagcttcaatattggtgttaaaaattgtttcatctaaatttcgatgtccgacgaaagcacctgtattaatgtcaatagtcgtcatggcttcggtttgctcaataatgagatagccgcccgattttaaattcacacgtttctctaaggcattttgaataccacgttctacaccataaatatcaaaaatcggctgattgcccgtataaagcattaatttttcacttaattcaggcatgaattcatcggtaaattctctaacctcgttaaaacaaagtttggagtcgatatgaattttctctaaattagcaccgataaaatcacgcaaaatacgttgcggcaatgcgggttcgccataaattttagaacgggttggatatttgcctttacgctcaagcactttacgccataaacgttttaaaaattccgcatcttggcgtaactcttcttccgttgcgccttcggtagctgtacggacaataaagccacctaactcatcacaaaaaggctcaaccagtgcttttaatcttgcgcgctcttcttcgctttcaatacgttgtgacacaccaacatgactattttccggcataaagacaagatagcgagaaggtaatgtaatatccgtggttaatcttgcgccttttgtgcccaaaggatctttcaccacttgtaccacgatatcctgcccctcgcgtacgagttcagaaatgctttttgcacggaattgtttttgttcgtttacatccacacattcggtatgtgaaacaatatcggaagcatgcaaaaatgctgctttttctaaaccgatatccacaaatgcagactgcatccctggtaaaacacgggttactcgccctttataaatattccccacgatgccacgtttggcttgacgttcaatatgaacctcttttaaaacacccgtttccaccaacgcaacgcgggtttcattgggcgtaacattcattaataattcaacagaatccattttttcgaccttagttttaatcatattagtctatcgaaaaggaaaatagaataatagtcctaaatgaggtaaaatatgacctttctcaaattttcacgacttattttggggtatttaatgtttggtttagacccaacacttattacttttagtatttatattttcggcatgattttaatcggtgtccttgcctattattatacaaacaacttatccgattatattttaggcggacgtaaactcggaagttttgtgacagccatgtctgctggtgcatctgatatgtccggctggttattaatgggcttgccgggtgcggtgtatgtgtctggcctggtagaaggctggatcgcgattggtttaatcctcggtgcttattttaactggttgctcgtagcgggtcgtttacggatctataccgaatttaacaacaatgcactcacattacctgaatattttcaccatcgctttggcacatcacacaatctattaaaaattgtatctgcaacaatcatcttagtcttctttaccatttattgtggttcaggcgtggttgcgggggcgaaattattccaaaatctattctcagtcgactactccaccgccatttggtacggtgcattagcaacgattatttatacttttatcggtggttttttagccgtaagttggacagataccattcaagctacattgatgatttttgcactgattttaacgcctctctttatctttttaagtttgggtgatgcatcacaatttactggagtgctacatcaagcagaaatcgcagcaaataaagactttactgatttatttagttctactacaccattaggtttattaagtttagcggcctggggcttaggttattttggtcaaccgcatatccttgcgcgttttatggcggcttactcggtgaaatctctcattaaagcacgccgcatcagtatgacatggatggtgatttgcctcgccggtgcgattagtatcggtttcttcgggattccttatttctttgcaaatccaggagtagcaagcatggtaaataatgaaccagaacaagtctttattgaattggctaaattgctctttaatccatggattgccggtattctactctctgcaattttagcggcagtcatgagtacactttccgcacaattattaatttcttccagttctattactgaagatttttataaagggtttattcgtccaaaagcttctgaaaaagaattagtttggctaggtcgtgcaatggttttagttatcgcgggtatcgccatttggattgcacaggatgaaaacagcaaagtattaaaactcgttgaatttgcctgggcgggctttggttctgcatttggtcctgtcgtgcttttctccttattctggaaacgtatgacttcatcagcggcgatggcgggaatggttgtcggtgcagtggttgtctttgcttggaaatcggtgattcctgaaaccagtgaatggtttaatgtctatgaaatgatccctggattcatccttgctagcctcgcgattattgtggtttctctcctttccgcagaacctgaaaatgaagtaaaagaaacctttgaaaaagcagaaaaagcctataaggaagcaaaataatgattgattttcgtcctttttatcaacaaattgccaccacaaatttatctgcttggctagaaacattgcctttgcagttaaaagaatgggaaaaacaaacccatggtgattatgcaaaatggtcaaaaatcgtggactttctccctgatttgcaggcagatactatcgatttaaaaaatgccgtgaaatctgaccgcacttccccactttcagagggcg

SEQ ID NO: 3188 - DNA, 21119 bp, synthetic construct
  misc_feature 1..21119: note = Synthetic
  source 1..21119: mol_type = other DNA
taaatgcttaatcaagctttactaaaagtaaactaacccttacaatatgtacaattttttagtaaatattttgttatgaaattattaaaatctcttctcgcacctgtatttgcaagtgtgatcttgtctgcttgtacccttgatgcagaacgcccaacagatgttaaacatatcgataagaacgatattacgtggcaacagcacctcaaaaaaatcaaacaaattcaatcttatagcacaaaaggacaaattggttacatcagtccacaagagcgtttttctagtcgcttcgaatggcaatatcaaaaccctaaagcctataagttaaaactttattctctgattagcaaaacgacgctaactatggaaatgcatcctaatggcatgacgatttcagataataaaggcaatcaacaatctgataaaaatgccaaattattgttacgcgaaatcatcggaatggatgtgccattagagcacttatcttattggttaaaaggtcagccagcagataacgcagattaccaagttggaacgaatcatcttttatccgaatttagctacccacttgatggatcgatgtggacagccgattacttaagttatcatgccgataattcgatgcctgaaaatattctgttaaagaacaaaagcacatcgcaaaccctaaaaattcgtgtggatgaatgggcgttctaatgaaaacacatcacttttcgaccgcactttcaacttctcttggaaagcctaaccgctttccaagccccgcaaaactcaatttatttctctatataaacggtaaactgccaaacggctaccacgaattacaaactcttttccaatttcttgatttcggcgattggctcaccattgatattcgccaagatagacaaatccatattacaccagaaattccaggcttatctctagagcaaaacttagtctatcgtgcagccacgctcctacaagaaaaaacaggctgtacgctcggtgcaacaattcatttagataaaattcttccaatgggcggtgggattggcggtggctcatccaatgctgcaacgactctgcttgctttaaactatttatggcaaacccatttatccattgatgaacttgccgaacttgggctaaaacttggggctgatgtgcctatctttgttcatggccaagccgcttttgcagaaggtgtgggtgaaaaaattcaatactgcgaaccacaagaaaaatattatgtgttactaaaacctgaaactgcgatttctactgcagtagtttttagcgctcccgatttgccacgcaatacagaaaaaagatcccttgccgaacttttgaatcaaccgtttgcaaacgattgcgaaaaagtcgtgcgaactcaatatcctgaagttgaaaaagccctactatggttgctacaatatgcaccagccagattaaccggaaccggggcttgtgtttttgctgaatttgatgatgaaaaatcggcacaagctgttttccaacaaaaaccgaaggaatttttcggctttgttgctaaaggattaaacgtttcaccattacatgcgatgttgaaacaactctcgaccaaccaatctatctacactcaatctgaggttatataaaatgccagacattaaactctttgctggaaatgctacgcctgagctagcaaaaaagatttctgaacgtctttacatttcattaggcgatgccacagttggacgctttagcgatggtgaaatccaagtgcaaattaatgaaaatgtgcgtggtgcagacgtgtttattattcaatccacttgtgcgccaacgaatgacaacctgatggaattgattgtaatggttgatgctttacgtcgtgcatctgccggccgtattactgccgttgttccttattttggttatgctcgtcaagatcgtcgtgtgcgttctgctcgtgttccaatcactgcaaaagtggtagcagatttactttcaacagtagggattgaccgagtattaacttgtgacttacacgcagagcaaatccaaggtttctttgatgtaccagttgataacgtattcggttcaccagttttacttgatgatatcttgaagaaaaccgatcttgtcaatcctatcgttgtttctcctgatatcggcggtgtggtacgtgctcgcgcggtagcgaaattattaaacgataccgaaatggcaattattgacaaacgtcgtccacgcgcaaacgtatcacaagttatgcatattatcggggatgtcgcagatcgtgattgtatccttgtagatgatatgattgatacaggtggtacattatgtaaagcagctgaagcattaaaagaacgcggtgcaaaacgcgtatttgcttacgcaactcacgctgtattctctggtgcagccgcacaaaatttagcgagcgatgcgattgatgaaatcgtggtgactgatactgttccactttcacctgaaatgaaagcgcttggtaaagtacgcgtgctgactctttctagcatgcttgctgaagcaattcgtcgtatcagtaatgaagaatctatttcagcaatgtttgaataattcttgtgcttagcattcattttaaaagtgcggtcagaaaatccagtgttttttgaccgcactttttatgctgcgactaaaaataaggcaaaaaaaagtgccccactggggcactactcggaaagcaaaatagatgtcggctatttaagaatagcacttatttttagtgatttaagaatacggcaaagtcctttacattgcaaatagcaatgttcaaatttgtgagctaaatcacgatttttcttcacttttttatgtttaatcgtttttatataaaaaagaggagctgactactcctcttctctagaaatagaattaaattagccgttaataaatttttcgcctaattcaatatctgcacgcaatgttggtaacattgcttctaaagcttcttgttcaaatttgcttaaggtaccgattggtaaaatttcttctacaccttctttacctaaacgtacaggttgagcaaagaaacgtgcatatttaccgtcaccttcaacataagtacattcaaccacagtttcgccgcttaagcctttcactaatgaacgcgcaaaacgtgctgccgcttgagccatagaaagtgttgcagaaccgccacctgcttttgcttcaaccacttcagtacctgcgttttggatacgtttagttaatggtgcaatttcctcttctttccactcagcatattgaacttgtgaaagtaatggaagaatcgtcacacctgagtgtccaccaataactggtacgcttgtacgagaaacatttaagccttttaattcagatacaaatgtttcagaacgtaacacgtctaaagtggtgacaccgaataatttacgtttgtcgtaaacactcgcttttttcaatacttctgcagctatcgcaacagtcgtgttcacagggttggtgataatacctacacaagcttttggacaagtttttgcaacatgttcaattaagttacgcacgatacctgcattgatattgaaaagatctgaacgatccatgcccggtttacgagctacccctgcagaaattaaaacgacatcagcacctttaagtgcaggtgttggatcttctcctgcaaaaccttctactttaaccgctgtcggaatatgactcacatctttagccacacctggtgtcactggtgcaatatcatacagtgctaattcactttcagcgggtaattgtaatttaagtaataaggctaatgcttgaccaataccgcctgctgcgcctaatactgcaattttcataaaatactcctcatgtattaattaatcctaactaggtaggattttaaggttttcattaataaattacaaacagagaaattcaattatgagatctagttcaaacttttcaaatgacaggtttattttaattgcctaaaatgaatttttatgcaattcttatgcaaatttccctatatgagaatatctatgtcagatcaattaactaaagcatttaaagaactgctcaatcaagaacgatttgcttctcaaagtgaaattgttgaagccttaaaaaaccaaggatttcaaagcattaaccagtctaaagtttcacgcatgctaagtaaatttggtgcagttcgtgcaagaaatacgaaaatggaaatggtgtattgcttaccaagtgaattaagcgtccccgccactagcagcccattaaaaaatctggttttggatattgatcacaatgatttcgttatcgtcattaaaacctctcccggtgcggcacagttaattgcccgcttattggactccattggtaaacctgaaggcattttgggtacgattgcgggagatgacaccatttttgtaacaccaacaaaagacataacaatcaaatcacttctagagcaaattcaaatgctttttgaaactaatctatcatgaatatcttagtgaccggcggaacgggattcgttggaaaacccttagttgaagcgctactttcacgtggcgataccgtgacagtattaactcgttctattgaaaaagcccaagctgttttttctgaaaaaacaccgcaatttttgaccacactttccaccctcaaaaatttaaatgcctttaatgcggttattaatcttgccggtgaatccatcttcgataaaaaatggacaactcaacaaaaagaaaaactgcgtcatagccgcattgatttaacacaacaggttattcaacttattaaccaaagtgaacatcccccagtcttgatttcaggttccgcaaccggaatttatggaaactgtggcgaagatgtgatcactgaagacacaaatctaggtattcaatttacctctcaactttgtattgattgggaaaatgcagcaaaacaagccaatacaagagtctgtttagtgagaaccggattagtgctttctccaaaaggtggagcttttgcaaaaatccttccgttctatcgcttcggattaggtggcaaactagggaatggtgagcaatattggagctggatagcattagaggatatggtaaaaggcctgctctttttacttgagcataacgcttgcgaaggggcatttaattttactgcaccacatcccgttaaaaacgggacattcaaccaactattaggtaaagcattacatcgaccttgttttgctcaagtacctcaatttttattaactactattctaggtgagagtgcttgcattcttttagacagccaaaatgcctatccaaaacatttgttagattgcggatttacattccaatactcagaattaagtgattactttcacaaaatactttaaaaacaaaaggctggtcaaaaccagcctttattatattcattatgctaaatattctaaaaattcccctacggtgtggaaagatccaaataccagcacaacgtcatttttatctgcatttttaatcgcactttgcacaccttcaataacagaatcttcagaaacactttttgctgatgagcaaactgttgttaattttgcatttaagtcatcacctgattgaccacggtaaccgcctaatgttacacaatgccattggtcaataacggaagtaagttgggtaaacaccgactcggcatctttatcttttaacattccgcagacggcaatgattcgacctgaaatttgtgttttaagtacggtcaatttttcggctaaatattttgccgcatgaggattatgcccaacatcgatgatcacttttggcaactgtgaataggatacattcaagtgttctgctagcttttctaattgattacctttcaattgctggaaacgacccaccaattccacttcaattaatgaacgtttaatggtctcaacagaaatatcaaaagacagctgttcaacagctgccaaagcggttgccgcattagctaatggaatttggcaaaacggcagattttctaaccgcactttgttgctctgccacatccaagtttgctcattagctttaaacgaccaagtgacatctcggcgtgaaacgtggcaatgtaatttctccgcttgttctaacataggctgcggaacattaggttcgccaattacaaccggtttatttgcacggaaaatccccgctttttcaaagctaatttcttcgcgagttgaaccaagaaaatccgtatgatcaatatcaatactggtgataaccgctagatcattatccacaatattggttgcatctaagcgtccaccaagccctacttctaaaatgacgacatcaagcttcgcttgtttgaataaatgcaacgctgataaagtgctaaattcaaaataagtgagggactgggttttatgcttttcgatgaaatcaaaagaagcagtatgtatttcatctggcaagtcttgattttgaatacgaacacgttcgttataacgcaataaatgaggtgaggaatatacccccacacgcaagccgtgatttaacaaaatggtttcaagcaaacggcaagttgtacctttaccatttgtgccccccaccgtgatcacataaggtgcgggattcaaaagatccaattcttctgccactgatttaatacgatccagccctaaatcaatagctttaaaatgactgttttccaaataagaaagccactcagcgagtggcgaagtggcttttaaattcattgtattactcatattcaacaacttctacttcaacaaaaggtgaaggttgattggtaagtttgcttaaaaggtttccaagggttggacgcatttctgaacgtttcacgatcatatcaatcgcccctttctcgagtaagaattcactacgttggaagccttctggtaatttttcacgtacagtttgttcgataacacgtgggcctgcaaaaccaattaatgcttttggctcagcgatgttcacatcacctaacatcgcaaaacttgcagaaacgccacctaatgttggatctgttaatacagaaataaacggcacacctttttcacgcatttgcgctaataccgcactggttttcgccatttgcattaatgagaaaagcgcttcttgcatacgcgcaccaccacttgcagagaaacaaacgaacggacaatttaattccattgctttttctgccgctttcacaaattttgcacccacaacagaacccattgaaccgcccatgaaactaaagttagatgcggcaacgactactggcatgttgtaaagtgtacccgtcattgtgattaatgcatctttttcaccggtttctttttgtgcagcagtaatacgatctttatatttttttaaatctttaaatttaagaatatcttttggttctaaatcagccgacaattcttggcttgaaccctcatctaataaggctaaaaggcgctcacgagcatcaatgcgcatatgatggccgcattttggacaaacatataaattacgttttacttcttcaccgtaaagaacttgttcacaagaggtacattttgtccaaaccccttctggtacgttggctttacgtgatgcagaggaagaggttcctttgctaaaaattctatcaatccagctcattttttaccttttttattaactagaaaagtttgcgtatttaatcataatttagcgaaatttgctagtcagatgagattatcttctaaaaacaacggccctaaatttttctgtggaatcgcaaatttttcagggtaaatgacattcactaaatataagccttcgggtttcgctgttggagcggctaatttacgatctttttgctctaacaaccatttcatccagtcaacaggttgattgccggcaccaacttcaatcaggcttcccacaatattgcgtaccatatgatgcacaaaagcattggcttgaatatccacaataatgtactgccctttttgcaccacatttaaatgatgcacatttcgccaaggggtatttgattgacactgtgccgcacggaaagaggaaaaatcattttcacccaataaaaactgccccgcttggtgcattttcttttcgtctaaatctaaatggcaatgggtaatcccttccggcaaaatggctgaacgcaatttattacaatacaaaatataacgatagcgacgcgcggttgccgaaaaacgggcatgaaattcatcatccactacttttgcccaactcactgaaatatcatcaggtaaattcgcattggtaccaaatgcccaagctttttcaggacgaactgctgtggtttcaaaatgcacgacttgccctgtgccatgcactccagagtctgttctgcccgcacaaaacacttcaattttttcatttgccacaaaagataacgctttttctaattcttcttgtacgctacgcactttctcttgtcgctgccaaccacaatactgttttccgttatattcaatgcctaaggctatcttcattagaaaatactcctaaaacgatttcaaatttgaccgcactttgcccgaaaagaaaaaacaccaataactcatcattattggtgttcttatcacaagctaaaaattaagcacgtttgaagtcaatgtgaaccaattttggtttgaatgggtgacgttgcattgcttgaactttcactgcaacttctttaccttcaaccactaaagtgattacatcgctatagaaagaatcgtgaacttgtgcgttgtttaattcatcgtgatttaagatgattgaaacaggtgcttcgctgccaccataaatgattgcagggatttgaccgttgtgacgcaggcggcggctcgcacccttaccttgcgcttgacgaacttcagcgttaaatttaaatgccattttaatgttctcttgattaaaagtttaaaataaaaaattgcaggcgacccagcaattttcctaaatttgctcaaagacaaactttgagagcgacggattataaaatattcagccccacaatgcaaatttacacagcaatttttttctaggcttttcaaggcaaagcgattaaaataagccccaatttttaattaattttaactaactgattgtaagtgggtttcaaatggaatttcttatcagcttttttaccgattacggttattgggcggtgctatttgttctgattatttgtggctttggtgtacctattccagaagatatcacgcttgtctccggcggtgtaatcgctggcctctatcctgaaagcgtcaattcccacttaatgttagtcgtgagtatgattggtgtacttgccggtgactcaaccatgtactggcttggtcgcatttacggcacccgaattttacgtttccgaccaatgcgtaaaattgtaacattagaacgcctcaaaatggtgcgtgaaaaatttgaccaatacggcaaccgtgttttatttgtagctcgtttccttccaggattacgcgcaccaatttatatggtttcaggcatcacccgccgtgtcagctacactcgctttgtattaattgatttctgcgccgcgattatttccgtaccaatttgggtttatcttggcgaatttggtgcgaaaaacttagattggttacacgaacaaattaaaaaaggtcagcttgtaatttatatccttgttggcgcattagcggttttcttattctggaaatggaaaaaagcgaagaaacaggctaaataatttcttataaaatgcggtcaaaaatttataaattttcgtcaataaaaaaacgcttaataattttattaagcgttttttgtttttgttaacctactctcacatctttattttctaaataagcagaaaaaagatgtcccttgaaacttacatttcaagggacagagctttgcgagaaatttttctcttattgtaacaacgtttttcatttcgcagtgccattacaacgaggtgaattctatctatttatttttttatcgtcaatatattttttatacaaaattctgttaaaatttaaacaaaaaactaataaaaaggaaccaaccttatggaaaataaaaacttacattatatccttggtctcgaccttggtatcgcctctgttggctgggctgtagttgaaattgacgaaaaagagaatcctctgcgtttaattgatgttggtgttcgtactttcgaacgagcagaagtgcccaaaacaggtgaaagtctcgcgctttctcgccgcttagcccgctccgctcgtcgattaactcaacgtcgcgttgctcgtctgaaaaaagcaaaacgacttctaaaatcagaaaatatcctattatccactgatgaacgtcttcctcatcaagtttggcagctacgtgtcgaaggtctagatcgaaaactagaacgccaagaatgggctgctgcgttattacatttaattaagcaccgtggttatttatctcagcgtaaaaatgaaagtaaaagcgaaaataaagagctaggcgcgttattaagcggtgtagccagtaaccatgaattactgcaacaagctacatatcgtacgcctgcagaacttgctgtaaaaaaatttgagagcgaagaaggccatatccgtaaccagcaaggagcctatactcacacatttagccgactagacttactcgccgaaatggaacttctcttctctcgtcaacaacactttggtaatccattcgcttcagaaaaattattagaaaatttaaccgcacttttaatgtggcaaaaacctgccttatctggtgaagccattttaaaaatgctcggtaaatgtacttttgaagatgaatataaggcggctaaaaatacctatactgctgaacgttttgtttggataacgaaattaaataatttacgtattcaagaaaatggcttagagcgtgccttaagtgataatgaacgtttaatgttaatcgaacaaccttatgaaaaagctaaattaacttatgcacaagtacgttcaatattaaatttatctgatgatgcaatctttaaaggcgtccgttattccggtgaagataaaaaagccattgaaaccaaaacaactctgatggaaatgaaagcctatcaccaaattcgcaaggtattagaaggtaataacctaaaagctgaatgggcagaattaaaggcaaatccaacattattagatgaaattggtacggcattttcattatataaaactgatgaagatatcagcgcttacttagcgggcaaactctctcaacctgtattaaatgccttattggaaaatcttagttttgataaatttatccaattatctcttaaagctttatataaacttctaccattaatgcaacaaggactacgctatgacgaggcttgtcgtgaaatttatggcgatcattatggtaaaaaaacagaagaaaaccatcacttcttaccacagattccagctgatgaaacccgtaatcctgtggttttaagaacactcacgcaggctcgtaaagtgattaatggtgtagtgagattatatggttcgcccgctcgtattcatattgaaacaggacgagaagttggcaaatcttacaaagatcgtcgtgaactagaaaaacgtcaggaagaaaatcggaaacagcgcgaaaacgcaatcaaggaatttaaagagtacttccctcattttgctggtgaacctaaagccaaagacattttaaaaatgcgactttataaacaacaaaatgcaaaatgtttatattctggcaaacctatcgaattacaccgtttattagaaaaaggctatgtagaagtcgatcacgccctaccgttttcccgcacttgggatgatagcttcaacaataaagtactagtgcttgctaatgaaaatcaaaacaaaggcaatttaaccccttttgaatggcttgatggtaaacataatagtgaacgctggagagctttcaaagcattagttgaaaccagtgcattcccttatgctaaaaaacaacgcatcctaagccaaaagcttgatgaaaagggctttattgaacgtaacttaaatgatacgcgctacgttgctcgtttcttatgtaactttattgcagataatatgctcttaacaggcgaaggaaaacgcaaagtatttgcttccaacggacaaattactgcattacttcgtagccgttggggattagcaaaatcacgtgaagacaatgaccgccatcacgctttagatgcagttgtggtcgcttgctcaaccgtcgctatgcagcaaaaaatcacacgttttgttcgttttgaagcaggtgatgtattcactggtgaacgaatagatcgtgaaacaggtgaaattattccattacacttccctacaccatggcaatttttcaaacaagaagttgaaatccgaatttttagtgataatcctaaactagagctagaaaatagattgccagatcgtccacaagcaaatcatgaatttgtccaacctctttttgtatctagaatgccaacacgcaaaatgaccggtcaagggcacatggaaaccgtgaaatccgcgaaacgtctcaatgaaggaataagcgtgattaaaatgccactcactaaattaaaattaaaagatttagaattgatggtaaatcgtgaacgtgaaaaagatctttatgatgctttaaaagctcgtctagaggcgtttaatgatgatcctgccaaagcgtttgctgaaccttttatgaagctattgttaaatcagtacgagtagagcaagtacaaaaatctggcgtattagttcgtgagggtaatggtgtcgcggataatgcctctatggtgagagtagatgtttttactaaagatggaaaatatttccttataccaatttatacctggcaagtagcgaaaggtattttacctaataaagctgttattcagggaaaagatgaagaagattgggaaaatatggatgacaatgcaactttccaattttcattacaccaaaatgacttagtaaaattagtcactaaaaagaaaactatttttggttactttaatggacttaatcgttccacaggtaatattgatattaaagagcatgatttagataaatctaagatcaaagatggtattcatcaaagtgtcggcataaaacttgctacttcctttgaaaaatatcaagtagatgaacttggcaaaaatattcatttatgtaaaccaagtaaacgtcaagctgttcgttaattttctccaatccccatcgcattgcctatggggattttttataaggaaacattatgacatggagaagtcttcttattagtaaagggggaaaactctctttgcatcaacaacaaatgctgattcaacaagaaggaaacgaatttaccgttcctttagaagatattgctattgttgttgtagaaagccgagaaacggtgattacccttcctttactctctgcattcggtttatacgggatcactttattaagttgtgatgaacaatttttaccttgcggtcaatggctcccttttaatcaatattatcgacaattaaaaacccttaaattacaacttgaaacaagcttgccactgaaaaaacaactttggcaacgtattgtgcaacaaaaaattcgtaatcaagcaaaagtcttatcactctgtcagcatcaagaaaaatcagaacggttactccagctcgctaatttagtgaaatcaggtgataaagataatattgaggcacaaagtgcggtcatttatttctctggattattcggcactcatttcagacgaaaagaagaagacaatgcaattaatatacatctgaactatgcttattccgttatgcgttcagctgtggcaagaagccttgtactttatggttggctacctcaattaggcttatttcatcatagcgaactcaatgcctttaatttagcggatgattttattgaaccgtttcgtcctcttgctgatttacttgtatggaacttgcgtgaaaaaggattagtcaccacaaatcttagtcctctatcaaaacagcaattaattaaaatcttgcatcatcaactatgctttaaccaagaaaaagtgagtgttttaactgctattgataaaaccattgcctctttacaaattgcacttattcaaaaaaatgcaacatcattgcggttaccagagatcgatatattgcaggaatatcaatatgagtgagggggtatttatgcgtatgatcgttttatttgatttaccggttaccactaaagcaaaaatgcgagctgcaaaccaattccgtcaatttttacttaaagatggttatcaaatgttgcaactttctatttacactcgaattattaaagggcgagatgcgttagaaaaacatcataaaagactcgtcgcacacttacctgaagagggttcaattcgatgtttatctattacagaaaaacaatttgcgagcatggaaattttagtgggagagaaaaaaccgcaagaaaaaaaggtcaattcaaatcaattactacttttttaaccgtttttttagataaaacaaaagcccctaaaccttacggtatggggctttttgctgtccctattatagcactgcgaaatgaaaaagggagctacaacataaacctactcaatattgcgttatcccttattatagcactgcgaaatgaaaaagggagctatctcttccttcagaagaattaaaagtgcggtaaaaaatagcatcattttctaccgcacttttttcatttaaattaagctttagttgctaaatatcgctccactgtatccacaatcgcttgtgtttgtggatcgatttcgatattcactaaatcaccaatttggcgtttgccaatcagagttctatgtaaggtttctgggattaaattcacgcagaattcatcaactttcacttcaccgatagtaaggctgatgccgtcaatcgcgataaatcctttggtaagaatatatttcatcacgtctttagtaggtaatttaaaccaaacctgacgattgttttcgctttcgataatctgtgaaacgcttgcagtacaataaacgtgaccagataaaatatgcccaccaatttctgcacccatttgcattgcacgttcgatattcacaaaatccccggcttttaagttaccaagattggtgatgcgcaaggtttcctgcattaagtcaaagctcacaagatcatcatgaatttcagtcaccgttaagcacacgccattattcgccactgatgcaccgatttctaagccttttcgcatttcagctggtaattttacgatctgcgttctaaaattatcgctatctttaattgcatgaatttgggcgatgccctgtacaatacctgtaaacattattattccttcattaaaaatttttccaatattatagcaaaatttatgaattctcgtcttttttctcaataccgtattgatattcaaaaacttatccgaattgcgacacctatcgggcttgcccagttagctcaaactggcatgggcaccgtggatgtgattatggcggggcgtgtgagctctgctgatgtaggcggcgtcggtattggtgcctctatttggctacctttggtacttttcgggcaagggttattactcgccttaccaccaacaatttcctatttaaatggttcagggcagcgccatcgtattgctcaccaagtgagacaaggcctttggatttcatttttagtgatgattccccttgctttcatcatctatcataatgatttcatattacagtttatgaatatggatgcccacatggcagatgtgacgatgaattatttgcgtgcgatggtgtggggcttgccagcctatttattgctgattaatttccgctgtttgaatgatggtattgccaaaacaaaacccgccatggtgattaccttcatggggttaatgctgaatattccgctaaattatatgtttatttacggcaaatttggtgcacctgcattgggaggtgtcggttgtggtgtggcaacggctattgtcaactgggcgatggcaattttgatgattacctattcagccaaaaactataatgaacgtagtttaaaagtctttgaaaagattattgaaaagcctgacatcaaaacactgaaaaaattgaccgcacttggtttacctattgccattgcgctgtgcagtgaagtgtcactatttgccttgagtagtttattactttccccattaggtgcggatgtggtcgctagccaccaaattgccttaaacaccagtgccgtagcctttatgttccccatgtctattgccatggctgcaactattttagtggcgcaagagctcggtaatcacgcaccacaaaaagctaaaagcatggcttacgccgctattattcttggtttgatggcggcaagtgtattggcgttggtgatttgggtatttagtgcagaaatcgccgcattaattgtgggtgataataccaccgttattgccctttcaggcagcttattagcgatggcggcgatttatcaattttcagattcagtgcaagtcgtcgtgagcggtattttacgtggctataaagacactaaaattatcctttatatcacgttacttgcttattggggcgtgggtatccctgttggttatattctttcccgaacggattggattgttccaaacatcggtgcaaaaggtttctgggttgcgtttatcattgcattaaccattgccgccactttactctttatacgtatgcgaaaaatccaatcacaacctgatgaagccattattcagcagctagaaagattgaaatagttaaagtaaaaagttcggtcaattttgaccgcacttttgtcttttacatcaccaccacatcaaactgttcttggttgtagtactgctctgttttaacttgaacttgtttgcttatgaacatttcaacctctggcaataaaccgtgcgattcttctttgattaagtaatccgctacggctggagatgcataaaccacaaattgttcactcgagaataagtggttaacgcgaataatctcacgcataatttcatagcataccgtttcgacggttttcacgcgtccacgaccttggcaagttggacattcatcacataagacatgctctaaactttcgcgtgtgcgtttacgggtcatttctactaaaccaagttgagtgaaaccatttacattggtttttacgcgatctttcgatagggcctcttccaaggattcaatcacgcgattgcgatgctcatcggtttgcatatcaataaaatcaataatgataataccgcctaaattacgcagttgtaactgctgagcaatggctttagtggcttcaatattggtattaaaaattgtttcatctaaatttcgatgaccaacgaatgcgcccgtattgatatcaatggtcgtcatggcttcggtttgttcaataatgagatatccacctgattttaaatttacacgtttttcaagtgcattttgaataccacattctacaccataaatatcaaaaatcggctgactgcccgtataaagcattaatttatcacttaattcaggcataaattcatcggtaaattctttaacctcgttaaaacaaagtttggaatcgatatgaattttctctaaattagcaccgataaaatcacgcagaatacgttgtggtaatgcaggctcaccataaattttagaacgggttggatatttgcctttacgctcaagcactttacgccataaacgttttaaaaattctgcatcttgacgcaattcctcttccgttgcaccttcggtggccgttctaataataaaaccacctaactcatcacaaaaaggctcaactaacgcttttaatcttgcgcgctcttcttcgctttcaatacgttgcgataccccaacatgactattttctggcataaagacgagataacgagaaggcaatgtaatatcggtggttaatcttgcacctttggtacccaaaggatcttttaccacttgtactacgatatcctgtccttcgcgtacgagttcagaaatgctttttgcacggaattgcttttgttcattcacatccacacattcggtatgtgaaacaatatcggatgcgtgtaaaaatgcggctttttctaaaccgatatccacaaatgcggactgcatccccggtaaaacacgggttactcgccctttataaatatttcccacgataccacgtttggcttgacgttcaatatgaacctcttttaaaacacccgtttccaccaacgcaacgcgggtttcattgggcgtaacattcattaataattcaacagaattcattttttcgaccttagttttaatggtataagtctatcgaaaaggaaaatagaataatagacccaaataaggtaaaatatgacctttctcaaattttcatgactttttggggtacttaatgtttggtttagacccaacacttattacttttagtatttatattttcggcatgattttaatcggtgtccttgcctattattatacaaacaacttatccgattacattttaggcggccgtaaactcggtagttttgtgaccgccatgtctgcaggcgcatctgatatgtcaggctggctattaatgggcttgccaggtgcagtatatgtatctggcctagtagaaggttggatcgccattggtttaatccttggagcttattttaactggttgctcgtggcgggtcgcttacgaatttataccgaatttaacaacaatgcgctcacattaccagaatatttccaccatcgctttggtacaaagcaccatctcttaaaaattgtgtctgcatcaatcatcttagtattcttcactatttattgtgcttcaggtgtggttgcgggtgctaaattattccaaaacctattctcagtcgactactccaccgccatttggtacggcgcattagcgacgattatttatacctttatcggtggatttttagcagtgagttggactgataccattcaagctactttgatgatttttgccttaattttaacgccactcttcatctttttaagtttgggcgatacatcacaatttacggaagtactccatcaagctgaagttgcggcaagtaaagactttaccgatttatttagttctaccacgccattaggtttattaagtttagcggcttggggcttaggttatttcggtcagccacatattcttgctcgatttatggcggcttattcggtgaaatcattaatcaaagcacgccgtattagtatgacctggatggtgatttgcctagctggtgcgattggtattggtttcttcggtattccttatttctttgctaacccaaatgtggctggcgtagtaaatcacgaaccggaacaagtatttattgaactggctaaattgctctttaatccatggattgccggtattctactgtctgcaattttagcggctgtgatgagtacactttctgcacaattattaatttcttcaagctctattactgaagatttttataaagggtttattcgtcccaaagccgctgaaaaagaattagtttggttaggtcgtgcaatggttttagttattgccgctatcgccatttggattgcgcaagatgaaaacagcaaagtactaaaactcgttgaatttgcctgggctgggtttggttctgcatttggtcctgttgtacttttctccttattctggaaacgcatgacttcatcagcggcgatggcgggcatggttgtcggcgcagtggttgtatttgcttggaaatccgtcattcctaaaaccagtgagtggtttaatgtttatgaaatgatcccaggattcatccttgctagcctggcgattattatggtttctctcctttctacagaaccagaaaatgaagtcaaagaaacctttgagaaagccgaaaaagcttataaggaagcaaaataatgattgattttcgtcctttttatcagcaaattgccaccaccaatttatctgcttggctagaaacgttgcctttgcagttaaaagaatgggaaaaacaaacccatggtgattatgccaaatggtcaaaaattgtggactttcttcctgatttgcaggcagataccatcgatttaaaaaatgccgtgaaatctgaccgcacttccccacttttagagggtgaaaaacaacgcattatccaccatttaaagcaattgatgccgtggcgaaaaggaccttatcatttatttgatattcatgtagattgcgaatggcgttctgatttcaaatgggatcgtgtcttgcctcatcttgctccattaaaagatcgtaccattttagatgtgggttgcggtagcggctaccatatgtggcgaatggttggcgaaggtgcaaaaatggtggtaggtattgatccaaccgaacttttcctttgccaatttgaagctgttcgaaaattattaaataacgatcgtcgagctaacttaatcccattaggcattgaagaaatgcaaccacttgcggcatttgatacggtattctcaatgggtgtgctttatcatcgtaaatcaccacttgatcatctaactcaactaaaaaatcaattagtaaaaggtggcgagctcgtcttagaaaccttagtagttgatggcgatgtcaatacggtattagtgccttcagatcgctatgcaaaaatgaaaaacgtatattttattccttctgttgccgcactcatcaattggttggaaaaagtcggctttactaatgtgcgttgtgtggatgtcgccaccacaacattagaagaacagcgtaaaactgattggttagaaaatgaaagtttgattgatttcttagatccaaatgatcacaataaaaccatcgaaggctatcaagccccaactcgtgcagtgattttagccaataaataattatttaaataaaaagagcggtcaaaaatgatctgcaccccaaaagttggactcaacaaaccaacaattgaggtgcagattttttatgggtaaacactacacaatcgaatttaaattacaggttcttcaacctattttgaatcgaaaaatgagtatcagagaagtggctcgtttttacaatattccttccaacgccctagtcgggacatggttgaaacggtttgaaaaaagtggcataaaaggacttattccccgtaaaccatcaggacgacc

SEQ ID NO: 3189 - DNA, 17795 bp, synthetic construct
  misc_feature 1..17795: note = Synthetic
  source 1..17795: mol_type = other DNA
aacattttgctggaaggttttgatggcagacaaaaaatgagaaagctgctaatcgaagccttaattaaacacaatctattcacgcaattgcacgaaccgattgaaaacatattgcaaggcatttttacccaatcttcccttgtccgcacgttatccccaaccaagcaatacattatggcacacagtttagttggcaccgtccgcgccgccgtgctggatcagtcgggatatttatccgagcctgaatttaaagcagaattggttaagttgttttgctattttgtggccgatgactaatgattttggggacggtttgggataattgagcgatttttctgatgataggatttacttgtagtttaagtggcgtgaagcagtattaattccatcttgtataatgctgaacctgagcatagctctatttgggatgatttattacttaaacattttttacttcctgttataaataatctagggtctgtattagactaacataacagctaatctaatacagttcctagattaaaataaagtccgcgttttggggcgtatatctatctttttgtatagctagtattaagtataaagagatattagataggcaaatattagctttccaacataaattcttggcgtagctgttggagttgatcgcgtatcgctgcggctttttcaaattcaagatcttgtgcaaacttgtacatttgttgttccaatttcttgatttctttttgcaattctttaggattgcgtggcgttttatattccgcttgtggttcagccactttgctacgtttagatttgctgcgattgttgtttgccccttggccaatatctaataattcgcccacttttttgtttaaggcttgtggcacaacaccgtgctcttcattgtatttttgctgtttttcgcggcggcggttggtttcgccaatggctttttccatagagttagtgattctatctgcgtacaaaatggctttaccttttaagttacgcgccgcccgtccaattgtttggatcagcgaacgttcggaacgcaagaaaccttctttgtccgcatctaaaatcgccacgagtgaaacttcaggaatgtccaacccctcacgcaataagttgatcccaactaaaacatcaaactcgcccaaacgcagatctcgaataatttcaacccgttctacggtgtcaatatctgagtggagatagcgcacccgcacaccgtgttcttccaaataatcagtgagatcttctgccatacgcttggtgagtgttgtgactaaaactcgctcgtttttgtccgctctttgacgcgcttcagaaagtaaatcatccacttgaatggcgacagggcggatttcaatttcaggatccaataaaccagttgggcgcacaacctgatcaataatttctgcccctgatttttctaattcataagggccgggtgtggctgaaacgtaaatagtttgcggtgcaaggcgttcaaattcttcaaaacgaagtgggcgattatccaatgcagaaggcaaacgaaatccatattccaccaatgtttctttgcgtgaacggtcaccacgatacataccgccaatttgtggcaccgtgacgtggctttcatcaataattaataaaccatcggaaggaatataatcaaataaggttgggggcggttcgccctcatttctgcctgataaatagcgtgaataattttcaatgcccgagcaataaccgagctcgttcatcatttcaatatcaaattgtgtgcgctgagtaatgcgctgttcttccaataatttattttctttaataaagtattctcggcgctcaactaattccgctttgatcttttcaatggcgtctaaaatgcgttcacggggggtaacatagtgagtttttggatacaccgtgaaacgcggcaccgtgccaaaacgtgtgccagtgagcggatcgaataaggttaaacgctcaatttcatcgtcaaataattcaatccgaatcgcttgatcatcggattcagcagggaaaatatcgatcacttcgccacgcactcggaatgtgccacgctggaaagcttgatcgttgcgggtatattgtaattccgccagtttagaaagaatttcccgttgattaataatcgcaccagtttggagatgcaacatcattttgagataagaatcgggatcgcctaaaccatagatcgcggaaacggaggcgaccacaatggtatcgcggcgttccaaaaacgatttggttgcagacagacgcatttgctcgatttgatcattaattgacgcatctttttcaataaaggtatcgctgcttggcacataggcttctggctgataataatcatagtaagaaacaaaatactctacggcattttcggggaaaaaggctttcatttctgcataaagctgggcagccaaggttttatttggcgcgagcaacattgctgggcggtttaattttgcgatcacattcgcaatggtaaaggttttgcctgagcccgttaccccaagcaaggtttggtgggcgagcccatcgtttagattttcaactagcttttcgatagcttgcggttgatcgccagagggttggaattctgaatgcagaataaaaggtttggtattaattttgtgtgacatgcaatatctactgatcattcattaagtgcggtcaattttaacataatttagtgcaattttcagtgcggaaaatgctaggttttacacaagcttagcaatgtcaagccgaatagatcacaaaaacagtaaaaaattttaaaattttatttgaaaaaatataaccttttgaaaagtaaagaaatgttattttacaaccaatcttatagcaaaatagggtagtgatagtatttataaggcttgcgcttattttattgggtttaattcacagagttatccacagtttttgtggatagaaaagtgcggtcagaaaaagtaaaattttttgcaaaattgggttgacaagaatcgctgagaactttattattcgccacctatctcgcagtatgactgcggtaactgaatcaattcctccttagttcagtcggtagaacggtggactgttaatccatatgtcgcaggttcgagtcccgcaggaggagccatttccttttggtgaacttttatttgtctcctttgatagaagtttattaaagccaaaagtttagcccgataatttgtcgggctttatttttgccttaaatttgttatactcactcgaatttcattactaggtcttatatttatgttattagctactctcgccataattgttggtttattacttctcatttgggcggcagatcgttttgtggacggcgctgcagcaaccgcgcgttacttcggaatgccacaattattaattggtatcgtgatcatcggttttggcacttccgcccccgaaatgattgtttctgccttgtctgccttaaatggcaacccagggattgccttaggcaatgcctatggctcaaatatcactaacattgcgttaattctaggttttaccgccttaattttgccattggcagtgaattcacaagtgttgaagcaagaattaccgatgttaatttttgtcaccgcactttctgcgtttttgattatggacggtgcggtaacacgcaccgatgcgtggattttattagccacattcgccctttatatgggctggagcatttggcatggcttaaaaaatcgagatgacacccttggcgatgaagtgttggaagaattaaacacgcgcgagaatatgcctttaggcaaatccattatctggctgttaattggcttggcagtgttaatgggcagctctcaattattagtatggggcgccgttgaaatcgctcatcattttggggtgagtgatttagtgattggcttaaccattgtcgctatcggaacgtccttgcccgaattagcctcttccattatggcagcacgcaaaggcgaagtggatctcgccgttggcaatattattggctctaacttatttaataccttagccgttgttgggatctcaggctcaatttcgccgatgcaagttgggcatgaaatgttctcgcgtgatatgttagtgatgtcagtcttaaccgtgctattgctgattttcggctttggcaaacctgggcgaattaaccgtgttgaaggattgatcttattattggcttatattggctataactattatttattccaaaccgctctttaatttgcaaaaaaagtgcggtcaaaaatattaaagtttttgaccgcacttaaaatgccaagaattgtttatttacctaagttatcaaagaattttttcacgccatcaaagaatgatgaagatttagggcgttgtttttcctgatcttcaaaactatcttctaatttacgcagtaattctttttgttcctcagttaatttcacaggggtttcgacgataattctacaaattaaatcccccgaatagccagaacgcattgcggtaattcctttgccgcgcatacggaacatttttcctgtttgtgtgccttcagggatttttaatttcactcgaccatctaaggttggtacatcaatttccccacctaatgccgccatagtgaaactgattggcacttcgcaatataaattgctaccgtcacgctcgaaaatatggtgatctttaacatgaatcacaacatataaatcccccgcaggcgcgccattttcccccgcagcgcctttgccggctaaacgtaattggttgcctgtatcgacacctgctggaattttaacggaaaggctttcgtttttatgtacgcgtccatcgccatgacattttttgcacggtttctcgatttttttacctgtgccatgacaggttggacacacttgctcggtaacaaagaaaccttgttggcggcgtacacgcccatgtccgtgacaagttgggcaggtttcaacttttgatcctttctctgcaccagaaccatcacagtgatcacaatgcacaagcgttgcaatttgaatgtctttggtgacaccgcgtaccgcttcttcaagcgtgatttcaatgtcgtagcgcaaatcttctccgcgcactacacgttgacgtgaagaaccgccgccgaacatttcgctgaaaatatcttcaaaaccgccgaagcccccaaagccaccgccaaaaccgccagcgccaccaccgaatccaccttgttcaaaggcagcgtgaccgtattgatcataagccgcttttttctctttatcgcttaagatttcataggcttcgttgatttctttaaatttctcttcgctttctttatcacctttagtgcgatctgggtgatatttcatcgctaggcgtttataagcacgcttgatttctttatcatcagcgcctttttgaatgcctagaacttcataataatctcgttttgccattagattatgctctttaataatgtgttagctttcgttttaaccacgcaatgacaagctgtgcgtggcgacacttagtgcgccgttatgttctaactaaatacaccaaaagggcgtaatattacgcccttagttttaagctttgaagcaagattatttattatcttttacttcttcaaactctgcatcaacgacatcatctccgcctttgttaccttgcggttgggcgttcgcatctgcttgagcctgcgcttgacctgcttggatcaatttttcagaaacttgaattaacgcttgaacttttgcatcaatagcttctttgtcttcgccttttgctgcctcttcaagttcgcttagcgctttttcaattggcgctttgtcgtctgccgataatttatcgcccacttcgcttaattgtttgcgagtagagtgtactaaatgatccgcttggttacgcgcttgcactaattcttcaaatttacggtctgcttcagcgttcgcttcggcatcacgcaccatctgttgaatttcatcatcacttaagccagaagacgctttgatagtgatttgttgctctttgccagtgcctttatctttcgcagaaacgtgaatgataccatcagcatcgatatcgaaagttacttcaatttgtggcataccacgtggtgcagggttgataccttcaaggttaaattgacctaaagatttatttgcagacgcttgtttgcgttcaccttgcaatacgtgaatggttaccgcactttggttatcttccgctgttgagaatacttgcgattttttagttggaatcgttgtgtttttctcaattaaggttgtcatcacgccacccattgtttcgataccgagtgataatggggtaacgtctaacaataatacatcggttacattaccagataatacaccaccttgtaccgctgcacccaccgcgactgcttcatctgggttgacatctttgcgtggttctttgccaaagaattctgccactttttgttgaactaatggcatacgagtttgaccacccactaaaatgacatcatcaatttggcttacgcttaaacctgcatcatttaatgccacttttacaggttccattgaacgagtcaccaagtcttcaactaatgcttctaatttcgcacgagttaatttgatgtttaagtgttttggtcctgttgcatcagcggtgatgtaaggaagatttacatctgtttgttgtgcggaagaaagttcaattttcgctttttcgcccgcttcttttaaacgttgcattgcaagtggatcgttgcgtaaatctacaccttgttctttttggaattcatccacaagatagttgattacgcggttatcgaagtcctcaccacctaagtgtgtatcaccgttagttgctaatacttcaaatgttttctcgccacccacttcatcaatttcgataatggataagtcaaatgtaccaccacctaagtcgtaaacggcgatagtttggttgccagtgcctttgtctaaaccataagctaatgctgctgctgttggctcattgatgatacgttttacttcaagacctgcgatacgacccgcatcttttgtagcttgacgttgtgcatcattaaagtaagctggcacagtaataaccgcttcagttaccgcttcacctaagaaatcttctgcggtttttttcatttttttcaagacttctgcagagatttgtggtggcgctaatttatcgcctttcacatcaacccaagcatcaccattgtccgctttcacaatactaaatggcataatgttgacatcacgttgaacttcgctgtcttcaaaacggcgaccaattaaacgtttgatcgcaaataatgtattttttggattggttaccgcttgacgttttgcaggttgaccgactaatgtttcattatcatttgtataggcgatgatcgatggcgttgtgcgatcgccttcagcattttcaattacacgaggtttgtcgccgtccattaccgcaacacaagagttggttgtacctaagtcaataccaataattttgcccattttgtttctcctagtttgaatctgttcacttttagcgaagtagtttgcctcgccttacgtgttagtaaaatgtggattacatttgctatttcaagagcagttttaaaaaatttttgaacttttcaaaaaaagcaggtgtaatttcatcgtgaaatgaaaatgggggagtgaaaagagatttcaaggggaaaaatgaaaaaagtgcggtcaaaaaataaaaaattttcaagcgtattttaaacgttgatgtaatggacttttgcgttcattaatgaaatcgctaaattgtccttgttttatgggatctttcgctaaaagcattggcaaataaatgcagaaagaccaaaagtgcggtcaaaatttaaaaagttttttgtgaaatatatagaatagaaaggggcgttaaattcgccccttatctgatatagcatttttgagattacattttctctacggttttaatccccagcaaatccaagccctgttttaaggtttttgcggttaaggcagctaattttaaacggctatttttcacggcatcttctgcatttaaaattgggcaagcctcgtagaaactagagaatgttcctgctaattcatataagtattgacataaaatatgcggcataccgtctttcgctacgccatttaatgcttcttcaaattgcaataatttaatcgctaaagcgcgttctttgtcatcagagagtacaatgtcgccagttaaattattcacatcaacattggcgcgggcaaagattgacgcaatacgcgtgtaagcatattgcatataaggcgcggtattgccctcaaaggtcaacatattatcccagtcgaaaacataatcggtggtgcgattttttgataaatccgaatatttcactgaaccgatagcaaccgcttcaaccaccgctgctttttcagtttcggtcaaatcaggattgcgttctgaaatcagtttatctgcgcgttcaacggcttcatccagtaaatcttttaattttaccgtgccgcccgaacgagttttgaatggttttccatctttgccaagcatcataccgaaaaatggatgttccaagctgaatgaatctggtacatagcctgctttgcgcgtgatcagccaagcttgctgcatatgttggctttggcggctgtctgagaaaaccaaaacgcgatctgcgtgcaaattgtgataacgatatttcgccgcggcaatatctgtggtggtataaaggaaaccgccatcttttttctgcacaatcacgcccatcgcatcgccgtctttatttttgaattcatctaaataaaccactaacgcgccgtcatcttcaaccgctaaaccttgctgttttaaatccgcaacaatttcaggcagcatcgggttgtaaaggctttcgcccatgacatctttttcggtcaatgtaacgttcaggcgatcatagttttcttgattgtggtgcatggtgatgtccaccagttttttccacatagtacggcaatattcatcgccactttgcaatttcaccacataattacgagctttttctgcaaaggcttcatcagaatcataatgttctttggcagcacgatagaaagcttctaaatcgctcaattccatggctgtggcattttcattttccattttttccaaataggcgatgagcataccaaattgtgttccccaatcgcctacatggttggcacggattacacgattgcctaaaaattctaaggtacgcacaacggcatcgccaataatcgtagagcgcaaatgccccacgtgcatttccttggcaacgtttggcgaggagtagtcaataacaatggtctgtggcttttcagttttaatgccaaaattgaccgcacttagcacgctgtttgcgttgtgtgccaaccaagttttatctaagaaaatgttaataaaccccggccctgcaatttctaatttttctacaatgccttttaaatcaaggtgatctaacactttttgcgcaaactcacgcgggtttaaacctaattttttagccgcccccataatcccattagcttgataatcgccaaattgcggtttgcctgattgacgaactgcagcttccacgccttgttccgcccccgctgaaaccattgcttgctgaattttatctgataaaagttgttgaatattcacgttttgcctatctataaaatgaaataaaaaaatctgccgtatgataccgaactatacctgattggaaaaggatttttgtctttgagggagagaaatgaagtattagggaagttaatagcgtttttgaaatttaataatgaatagaaaacgatgccccttgaaacctaagcaacaaggggcagagcgttgcgagaaatttatctcttattgtaacaacgtttttcatttcgcagtgctattacaacatgaaaataatatctaggcaatcagccaaagtcaatatattttctatagagattatggtaaaaataacaacaataaaactaaggataaacccgaataaggagaaattatgaatatggtgaaaccattaaactatattttaggtcttgatttaggtattgcgtctgttggctgggcagtggtggagattgatgaacaagaaaatccactaggtttaattgatgttggtgtacgcacttttgatcgtgcagaagtgcccaaaactggagagagcttggcgttagctcgccgtttggcacgatcggctcgccgtttagtgcaacgccgtgccgctaggatcaaaaaagcgaaacgtttattaaaagcagaaaatcttttgctttcaaccgatgaacaactgcctaatgatgtttggcaattacgagttaatggtttagaccaaaaactagaacgtcaagaatgggcagctgtgctgttgcatttattgaagcatcgcggatatttatcgcaacgtaaaaacgaaagtaaaagcgataataaagaattaggcgcattacttttaggcgttgcagctaaccataacattttgatgtcttctgaatatcgcacaccagcggaaattgccgtgaaaaaattccaaatagaagatgggcatattcgtaatcagcgtggtgcttatacgcatacatttaaccgtttagatttattagcagaaatgaaattattgtttcaacgtcaaatggagttaggaaatccatacacttctgcgactttattggaaaatttgactgatttattgatgtggcaaaagccagctcttgcaggggatgccattttgaaaatgctggggaaatgtacctttgaaccaacggaagataaagcggcgaaaaatagctattcggcagaacgctttgtgtggctgacgaaactcaataatttgcgcatcttggaaaatggcgtcgaacgggcattaactgatcaggaacgttttactttgcttgaacagccttatgaaaaagcaaaattaacttatgctcaagtgagaacaatattggctttatctgatgatgctatctttaaaggcgtacgttatcaaggtgaagataaaaaggcggttgaaacgaaaaccactttgatggagatgaaagcttatcatcaaattcgtaaagcattggaaggcgcggatttaaaggctgaatggaatacgataaaaaataatcctacgttattagatgatattggcacagcattttctttatataaaactgacaaagatattagctgttatttagagggaaaattagcgaaaaatgtcttaaatatcttgttagaaaatcttaatttcgacaaatttattcagctttcactcaaagcgttacaacaaatcttgccgttgatgttacaagggcaacgttatgatgaagccgtttctactatttatggtgctcattatggtaaaaaatcgatagaaattgaccgtttattaccaaatattcctgcaggtgaaattagaaacccagttgtgttacgtacattaacccaaactcgtaaggtaattaatgaagtggtacgtttatacggctcgcccgcacgtattcatattgaaacagggcgtgaagtgggcagatcttatcaggatcgccaaaaactagataaacaacaaaaagacaatcatgaacagcgtaaaagtgcggtgaaaaaattcaaagaatattttccagactttgtgggagagccgaaaggcaaagacattcttaaattgcgcttgtatgaattacaacaatcgaaatgtttatattcaggtaaacccttagacccccatcgtttgctggaaaaaggttatgtagaagtggatcacgcgctgccgttttctcgcacttgggatgatagttttaataataaagtgttggtgttagctaatgaaaaccaaaataaaggcaatttaaccccttatgaatggttggatggcaaaaataatagtgagcgttggcggcattttgttgcccgagtgcaaaccagtgctttctcatatagcaaaaaacagcggattttgagccataaattggatgaaaaaggatttattgagcgtaatttaaatgatactcgttatgtcgcccgtttcttatgtaattttattgctgatcatatgttgctcacggggaaaggaaaacgcaaagtatttgcctcaaatgggcagattacggctttattgcgtggacgttggggcttgcccaaaaagcgtgaagataatgatcgccatcatgcactggatgccgttgttgtcgcttgctcaacggttgcgatgcaacaaaaaattacgagatttgtgaaatataaagaagggaatgtatttactggagagcgtattgatcgtgaaactggtgagattattccgctgcatttccctagtccgtgggcattctttaaagaaaatgtggaaattcgtatttttagtgaaaatcctaaattagaactcaaaaatcgcctacctgattatccccaatataatcatgaatttgtacagccattatttgtttcgcgtatgccaactcgaaaaatgacagggcaaggacatatggaaaccgtgaaatcggcaaaacgattaaatgaagggataagtgtattaaaagtacctttaacccaacttaaattgagtgatttagagcgaatggttaatcgtaatcgtgaaatggctttatatgaatcattaaaaactcgtttagagcagtttggcaatgatcccgccaaagcttttgctgaaccattctataaaaaaggtggaacattggtaaaagccattcgagtggaacaaacacagaaatcgggtgtgttagtgagaggggggaacggtgttgcggataatgcctcaatggtgcgtgttgatgtctttaccaaaggtggaaaatatttcctcgttccgatttatacctggcaagtggcaaaagggattttgcctaataaagcagttattcaaggtaaagatgaagaagaatgggaaataatggatgaaaaggcacaattccaattttctatgtatcaaaacgatttaatcaaacttaaaactaagaaagcagaaattttaggttactttaatgcattaaatcgatcaacaggaaatattgatattaaagaacatgacttagataaatcaaaaggtaaaaatggtatttatcaaggtgttggtgtaaaacttgccatttctcttgaaaaatatcaagtcgatgtactcggcaaaaatattcgtccttgtcgcccaactaaacgacaaaatgtacgttgattcgatccctacactccttgagtgtggggatttttttatttaggagtaccctatgacgtggcgcagtattttaatcagcaaaggcggtaagctctcgctacaacaaaatcaaatgctgattcaacaagagggaaatgaatttaccgtacctttagaagatatcgcaattgtagtggtggaaagtagagaaactgtcattactattcctttattatcggcttttggcttatatggcattactttgctaacttgtgatgaacagtttttgccttgtggacagtggttaccgtttaatcaatatcatcgacaattgaaaaccttaagattgcaactagaagccagcttgccacaaaagaagcaactttggcagaaaattgtacagcagaaaattcgtaatcaagcaacagtgttgaaaatctgccaatttaaagtcgaatctgatcgcttgtttaaaatggctgaacaagtgaaatcaggtgataaagagaatttagaagcacaaagtgcggtcatttattttcaaattttgtttggtaaaggatttaaacgcacggcagatgaacatgcggttaatggtgcattgaattatggttataccgtcgtgcgctcagcagtagcacgtgcattggtattatacggttggttaccacaaatgggtttatttcatcgaaacgagctgaatgcctttaatcttgctgatgattttattgagccgtttcgccctttggtcgatttattggtagtgcaacttgcgaatgaagataagttagctctcaatttatcaccaactttaaaacaacgcttaataaaagttttgaattatcagcttttgtttaaacaagaaaaagtgaataccttaactgccattgatcgaacagtcagttcattccagtctgcattaacccagcgcaatgcagatttattaaaactccctgaaattctaccgctagcggagcaccaatatgagtgagaatgtctttatgcgtataatagtactatttgatttacctgtgacaaccaaagccaagatgcgagctgcaaaccaattccgacagtttttactaaaagatggctaccaaatgttgcaactttctatttatacccgaattattcgagggcgtgatgcaatggaaaaacatcataaaagattagttgaacatttgcctgaagaaggctcaattcgttgtatttccattacagaaaaacagtttgctaatatggaaattcttgtaggtgagaaaaaactgcaagaaaaaaaggtgaattcaaatcaacttttactgttttgaaacaattttcaagcaataaaaaagccttaaacccttgcggattaaggctttttagcgctcctaattatagcactgcgaaatgaaaaagggagctacaacagcctttggcgagtctgtcgctgtatttcaattatagcactgcgaaatgaaaaagggagctacaactacctaaatagagaagatctctttcaagcaattatagcactgcgaaatgaaaaagggagctacaacagtatgatattacaagtaatgtattaggtaattatagcactgcgaaatgaaaaagggagctacaactatttcatgaaataaagttaactttataagattatagcactgcgaaatgaaaaagggagctacaacacagaattcttgtaaatatgcctccacctaattatagcactgcgaaatgaaaaagggagctacaactgataagactgattttagattatctactccattatagcactgcgaaatgaaaaagggagctacaacatagaatcttttcttatttttcgattagaaattatagcactgcgaaatgaaaaagggagctacaacctgtacttgcagtaggctcacttatgaaaaattatagcactgcgaaatgaaaaagggagctacaacacataaacttcacgatattttgtcgggaatattatagcactgcgaaatgaaaaagggagctacaacagaggagatgagcgatgaaagttaagccagattatagcactgcgaaatgaaaaagggagctacaaccaccttttcgcattgctttagcagcgagttattatagcactgcgaaatgaaaaagggagctacaacaaagtaagatttaataaaggtcgcaggtcaattatagcactgcgaaatgaaaaagggagctacaacagctcaatcatcaaagcctaatccttatgcattatagcactgcgaaatgaaaaagggagctacaacctataacaacgtggcaaatactattgtaaaattatagcacagcgaaatgaaaaagggagctacaacagtataagaataagtccgataaccgcacctattatagcactgcgaaatgaaaaagggagctataaccttaacactaccagcatttttaacgaattggtgttggcagatacaattcatctgtaagcaccgaatatcatcgcgatttgctttgaaaagtatctttattatccaattatggtgttagataatttattaccaataccataaatatatttgccaaagtaaaaagcaaatcttgtgcatatttaaataagcctgaagttgtgaaaaactgatactacttcacaatcggtttggtatttcagccaatctgtttaattcctttatttatgctatcacttcaattacaatgcacagttttttcactcacggaacatatatgaaagttttacaagtcatttctcaccccgattttgccaatccgcaacgggccgccaatcagttggcacaagctggtttacaacaattatcttcactcgcaaatgcagaagttaccacagtgaatctctatgatcctgcacttcgcctcccacgcatttccgcagaaaccttgacaatacgagattcgaatcaaatgtcggcagcgcaaaaccaagatctcgaagcacaacaagcgttcttaaaaacctggaaagaagcggatctgatttttatctattcaccgattcacaatttcaacgtgccttcaaaattaaaagattattttgataacgtattaatcgtcggcgaaacttttgcctttactgagcaaggttatgtcggcttaatgtcggataaaaccaaggttactgccgtattaaccagcggtagcgattttagtaccgatttccgctatcaagccattgatgtcgcaccgctctttttgcgtgtcgcattgcataccatcggcattcataatatgaaattgatccgagccgaaggtttggacattatcggcaacgataaacaggctttaatcaataaagcaaaagcagaattagcggcacatatcgctgatttagtttcatcatttaatcattagttatttaaggaaagtaaatgagtaaaaccgtatttttagctggtgcaagtggcgttttgggcattccattgagcaaattattggtaaatgcaggctacaccgtttatggcacaacacgcagccaagaaaaagcgaaaaaattagaagcgttgggcgtaaaacccgttatcgttgacgcttttgatcctgaaggattagaaaaagcaatggttgaaatcaaacctgaaatcgtgctgcatcaattaaccgatttgccagatggtttgaaagccgaagaaatggaagccgctttggttcgcaacgcacgcatgcgtgatgaaggcacacgaaatttggtgcgagcggcagaaaaagcgggcgttaaaaaaatggttgctcaaagcatcggctttgtttacgcccctagcgataaagcacatactgaagaatcgccattattggatttcaatgaaccagcttacggcgaaacagccaaagcggttcatagccttgagcaacaagtgttaaacggcaggtttatcggcatcgtgttacgcaacggctggttttatggcaatgattcaggcattgcagaacccgttgattttgcaccaacattgcacgtagacgccgccgcacaagccgtattgcttgcaatggattgcgaaaccgatgaagtgttcaacgtggcagatgaagatctacgtttagataccagcaaattccgccaagccttcccaacttggaaagcggattttagattataaaatttcaagcggtctgttttcggcaaattttgtaaaactcgctggagacagaccgcttgtcatatttaatcctattttagtctaaatgaaatttagctattctttaaagcgtttgttgaattaatcaaaattctctttctttaatatttgaaaattcagatcaatcgcaattcaaaactcacgaaattttgaccgcactttattggctttccaaaggatttatgtcaaacttacccatatcaagaatgcgtagcttagtaggatagagcagccccctcctaaggggcaggtcggcggttcgactccgcccgcgttcgccattgcttcaaaaaaccttcctatatctaaatgcagaaaatgcttgttatgaattaaaatgctatcttgattcaggatttataacaaggggctgacgtagattaggtactatgctaatctacaaaaatgaagataactcattgtaaactaaagaaatctatacagagaaaattacttgaattttttgtgctagaagtcacggctcgctcagctgcagatttacttgg

SEQ ID NO: 3190 - DNA, 17776 bp, synthetic construct
  misc_feature 1..17776: note = Synthetic
  source 1..17776: mol_type = other DNA
tatctttttagctaagtaaataggagttttagattcacccgtttcaatttgtcttaaaaaagatgttgagatcccgagctttctcgcaaattcagctttaaatccacgggggcgattttccaagtagtctttaagttccatttcacctccatattaaaaactaaacatagtttagcattaactaaacataaaaagcaacagtatttagtgtttgctagtttagctatcactaaatattatttgggaaataggagagttatatgagtttagataaaaacacgctcacgctaataagaagagataacttgaagaagtggttttcagataaagtcgttcctgaaaaagacagaagctacgtttcccaattaatcagtggcaaaaccccttcatttggagaaaaagcagcaagaagattggaaatggaaaataatatgccagctttctatcttgatacgccacaaagtaaaacaactgaaaatatatcttcaaacataaaagagcttgggtcctttgatttgtgggatagaaacaccccattaaatagtgatgaagtggcagtgcctttttatcaagatgttcgcctttctgcgggtaatgggtttgcagatgacatcgcggactataacaattttaaattacgcttttctaaagccacattaagaaaacaaggtgtgcagttcgaaaatgctgtatgtgtaatagctgatggtaactccatggaacctgttattccggatggaacaacggtggggattgatttgggcaataaaaccattagagatgggaaaatatacgcaataaaccacggtggattgttgagaataaaactactctacaatatgcctaatgaacaagtgaaaatccgcagctataacagtgatgaacaccctgacgaaatagcagagctacaagacatttcagtattggggaaagtgttttggtattctgttttattgtaaatttactcttatattaaaaacaaaaccgcctgagtggcggtttttttattaggtttcattgactaattccagaaagtcattttctgatagtattcttatattatggcctttagaaattaactcttgcgcttttatttccttattacttaattcctttccagctaatcggctcttgtcttgaactcctttgataagtaatgttactttcttagaaacaccatcaaccacatcacaaccaacagaagcggcttttttagctgcatcctgtctcggtatagacaactcacctgtaaaaactaccacttcgccatataaaggaccatttggatcaccttgccgttttattttgggtaaaatatgcccattttcgtcatactctacgtgaataggtttttccactctatccaaccagtaatctagcggttttccactttcgagcaaagctttattcaatatttcaccagcaacaatagcatcatctagtgcattatgatggttttcttgtttgatttttaaatgttttgagacttttgccaatccatagcctttttctgcaaatttatcactccagcatcgtctcactacacgcataatatctaaccattgattcggcagattaggaaatatctttttcattgccgctttatcaaaagctccataggaacaaatagtattagtactaaagaattctttaataattggaacaatatcgctaagaataggtgcatctctcacatctcttgctgtgataccgtgaatggaaacatttataggatcaaaataatcttgaggattaaccaacgtttcccattttgtgacaacttccccattctcaaaaaatactatcccaacctggcaaattgaaagtaaatcaggatttgcagtttcaatatctataacaatgaatttattcataattccaccaacaacaaacacatacatttgctgacactagctaaataaagtgcggtcattctacttaaaaagtagaacctattccgtgatcagaatctcaaatcacaatatccactgcttaaaaaataagcaatcaaacacataccaacaaaatattttcacttaaaaatcaaataaatactaaattacactaagtttttaactaaattttactaaataaaccatttactaaatatttagtttttgctaaattaaccacaacaaagcaaaacactttgaaacgttctttaaaaacttggtctcgtgcgggatataaattatcggctatttaagtcgagtaaccccagagcagaaaactgtactgcgtgtttaaccgaagtgatgtggttggcaggtcaatggcagcgctgtttatatctttaagcaatcccttagaggatacgagttcggtcggggaaatggtaacaagcccacggatcggtaaactgccgcggtagcttaataggtaaaagcgaccggctcataaccggaggatagttgagttcgaatctctcccgcggcaccatttcaaagcgaatttattaaatgttccatcaaaggtctgggtaaactgcagattaccaatttaaggatagctagatcagaatttggtaagttcgctttgaaatgttaatcaaaaaaagaggttcaaatatggaagaagaaaaagaaaaaagcctatctgatatagataaaaaactaatcaaacaggctgtattggaaaatgctgcgaaaaatgtaggaatgccaccagataagattgcagaatcattatgtaaagctatttatctgattgactcttataagcatttatgatttgagaagagtcaattccatcatctaacttattctgaaatgtttcagataatgaattgataaactcggcaatatcccttgctgttgttgcatcaatatttctttgataatgagagctggttctcaaaatatctctagccataactagcgcaattttatcagctacaacttttttcataataatctccttattttgtgttgtggttgtgaaaattatattccttatgtgttgtggtgacaataagggcttgagccttgcaagcataaagaaaggcgccttaatggttctttggagccaccagctaaagccgctttcaagtagaaacatcactaattttacactttgttcaagtggtgtgagagcggctctagctggaaacagcacataacaatatgttcttctttagtcaattacccgcagttgccatttatagcttatttgcactgcgggattttttttacctaattccaccatcactacaaggatctactcatgaaacaaaatcaattcgcaagacttattaaaaataccgcctacggtgttgcaacagtttgttcaatcattgttgccgcaatggttattctcaccgcattagcagcagatgcaaaagaatacactaaccctgcactagaacgtgaaagagcgagagtacagtggatttctgaaaacggtgagtatcaaaagaatttaaccgaagaaggtgaaaaacaagcacgtgcttacgtatctattaaacaagctgaaattaataaggaatagaaatgaaactaccttttaaaaccaacagcgaacttgccgccaaggaagaacgcaagaaaaattatttatccgcttatgtgctttggaaaaaagcatcaaagctaaccggaaaagagataaataagcactggtgtataagccgtgcggaatggtgccaaaagatgcaccaagaagaagtgaaacttaaaacgagaaaaatctatgtaccgcattaatacctattatggctataccattgactatattaagccagatcctaacgaaattgatattcgtgatatcgctcataaccttagctttgaaaaccgctttattggtcaaactgcagagccttatagcgtagctcagcattgtgtacttggtagctatatttttgaagaaatgggattgcctgagcttgcatttcttttcctactgcacgatgcggcagaagcctacttaaaagatattccgactccgctcaaacatttgctaagtgagccttatcgcaatattgaagatcgctttaatttagcaatccaccagcgttttaatgttgagtataagaaattgccagcaattaaatctatggatttatctatgcttgcaactgaaaaagaacagttacttccaccagcatctgtagagtggccacaattggacggtatctctccggcaaatatcacaattgttttttggcaaccacatcaagctgaatcagcatatcttgcccaatttaaacacttaactgagattttaaactatggcgacaagtaagaaaccgcgtaaaaagcacgataaaaatgccaatatcaaacggcagagcgacagaatatgtcgcaactctcttgtgctttcagttattggattaggaaacgacggcacagaatggataaaaaataatattccacaagacagaacgacggccactgaacaagattttgaactgatgtataacaaatcccgtccctggtcttttgtttttggcgttatttgccgtgatcaacttggaagaggttatataaaatttgaatatcaatctcttgctaatcaatttgcattcactgcacctgaaatgactgattacgtcaatgacaatatcaatgccattttaaacgatgtaaacgaagagcatgttctctcccctttccttattgcatcaccagagaaaaaagagtttacagacgattacataaagaaacttttaacctggaagaaagtggaaacaacgctcaaaacaccatttgaaattaaagcgttgcgtgaagaaggaatggcagtattacgagaaatagatccaacagtttataccgataaagcgacttggacgatccttcgtaaaaatggctgtaatgattttgccgatatgcgattagttggattagaaaaatatcaacactgcaaaggaatcggtaaaaaacgcattcaaagtctgattgatggctatcatgcattaatcaatgacgaaaaattaattccaaaattgaccgcacttcgtgaatttgaaactcaaatttatatccaccaacaaacaatggcccgattaaatcgagctgcacaaatgtaggagaacctcatggctaaatttatcaaactgactaatacggatgaatcagatattttcatcaatgtagaacaaatccaaaccatcactaaagatgaaaatgacacagctattcaatttgaagatggcactatctttgtgaaagaaacaccggaacgaattattcactcaatccaatctggcggttcggttaatgaattaccagttgttgatgtcatgaccgctaagtaacgtgaaaaagaccgcactttttgggaataaaaatgatagatgacacattatatcggttgattatgaccgttctaatatctttttactttattttaataggaagaaagctacggaaactcgatgaagatagaatgaaagaatgtgagttctacttcagaattaaaatttggcttatctctcgtggggtaaaagatgtttagacaggacttacaagtatcaaatggcaaaagatacgttgttattgaatgccaattcggacatgaatggggaatggtaagagagactagggaaacagtcagcgagggagaggcattggaaatcgtccaatattggattaagtacaaaagaataaaaccagagcaaataatggttattgaagtgcctgatatttgcaaaccatggtaaatatctttaaagagattagatagggaatgtatgatgaaagaatttgacttaaaagcggccttgaatggcaaaccagtaaaattacgtaatggctggaaagctatagtttattaccgtgtgcctgatgaatttgtaaattcagaaggttccaatgtagcctatccattaaaaggaattacttttcaagcagatggagctgtccttaattctataaactcttggaaagatgatggttgtttttctgcaggaaaacgtgatttcgatattgtaggtatgtgggaagaaccaaagattggtactgaggatttacctaaaccgtttaagcctaaaagtggcgatggatattattatattaatgaatatggagtccaattcaccagacactatgatgaggatgacgatagcgatgttggaatggctgaaaatgctcaatgctatcgcacagaagaagatgctcaaaaatggcttgattttatgaaaagtatgttggagtagatatgcagaaaaaaattatccaatggttagctgatgatgtcgatgttggactgagtagtaaatgtatggcatttgtgattggttttgatgtgataccaagacgtaaaagttatccgcttgatccgagcgatttatctcgttgcgtgaagttattagaacgagtaccgaaaatgcgagattatctttataagatgaaagagatttccccaatttgggcaaaactggtggaacattgggatgagttagagcgtttactcaacgaagaaaaagattccggcagatgtcctaaaacatatcaattaataaaaaaacttactgaggatgagcataatgttgtatttcgtcacggtgggttttccattcgaatggaggaataaattatgccaaattggtgtgtaggagatttaaaaattagaggcgaatacgctgatataacgcattttttaacggagtgcattgaaggttgcgagtgtgacattgatgaatttggcacattagaaatcaaaaacattagatggcaagcaatcaaaggggctcgacgtgttttttgcgacaactcaaatgaaatcattgagggatatgagttggagaatgggtatatcgttgtcgtaccaatctcagctgcatgggtattaagccctcctgaaatgattgaattaagcaaaattttcaatgttgattttaggttttatggatttgaattggggcaagaatttaatcaagagttagaaatcataaaaggtgtattaactttagataaatgtatagaatttaaaaattacatttgggaatgccctaagccttatcttgggggataaaacccatttacagcccattaaatctcctctccccccattttttttataaaagtgggataagttagatgaagtgggctaactaaaataaattgttataaccgctcttatgggcggttttttattggagacaatatgggaagagaattttttgatgaatactgcagtccagaattattagcgttaataactggatatgtttgccctaaatatcagatgaaaagcttaaatgagttcggaattccttttcttcatccaaaaggaaataggaagttcccgcttgtgttacgatctgatggtgacaagattttgaaaggtgagaaagtgcagcagattacccaaacaaaggaaagaaggcggtctgcagtattaagttagtaagggggatattatggcacgtccaagaaaacgaattaatcaaggattgccacaaggcttagtatgccggaatcgcaaaagagcggatggatcaacagtggtttattactactacacgatggccgataaaaaagaagttgctttaggaaaagataagcacattgctattctggaagctgcaaagctgaatatgcagtatctaacgaaaaaagataatatcctttttattgaagtgcttgagcgatatgaaaaagaagttgtgcctcttaaaaaagcgaagaatacgcgaagctcaaacattcaggcaataaagaaattgcgccaatacttccaagatccaccatttacccttgatgaaatagagcctatacacattcgtgaatatttagattggagaaaagacgttaaaccaaccgcaaatatcgaagttgggttatttggacacatttggagcatggcaagagaatggggatacactgaaaagattagtccatctacaggggttaaaaaattcaaagtaaattaccgtgatgtgtacattgaagattatatcctagataaaatctacgactgtgccaccggggatatgaaggatattatggatgtgatgtatttaaccggacaacgtccaatagacgtggtaaaaatccatagttcgcacatctacaacgatttactgcatattacacaacaaaaaacaggtaaacgtgttgctattaaagttataggtaaactaaaagagattatcgacaagcggatcaccgaagaaaatcaattcctatttacgaataaatggggacgaaagctcgagcggagatcgcttacagattatttcaaagatacccgtaatgcggcatcaagaaaatataaagagttagcagaagagatcaaccaagtgcaattgagagatcttcgtgctaaagcggcaacagacctttcattaatgattgatgatgaacgagcaagaaaacaacttggtcatacttctgcacgtaccactcaacattacatcagaaaagaaaaaccactcaatccaaccaaataaaaaaggctcttcaaatgaagggcctttttttgtcacaaatcacgttccgaaacgtttttaaaactcattgattttattaaactttaaaacctaaaaataacaaaatgtttcggaattaaaattgactttagatagcgtaaatactggattatgctcttttgaagtcaatgtgaaccaattttggtttgaatgggtgacgttgcattgcttgaactttcactgcaacttctttaccttcaaccactaaagtgattacatcgctatagaaagaatcgtgagcttgtgcgttgtttaattcatcgtgatttaagatgattgaaacaggtgcttcgctgccaccataaatgattgcagggatttgaccgttgtgacgcaggcggcggctcgcacccttaccttgcgcttgacgaacttcagcgttaaatttaaatgccattttaatgttctcttgattaaaagtttaaaataaaaaattgcaggcgacccagcaattttcctaaatttgctcaaagacaaactttgagagcgacggattataaaatattcagccccacaatgcaaatttacacagcaaattttttctaggcttttcaaagcaaagcgattaaaataagccccaatttttaattaattttaactaactgattgtaagtgggtttcaaatggaatttcttatcagcttttttaccgattacggttattgggcggtgctatttgttctgattatttgtggctttggtgtacctattccagaagatatcacgcttgtctccggcggtgtaatcgctggtctctatcctgaaagcgtcaattcccacttaatgttagtcgtgagtatgattggtgtacttgccggtgactcaaccatgtactggcttggtcgcatttacggcacccgcattttacgtttccgcccaatgcgtaaaatcgtaacattagaacgcctcaaaatggttcgtgaaaaatttgcccaatacggtaaccgcgttttatttgtggctcgtttccttcctggattacgcgcaccaatttatatggtttcaggcatcacccgccgtgtcagctacactcgctttgtattaattgatttctgtgctgcgattatttccgtgccaatttgggtttatcttggtgaattcggtgcgaagaacttagattggttacacgaacaaattaaaaaaggtcaattcgtgatttatatcctaatcggtgttttagcgctgtacctattttggaaatggaaaaaagcgaaaaaatctaaagctaactaatttctcacaaagtgcggtcaaaattttataatttttcttcaatcaaaaaacgcttaatcattttattaagcgtttttttgtttttgttaacctactctcacatctttattttctaaataagcagaaaaaagatgtcccttgaaacttacatttcaagggacagagctttgcgagaaatcttttctcttattgtaacaacgtttttcatttcgcagtgccattacaacgaggtgaattctatctatttatttttttatcgtcaatatattttttatacaaaaatctgttaaaatttaaacaaaaaaactaataaaaaggaaccaaccttatggaaaataaaaacttacattatatccttggtcttgaccttggtatcgcctctgttggctgggctgtagttgaaattgacgaaaaagagaatcctctacgtttgattgatgttggtgtacgtactttcgaacgagcagaagtacccaaaacaggtgaaagcctcgcactttctcgccgtttagcccgctccgctcgtcgattaactcaacgtcgtgttactcgcctaaaaaaagcaaaacgacttctaaaatcagaaaatatcctattatccactgatgaacgtcttcctcatcaagtttggcagctacgtgtcgaaggtctagatcgtaaactagaacgccaagaatgggctgcagtgttattacatttaattaagcaccgtggttatttatctcagggtaaaaatgaaagtaaaagcgaaaataaagagctaggtgcgttattaagcggtgtagccagtaaccatgaattactgcaacaagctacatatcgcacgcctgcagaacttgctgtaaaaaaatttgaggtcgaagaaggtcatatccgtaaccaacaaggcgcctatactcacacgtttagccgactagacttactcgccgaaatggaactcctcttctctcgtcaacaacactttggtaatccatttgcttcagaaaaattattagaaaatttgaccgcacttttaatgtggcaaaagcccgccttgtctggtgaagccattttaaaaatgctcggtaaatgcacttttgaagatgaatataaggcggctaaaaatacctatacagcagaacgttttgtttggataacgaaattaaataatttacgtattcaagaaaatggcttagagcgtgctttaaatgataatgaacgtttaatgctaatcgaacaaccttatgaaaaagctaaattaacttatgcacaagtacgttcaatattaaatttatctgatgatgcaatctttaaaggcgttcgttattccggtgaagataaaaaagccattgaaactaaaacaacactgatggaaatgaaagcctatcataaaatttataatgtattaaagagtaataacctaaaagctgaatgggcggaattaaaggcaaatccaacattgttagatgaaattggcacggcattttcattatataaaactgatgaagatatcagcgcttacttagcaggaaaactttctcagcctgtattaaatgccttattattgaaaaaccttagttttgataaatttatccaattatctcttaaagctttatataaacttctgccattaatgcaacgaggactacgctatgacgaggcttgtcgtgaaatttatggcgatcattatggtaaaaaaacagaagaaaaccattacttcttaccacagattccagctgatgaaatccgtaatcctgtggttttaagaacactcacgcaggctcgtaaagtgattaatggtgtagtgagattatatggttcgcccgctcgtattcatattgaaacgggacgagaagtgggaaaatcttacaaagatcgtcgtgaactagaaaaacgtcaggaagaaaatcgtaaacagcgtgaaaacgcaattaatgagtttaaagagtattttcctcattttgctggtgaacctaaagccaaagacattttaaaaatgcgactttataaacaacaaaatgcaaaatgtttatattctggcaaacctatcgaattacaccgtttattagaaaaaggctatgtagaagtcgatcacgccctaccgttttctcgcacttgggatgatagcttcaacaataaagtactagtacttgctaatgaaaatcaaaacaaaggcaatttaactccttttgaatggcttgatggtaaacataacagcgaacgctggagagctttcaaagcattagttgaaacaactgtattcccttatgcgaaaaaacaacgcatcctaagccaaaagcttgatgaaaagggctttattgaacgtaacttaaatgatacgcgctacgttgctcgtttcttatgtaactttattgcagataatatgctcttaacaggcgaaggaaaacgcaaagtatttgcttccaacggacaaattactgcattacttcgtagccgttggggattagcaaaatcacgtgaagacaatgatcgccatcacgctttagatgccgttgtggtcgcttgctcaaccgtcgctatgcagcaaaaaatcacacgttttgttcgttttgaagaaggtgatgtattcactggtgaacgaatagatcgtgaaacaggtgaaattattccattacacttccctacaccatggcaatttttcaaacaagaagttgaaatccgaatttttagtgataatcctaaactggatctagaaaatagattgccggatcgtccacaagccaatcatgaatttgtccaacctctttttgtatctcgaatgccaatacgcaaaatgacaggtaaagcacatgaggaaactttgcgttctccaaaaaaattaagtgaaggaaaaagtataaaaaaagaacgattaagtaatttaaaattaacagatttagaaagaatggttaataaagaaaaagaacctgaactttatcaatcattaaaagaacatttttcaaaatacggagactattcaaaagaaaaattctttaaaaaaggtgggacagaagtaaaatctatcaggctgtataaaacccaaaataaatatgttgaattaaataatggtaaaacaattgctgacaatggagatattgttagagttgatgtatttaaaaaagagaaaaaatatcatgctgtaaatatctatgcttggcaagtcgcaaaagggattttatctaaagaaacatctactggtttatttttagatgataattacatatttcagtttagcctgtttaaaaatgacttagttaaaatacctaatccaaacaacaaatcggagtatttatttgcatatttcattcgccctgacgatgaacctagatggatattaaaattgcaagacaatgcaataattcccgatggatttagtaaaaaagaaaagaattcatttagattcagctttaaaaatcaatcatttattgaaaaatatcacattgatgaacttggaaaaaacattaacttatgtaagcgaagtaaacgccaagctgttcgttaatctcaacttaatcctcatacgtattacgtatggggatttttttgtaaggatacattatgacatggagaagtcttctcattagcaaaggaggaaaactctctttgcatcagcagcaaatgcttattcagcaagaaggaaacgaatttactgttcctttagaagatattgctattgtagttgtggaaagccgagaaacggtgattacccttcctttactctctgcattcggtttatacggaatcactttattaagttgtgatgaacaatttttaccttgtggtcaatggctcccttttaatcaatattatcgacaattaaaaaccctcaaattacaacttgaaacgagcttgccactgaaaaaacaactttggcaacgtattgtgcaacaaaaaattcgtaatcaagcaaaagtcttatcactctgtcagtatcaggacaaatcagagcggttacttcagctcgctaatttagtgaaatcaggtgataaagataatcttgaggcacaaagtgcggtcatttatttctctggattattcggttctcatttcagacgaaaagaagaagacaatgcgattaatatacatctgaactatgcttatactgttgtgcgttcagctgtggcaagaagccttgtactttatggttggctaccacaattaggtttatttcatcatagcgaacttaatgcctttaatttagcggatgattttattgaaccttttcgccctattgttgatttgctggtatggaacttgctcgaaaaaggattaatcaccacaaatcttactcctatatcaaaacagcaattaatcaaaatcttgcatcatcaactgcgttttaaccaggaaaaagtgagtgttttgactgctattgataaaaccattgcctctttacaaattgcacttattcaaaaaaatgcaacattattgcagttaccagagatcgatacattgcaggaatatcaatatgagtgaggaagtatttatgcgtatgatcgttttattcgatttaccggttaccactaaagcaaaaatgcgggctgcaaaccaatttcgtcaatttttacttaaagatggttatcaaatgttgcaactttctatttacactcgaattattaaagggcgagatgcattagaaaaacatcataaaagactcgtcgcacacttacctgaagagggatcaattcgatgtttatctattacagaaaaacaatttgcgagtatggaaattttagtgggagagaaaaaaccgcaagaaaaaaaggtcaattcaaatcagttattgcttttttagccattttttagacaaaacaaaagcccctaaaccttacggcacggggcttttgagtgtccctattatagcactgcgaaatgaaaaagggagctacaactgggcaatagcaataaattacccgacctgaattatagcactgcgaaatgaaaaagggagctacaactaaatagttggtctatggcaatgaccacgtattatagcactgcgaaatgaaaaagggagctacaacaggtgtttacgtctattgattatcacgattattatagcactgcgaaatgaaaaagggagctacaactatttgagacgttgaatcaatcagcatgtgattatagcactgcgaaatgaaaaagggagctacaacatcatggcaaattctatcgaaaaacttttaattatagcactgcgaaatgaaaaagggagctacaactatctttaccgtagattgtctgtaattgagattatagcactgcgaaatgaaaaagggagctacaactcgctctgatcgttagtggtgtggcgagtgattatagcactgcgaaatgaaaaagggagctacaacttgacttgcgaaatggcgttcagccattgaattatagcactgcgaaatgaaaaagggagctacaacaataaacacgattaaacaccttttaaatgaattatagcactgcgaaatgaaaaagggagctacaacacgtggcatcggtcatcggtattgtgatcgattatagcactgcgaaatgaaaaagggagctacaactacgccaatggcaaacttaggtgcgctcggattatagcactgcgaaatgaaaaagggagctacaaccaattggtattgtattaggcatcaaacaaaattatagcactgcgaaatgaaaaagggagctacaacttttgtgaaaggcaaggcaacaacggcaagattatagcactgcgaaatgaaaaagggagctacaacttacattccaaatagtaaaaaatcctctgcattatagcactgcgaaatgaaaaagggagctacaactcatatttgctaaattacctattttcgcagattatagcactgcgaaatgaaaaagggagctacaacctaacagaaaatggtatttttggggaagtgattatagcactgcgaaatgaaaaagggagctacaacgagccttgcaagcataaagaaaggcgccttattatagcactgcgaaatgaaaaagggagctacaaccaaatgtcggttcggaaaacggcacactaaattatagcactgcgaaatgaaaaagggagctacaacaataatgtgttttaaaacaagtttaaaggaattatagcactgcgaaatgaaaaagggagctacaactcatccatatgtgatgaaataatgcgacctattatagcactgcgaaatgaaaaagggagctacaacagaaccatcaagccagatgttgaagaattgattatagcactgcgaaatgaaaaagggagctacaacaattttgtcgttcattgatactttttctacattatagcactgcgaaatgaaaaagggagctacaaccttggatgttttcaatcacaaaaaagccgaattatagcactgcgaaatgaaaaagggagctacaacatggtggatcttggaaatattggcgtaattattatagcactgcgaaatgaaaaagggagctacaactatggtttattcattggacggaaccaaacgattatagcactgcgaaatgaaaaagggagctacaacgtcataggatatacaacaacagatatgttgattatagcactgcgaaatgaaaaagggaggtacaacttggcgactaatccagccatatcgaattatattatagcactgcgaaatgaaaaaagatgttattacaatacagtataaatttactatttaataataatgtatttaactttattctcttcttgcatttttttctgatgctctttctcccattttttatataaaaaatggattaatatcctaaataaaataagaaatacgaggcaagtaaatgcaatacctaaaagtatgttccatattacaccattaataactccaatcagcactaaaacaattaaaagcggaaatagaaaaaacacattaaacatggcaataaactctctgcccaaaaagcgaacaagagcaatttcatctttaaacatatttactccttatagtaatcttaattaactatatccctcttgcttttaaataattctccactgtatccacaatcgcttgtgtttgtggatcgatttcgatattcactaaatcaccaatttggcgtttacctataagtgttcggtgtaaagtttcaggaattaaattcacgcagaattcatcgtctttcacttcaccaatagtaagactgatgccgtcaatggcaataaatccttttgttaggatatatttcatcacgtctttagtaggtaatttaaaccaaacctgacgattattctcgctttcaataatttgtgaaacacttgcggtacaataaacgtggcccgataaaatatgcccaccaatttcagcgcccatttgcattgcacgttcaatattgacaaaatcccctgcttttaagctgccgagattggtgatgcgcaaggtttcctgcattaagtcaaagctcacaagatcaccatgaatttcagtcaccgttaagcacacgccattatttgccactgatgcaccaatttctaagccttttcgcatttcagctggtaattttacgatctgtattctaaaattatcgctgtctttaattgcataaatttgggcgatgccctgtacaatacctgtaaacattattattccttcattaaaaatttttccaatattatagcaaaatttatgaattctcgtcttttttctcaataccgtattgatattaaaaaacttatccgaattgcgacacctatcggacttgcccagttagctcaaacaggcatgggcaccgtggatgtgattatggcggggcgtgtgagctcggctgatgtaggaggtgtcggtattggtgcctccatttggctacctttggtacttttcgggcaaggattattactcgccttaccaccaacaatttcctatttaaatggatctgggcagcgccatcgcattgctcaccaagtgagacaaggcctttggatttcatttttagtgatgattccccttgcactcatcatctatcataatgatttcatattacagtttatgaatatggatgcccacatggcagatgtgacgatgaattatttgcgtgcgatggtgtggggcttgcctgcctatttattgctgattaatttccgctgtttgaatgatgg

SEQ ID NO: 3191 - DNA, 16135 bp, synthetic construct
  misc_feature 1..16135: note = Synthetic
  source 1..16135: mol_type = other DNA
ataataaaaattaagcgggagtgtaccagctttataaggcgtaataatcgtatttaatgatttaataaagccatccgatagctgctcggcttgaatcgctaatgcaaggcttttggcatgtcttgcacgactttcatctaaggttgaaagttctctaacagacatttttaagcctccactaaaatcatcaaattgaatagagccagtggcgataacaatctgatctttttgcaaaagtgcaccataggtttctaatgcttcagaaaagagtgtgatatccaatttacccgaacggtcttcaatggttccaatacctaaacggcttcctcgcttggtggtggcaattcgtgcattgacgataatacccgctacagttaccatctgcccacgtcgtgtaggttgtaactcatttaagcggataggtgcatagtgagacaactcttttaggaatcgtccaataggatgaccacttaaatataatccgagcgtattgcgttcaccttctaaaatcacttgttctgacagcttaggtgtattggcatatgcatcttgcacttcttctggcgtttccgtaagcaccccaaacatatcgctttgacctaatgcttccattttgctgtgttgatcggaagcttttagcgcatcttcaagattttttaataaggcagctcggtgtgggcctaatttatcaaaggcaccagacataatcagtgcttcaaaagttcggcggttaatctttttcagatcaacgcgtgcagtcaaatcgaaaagatctttgaaaatgccatcttgacgagcttcaagtaaggcttcgattgggccttctcctacgcctttaattgcgcctaatccgtaaacaatttcacctttttcatttacactaaagcgatgttttccagtattcacatctggtggcacaatggtcaatcccatattcatgcattcatcataaaggctcacaatcttatcggtgttatccatctcagatgtcatcactgcagccataaattctgcaggataatgggctttcagccatagagtttgataagaaaccaatgcataagcagcagagtgagatttattgaacccataacctgcgaatttttctacaaggtcaaagattttcatggctagattgccatcaatccctttgttaattgcacctttttcaaaaatttctcgctgagccgccatctcttctggttttttcttacccatagctcggcgtaataaatctgctccacccagcgtgtaaccagcaagctcttgcgcaatttgcatcacttgctcttggtaaacaatcacgccgtaagtcggttcaagaattggctttaagcattcatgttgatattgcgcatcagggtaggaaacttcttcaataccgtgtttacggtcgataaagttctgcaccatgccagactcaagcgggcctgggcggaataaggctactaacgcgataatatcttcaaagcagtccggtttaaggcgagaaattaagtctttcataccgcgcgactctagctggaaaaccgcagtcgttttggcctctaataagagtttaaaagatttttcatcatctagtggaatgctttcgattcgcacaagtggtttaccttcgcgtgctaatcgcgcgttaatcatctctagagcccacttgatgatagttagcgtacgcaatcctaagaagtcaaatttcactaggccagcatattccacatcatttttatcaaaatgtgtgacgggatgcataccttcagaatcacaataaagcggtgaaaaatctgtaatcgcagttggtgcgataaccacgccgccagcatgtttaccagcgttacgggtaaccccttctagcttacgagccatgtcgatgagatctttaacttcttcatccgcctcatataattcgcctaacttaggttctgcttcaaacgctttactaagggtcatgccgggatcaggcggaattagttttgagatgcgatcaacaaagctataaggatgaccaaagactcgccctacatcgcggataactgcttttgcagccattgtgccaaatgtaatgatttgtgatactgcctgacggccgtaagtatcagcaacgtgttcaatcacctgatctcgaccatccatacagaagtcgacgtcaaagtctggcatggatacccgttctgggttgagaaaacgctcaaagagtaaatcaaactcaagcggatctaaatcagtaattttaagggcgtaagcgactaaagaacctgcgccagagcctcgtcctgggccaacaggaatcccattatcttttgaccactgaataaattccatcacgatcaagaaatagccagggaaacccatttggttaattacatcaagctcaacttgcaaacgttcgtcataaacagaccgcttgtctgcacgttctttgggatcaggaaataagaattccaagcgttcttctaaaccttctttcgattttttcacaagaaaatctgcggtagagagttcgcctgttggaaaattgggtaagaaatactcgcctaagcgtacgtttacattacaacgttttgcaatttgtacgctattttcaaccgcctgtggtaagtcggcaaacagtgcgcacatttcttcttcgcttctaaaatattgttgagcagagtattttttagggcgtcttggatcgtctagtgtgtagctatcatgaatggctacacgaatttcgtgcgcatcaaagtcatcctcttttaagaacatgacatcattgactgcaactagcggaatttggtgcttttgggaaaagggaacaaccgcttgaatatagcgttcttcatccgttctgcctgttcgacaaacagaaaaataatagtgatgaggaaaatgagtttgatagaaggctaataactcttccgcttcagcctcattttcttttagtaagcttttgcctacatcgccatttctgccgccagaaagaacgatgattccttcgtttcgttcagcaagccaagctttttccacaatagggaattccatatagccttgctgataggcttgcgaaagcaatagcgtgatattgtggtagccagtatcgtttttggctaataaggtcaactcaaaaatttcttcactgtctggattggcacgcatataaatatcggccccgataatcggttttaatccgctgctcagtgattcaccataaaatttcactaaaccgcagaagttagtaaaatccgtgagtgccattgccaccattttttggttaacagcagtttttactaagggcttaactttggcaagtccattgatcatggagaaatcactatgaacttgaagatgaacgaaacgaggagttgacatattttcttatttaaaaaagaccacgaaagcagggctttcgtggtttgtgggttaatcacgtttttttgctagtagccaccaaacaatggttaagcagattaaacttggtatgagcgcaccgataaaggttggaatccaggtaaagactaacgtcatattcccgaacgtaatgttggatacgtagaatacgaaacccgcgataataccgataaatagcttagttcccattgcactactgcgtagtggcccgaatacgaaggaaatggctaacaacatcatcactgccattgaaattggctggtaaagcttgcgccagaacgcaatttcaaagcgttttggatcttgcccggtttcttttaagaaaccaacgtaatccgataaaccggaaatagaaagagattcaggtttcagggaaacgatgcctaatttgcttggcgtaatagtcgtgtgccacgtttgatctgcgcctttagtttgttcaatctgattatcactaatcgccgatttttctacgttttgtagttgccagtgattgtctgcatagattgcgcgttccgcttgggtaacggcttttagtgctttgttatcaaaatggtaaatcgagatatgatttaattctctttcattattgatatggcgaatataaataaaatcttgcccatctttagcccagaatcctccagttgtggctaacattgagccaccgctttgtgcgatggaacgcatatttcgcgcatattgttcggtttgtggaatgccccattcacttaaaaacatggttaagaaaataagtggaagagcagttttcatcaccgctaagccaatacgaaagcgagaaaagcctgatgcttgcattaccactaattcactacggctagcaaggttacctaaacctagtaaaccaccaattagcacaacaacgggaataatttctttaatatcgctaggtaacattaacagcgcataataagttgcagaaagtccatcataactgcctttgccaacatctttgaattcttctactaatttaacgataaaaattaaaccgctaattgctaatagcacagcaaaaatactgcctaaaatacttttaccgatgtagcgctcaagaatattcatacctaataatttcattatgcccccgtctttttcaagctaaagcgataacgaaccgctgaaatgaatttgctgtcccacgcattcatgatgatgcctaatactaaaaagaatgttgaaaccaaaggcatccaaattgtggtatctaattttcctgatgcacctgctgatttgagcgagctttgtagcaagaaataaataagatagagcaacactgctggaataactttagcaaatcggccttgacgtggattcacactactcattggtacggctaacattgccattaatggtacggctagtactaaagcaaaacgccattgtaattcagcttgtgcttctggagacttatcgttaatcaggctgctaaaggttgctcgttgcatcaacttctcactagaattgacatcttgataacctaaataggcagtatatttttcaaaatgcgcaatgcggaaatctgctgttgtggctgtcccttcgtaacgagtactgttttttagcgttaaaagttgatcaccattagataagccttgtagctcgcctttgcttgctactacaacagatggacgatttttcttttgttgatccggctggaaaacataaatatcgttaagggtatttgcctcattattgatgctttcaataaatagcacataaccacctgcactcataaattggcctgcagataaagcagaaaaacggggattagattttgcctctgctaacattttactttgagtatcaattgcccacggcgtcagcgtaaagacgttataggctgccaatgctgtcgtaaaaatagataagaagagagcgactttagtcagcaaactttgccctacaccgcaagcacgcatgacagtaatttcactttcagcatagagtctgcctaaggttagtaataatgccacaaacaaggagagtgggagcataaattgtgataatgccggcatacctaaacctaataggcttaataccaaatccgttgggattttgccgcttacagcggaattcaacacgctaatcagctgttggctaaaaaacatgagtaagagaataaacaaaatagccagctggcttttgaaaatctctttagtaaggtaacggcttaaaatcacagtaataatctctttgctatattttcttaaatagtgcttgcaattttttggcaagtcggtagctttatgaccgaataaaatctgttaggttcgctttctatgccattggcagaaagcgacaagcggtcggattttgccaattatttgcaaaagtggaaaataacgtttttaaacggcatattttaccgctttaagcggaaaaaatcacgggagtatttatggaatttttagtaaaaaatggcagtgttgagaaacaacgaacagcatgcttaattgttggggtgtatgaatcccgtcgtttatctgctgcggcacaacaattagataaacagagcgaaggttatctgagtcaattattacgtaaaggtgatttagatggcaaagtagggcaaacattattgctacactatgtgccaaatgtttctgctgatcgcgtattgcttgtaggttgtggtaaagagcgagagcttacagagcgccaatataaacaaatcaaccaaaaagccatttcggtgttaaatgaaactggcgcaacggaagcggtttcttttttaagtgaattgcacgtaaaaggtcgctcagtttattggaatgttcgttttgcgattgaagcgattcaagaaagtctttaccgttttgtggaatttaaaagcgctcaaccagaacaacgccgccaattacgcaaaattgtttttaatgtagaaagccgtaaagcattggcagaagctgaacaagcattgttacatggtaaagcgattgcaacaggggtaacttttgcgaaaaatatcgcaaattgtccgccaaatgtgtgtaatccagcttatttagcaacccttgccaaaaatttagctgcagattatgagatgattgaaacacaaattattgatgaatctgaaatggcatcgcttggaatggagagctatttagcggtttctcgcggttcggcaaaccctgcttatttatcggtaattaaatatcaaaatcaccctaatccaaatgcaaaaccgattgtgttagtgggtaaggggttaacatttgactctggcggtatttcaattaagccatctgaatctatggatgaaatgaaatatgatatggggggtgcagcatctgtttatggcacaatgaaagcattagcggaaatgaatttaccgttaaatgtgattggggtgcttgctggttgtgaaaatatgccggatggcaatgcttatcgcccaggcgatattcttaaaaccatgaatggtttgaccgtagaagtattaaatacagatgcagaaggacgtcttgtgttgtgtgataccttaacttatgtggagcgttttgaacctgaagcggtgattgatattgcgactttaaccggcgcttgtatgattgcattaggtacacataacagtggtttgatgtcaacacaccatccgcttgcgcatgaattgttaaatgcagctacagaatctgatgataaggcatggcaattaccgttaggcgaagagtatcaagcgcaattaaaatcaaactttgctgatctagcgaatattggcggtcgattaggtggggcgattacagcagggcaattcttgtctaactttactcaaaaataccactgggcgcatttagatattgcgggaacggcatggaaatctggtgcggaaaaaggtgctactggcagacctgtaccattgcttactcaatatcttatcaataaatcccattctgcatagtcctaattttaagccttctcattgagaaggctttcgattagaaattctaatgattaaccctaaattatatccactacgaagcaactcaaaatatgatgtagatcacattgttttaggacataagttgctatgatcttttcaaactaaataaaactgtaaatcaggagtttatatgaaagatgttcgtgttgaagtggatttattaggcgaaagagaagttccaaatgatgcctattgggggattcataccttaagagctattgagaactttaacatttcccgcaatacaatttcagatgtacctgaatttgtgcgtggtatggttatggttaaaaaagctactgcattagctaatggcgaattaggcgcaattccagctaagattgcagatgcgattgtaaaagcttgtgatgaaatcttaaaaaatggtcgttgtttagatcagtttccatcagatgtatatcagggtggtgccggtacttcagtaaatatgaataccaatgaagttgtagcaaacttagcattagagcttttaggttatccgaaaggcagctatgacatcatcaacccaatggatcatgttaatgcgagccaatctaccaatgatgcttatccaacaggtttccgaattgccgtatataacagtattttaggtttgattcaaaaagttcgctatttacaaaaaggatttgaagcaaaagcgactgaatttgcggatgtattgaaaatgggacgcacccaattacaagatgcggtgccaatgactgtaggccaagaattcaaagcctttgccgttttattagaagaagaggttagaaaccttaaacgcacagcgaaattattgctagaagtgaatttaggggctactgcaattggtacgggcttaaataccccgaaaggctatccggagttagccgttaaatatttatcagaagtaaccgagttaccttgcacactttcagaaaacttgattgaagccacttcagactgcggtgcttatgtgatggttcatggtgcattaaaacgtaccgcggtgaaactttctaaagtttgtaatgacttacgcttgctttcatctggccctcgtgcaggcttaaatgaaatcaacttacctgagctacaagctggctcttctattatgccggcaaaagtgaatccggttgtgccagaagtcgtaaaccaagtttgctttaaagttatcggtaatgacaccactgttacctttgcggcagaagcagggcaattacaattaaacgtaatggagcccgtaattggtcaatcaatgtttgaatctatttctctattgaccaatgcatgtgtaaacttacgcgataaatgtattgatggtattacggttaaccgtgaaatttgtcagaattatgtctttaattctatcggtattgtcacttatcttaatccatttattggtcaccataacggggatattgttggtaagatttgtgctcaaacaggtaaaggcgtgcgtgaagttgtgctagaaaaaggtttactcacagaagccgaattagatgatattctctctgtagagaacttaatgaatccaacttacaaagcaaaattaaataaataactacataataaaagggagcttagctcccttttttaataatttattcaaaatcttcatcagaataaaactgttcttttccagcttttatcttttttagtttttctacacgcattctattttcgctcattaaacaataatgctctcctaatccagggtcaacaagagcacatttactatttcgataacgaatccaagctttttgaaaggtttctagtccttttaaatcatagttaacttcatttaaatctgagttttgctttatctgtctggtgatttctttatatagctgattaatttgttttttatattgttcagaggttgagtctatgcaataacttacaatagcattattgatgccagcttccggatcttctttttttaattctttaatcgtttcatcaagacattgtgagtaaacatcttgactaaggttacttttttccgttgaataaaaaagttcatctcctacctttatcttttttagcttctctatacgttgttcattctcattcattaagcaagaaagattttgtaatcctgaattaaaaagcgcacatttattatttcgatactgaatccaagttttttgggcagtttctaattgactcaattcatcagtggcatcatttgaatttgttgcttttttaattttttcggtaatttctttatataacttgttaattttttgtttgtatatatatgaggtgtattccatacaattagctacaatagcattattgatgttagcttcaggatcttctttaatagtttcatcaatacattgtgaatagatatcttttccactattgagatcgacagatatattcccttcattagcgagtaaaggcgagcaaagccagagaatagctaatgtggtaagttttttcatagcgtccttccttaaataaaaaagatgccccttaaaaccgaaattttaaggggcagagctttgcgagaaattcatctcttattgtaacaacgtttttcatttcgcagtgctattacaatgaggaaattctatcgttttatttttttatcgtcaatctactttttttgcaaaaagttgataaaatttaactgcttacttctacataaggaataaatttatgaaaaacacttctttaaattatgtacttggtctagacctcggtatctcctctgtaggttgggctgtagttgaaattgacgaaaaagagaatcctctgcgtttaattgatgttggtgtacgtacttttgaacgagctgaagtgcccaaaacaggtgaaagcttagcacttgctcgccgtttagcccgctctgctcgtagattaactcagcgtcgcgttgctcgtttgaaaaaagcaagacgacttctaaaatcagaaaatattctattatccactgatgaacatcttcctcatcaagtttggcaactacgtgttgaaggtttagagcgcaaacttgaacgccaagaatgggctgcagtgttattacatttaattaaacaccgaggctatttatctcagcgtaaaaatgaaagtaaaagcgaaaataaagagctaggcgcgctattaagcggtgtagccaataatcataaattactgcaacaaactacatatcgcacgcctgcagaacttgctgtaaaaaaatttgaggtcgaagaaggtcatatccgtaatcagcaaggttcatatacccatacttttagccgattagacttactctccgaaatggagctgcttttctctcgtcaacaacacttcggtaatccattcacttcagaaaaattattagaaaatttgactgcacttttaatgtggcaaaaacctgccttatctggtgatgctatcttaaaaatgcttggtaaatgtacttttgaaaatgagtacaaagcagctaaacacacttattccgcagaacgttttgtttggataacgaaattaaataatttacgtattcaagaaaatggcttagagcgtgctttaaatgataatgaacgtttagcattaatgaaacaaccttatgaaaaagctaaattaacttatgcacaagttcgctcaatcttaaacttatctgatgaggcaatctttaaaggtctccgttattctggtgaagataaaaagaccagtgaaaccaaaacagtactgatggaaatgaaagcttaccatcaaatccgtttagctttagaaaaaaatgatttgaaaacagaatgggctgaattaaaggttaattcatcattgttagatgaaattggcaccgcattttcattatataaaacggatgaagacatcagcacttgcttagctggaaaactctctcagcctgtattaaatgccttattggaaaatcttaattttgataaatttattcaattatctcttaaagctttacataaaattctaccattaatgcagcaagggctacgttatgatgaagcttgtgctgaaatttatggcgatcattatggtaaaaaaacagaagaaaaccatctattattgccacagattccagctgatgaaatccgtaatcctgtggttttacgaacattaacacaggctcgtaaagtaattaatggagtagtgagattatatagttcgcctgctcgtattcatattgaaacaggacgagaagttggcaaatcttaccaagatcgtcgtgagctagaaaaacgtcaggaagagaatcgtaaacagcgtgaaaaagcaattagtgaaattaaaacattattccctaatttttctggtgaaccgaaggccaaagacattttgaaaatgcgcttatactatcagcaaaatgcgaaatgtttatattctggtaaacctttagaattacaccgtttgttagaacaaggttatgtagaaatagatcacgctttaccgttttcccgtacttgggatgatagctttaataataaagtgctagtgctggctaatgaaaaccaaaacaaaggcaatctaacaccttttgaatggcttgatggtaaaaataacagcgaacgttggaaagcattcaaagcattggttgaaacgagtgcattcccttatacgaaaaaacaacgcatcctaagccaaaagcttgatgagaaagggtttattgagcgtaacctaaacgatactcgctatgttgcccgtttcttgtgtaactttattgcagataatatgcacttaactggcgaaggaaaacgtaaagtatttgcttccaatgggcaaattacagctttacttcgtggccgttggggattagcaaaatcacgtgaagataatgatcgacatcatgccttagatgcggttgtggtggcttgctccacagtctcaatgcaacaaaaaatcacgcgttttgttcgctttgaggaaggtaatgtatttacaggtgagcgaatagatcgtgaaacaggtgaaattatcccattacatttccctgcgccatggaaatttttcagagaagaagttgaaatccgtatttttagtgataatccaaaacttgagctagaaaatagattgatagctcgcccacaagcaaaccatgaatttgtacaaccgctatttgtttctcgtatgccaacacgcaaaatgactggccaaggacatatggaaaccattaagtcagccaaacgtttaaatgaaggattgagcgtcattaaaatgctattaactaaattgagattaaaagatttagaatcaatggtgaatcgtgagcgtgaaaaagaattatatgaagcgctaaaagctcgtctagaggcctttaatgatgaacctgctaaagcgtttgctgaacctttcatgaaaaaaggtggggctattgttaaatcagtgcgagtagaacaagtacaaaaatccggcgtattagtccgtgatggtaatggtgtggcagataatgcttctatggtaagagtagatgttttcactaaaggtggaaaatattttcttgtgccaatttatacttggcaagtagctaagggtattttgcctaataaagccgttattcaaggaaaaaatgaagaagattgggaggtaatggatgatgcgacgtttagattttcattacaccaaaatgatttagtaaaattagtcactaaaaagaaaactatttttggctactttaatgggcttaatcgtgccacaggtaatattgatattaaagagcatgatttagaaaagtctaaagttaaagatggtattcatcaaagtattggtattaaacttgctctttcttttgaaaaatatcaagtagatgagcttggtaaaaatattcgtttatgtaaaccaagtaaacgccaagctgttcgttaattgcttaaaatccccatacgtattgtacgtatggggattttttgtaaggagtcatgatgacatggagaagtattttaattagtaaagggggaaaactctctttacaacagcaacaaatgcttattcagcaagaagggcatgaatttactgtaccacttgaagatattgccattgtggttgtagaaagccgagaaacagttattacttttccattgctttctgcatttggtttatatggcattacattattaagctgcgatgaacagtttttaccttgtgggcaatggctgccctttaatcaatattatcgtcagttaaaaacattaaagctgcagctagaagcaagtttgcctctcaaaaaacagctctggcagaagattattcaacagaaaatccgtaatcaagcaaaagtgttgtcgctttgcaactttcaaaaaaaatctgaccgcttgcttcagttagcaaaccttgttaaatcaggagataaagataaccttgaagcacaaagcgctgttatttattttcctcaattatttggtgcagggtttaaacgaaaaacagaagagagtgctattaatgctcatcttaattatgcctatacgatagtgagatctgcagttgctcgtagtttagtgctttatggttggttacctcaattagggattttccatcataatgaattaaatgcttttaatttagcagatgattttattgagccttttcgcccggttgttgatttactggtgtgcgattttgtaatgaaaaaacagttgccatcatcacttagtccaacctcaaaacaaaaattaattaagattttgcattatcagctgctttttaagcaagaagaagtgagcgttttaaccgcaattgataaaacaatcgcatcttttcaagctgcgttaagccagaaaaatgcaactttattacaactcccggagatctgcgaattacaggagtatcaatatgagtaaggagatatttatgcgtatgatcgtattatttgatttacccgtgacgactaaagctaaaatgcgagctgcaaaccaatttcgccaatttctattaaaagacggttatcaaatgttacaactttctatttatactcggattattcgaggtcgagatgcgatggaaaaacatcataaaaggttagttactcatttgccagaagaaggttcaattcgttgtttggctattacagagaaacaatttgcgaatatggaaattttagttggtgagcaaaaacttcaagaaaaaaaggtcaattcagatcaattattacttttctagcccgattttaaaaagcataaaagagccccgaaaccttgcggtatggggcttttaaatgtcccaattatagcactgcgaaatgaaaaagggagctacaaccttgcggcggttgagttttttatggctgctattatagcactgcgaaatgaaaaagggagctacaacggggcgtttagcaggacttaatcaatgagaattatagcactgcgaaatgaaaaagggagctacaacccatctcttgatgggaatgaagtcgtataaattatagcactgcgaaatgaaaaagggagctacaacatcatctaaaaagatgctatttagcacacaattatagcactgcgaaatgaaaaagggagctacaacctggtctaaattcgtaaatatagtattttcattatagcactgcgaaatgaaaaagggagctacaactatataccaatagttcatacatacaaaacaattatagcactgcgaaatgaaaaagggagctacaacctaaaatcataaagcctagcataactgtatattatagcactgcgaaatgaaaaagggagctacaacttgccgacgcaataggctttactgccggttattatagcactgcgaaatgaaaaagggagctacaactaagcttgtcggcgtactcaggcgttttaaattatagcactgcgaaatgaaaaagggagctacaacatgctctcaaaccattgcaagctcacatctattatagcactgcgaaatgaaaaagggagctacaacacagagttatgtattacctcaaaatgcggcattatagcactgcgaaatgaaaaagggagctacaacgacatttcgcctttagggcgattggggtctattatagcactgcgaaatgaaaaagggagctacaacttgcacgttttcaaatagcactgcagtttgattatagcactgcgaaatgaaaaagggagctacaactaaaacattatggctattatgtgcttgctgattatagcactgcgaaatgaaaaagggagctacaacttaaatgaggctctgtttcgtctaaatgaaattatagcactgcgaaatgaaaaagggagctacaacatttatttgtgaatatccatatgaacttaaattatagcactgcgaaatgaaaaagggagctacaactgcttgcctgatggtgagttggttagtcaaattatagcactgcgaaatgaaaaagggagctacaacctgctcacatcaataacgcgcttaatcagcattatagcactgcgaaatgaaaaagggagctacaactgatagccgcgtcgcaagcaacccgatttaattatagcactgcgaaatgaaaaagggagctacaacagcaatggcgtttaattgttcttgtgccttattatagcactgcgaaatgaaaagggattccaatcaacactttattgcaaacaagcggtcaaaattgaccgcttgttattttttattatttacttgctttacaagaaaggaaatagtaagcagcaaaactgagaatcgtacaaagtgccatggcatagagcattgggcgttcgctttggatttcaaagccagaaagcaagaagcctgcgagtgagccaataccaaatcgagcggtgcctgcaatagcattagctgtgccagccatttctggatagcgttctaaaatagcggcggtgg

SEQ ID NO: 3192 - DNA, 15945 bp, synthetic construct
  misc_feature 1..15945: note = Synthetic
  source 1..15945: mol_type = other DNA
tcttttcctcggggtacttagatgtttcagttctcccggtttgcctcacacagctatgtattcactgggtgatagtagattcttcatctactgggtttccccattcggatatcttggattaaacgcttcttatcaactcatccaagcttttcgcagattagcacgtccttcttcgcctctgattgccaaggcatccaccttgtgcgcttagtcacttaactatacaacctcaaatgttttcatttaaacaaatcaaatgaattgatttgaagcgatattattcaactaaacacttgagtgcttttgttcactcaagattttttactactcagactttctttcgaaaatctctcagtttttcagcttgtttctcaatttttaaagaacataagacaataaaaatcatctttaaatggcgtccccacggggattcgaaccccggttaccgccgtgaaagggcgatgtcctaggcctctagacgatggggacaacatttaaagatgctttccactttgccattttcgggttaaatattctagccacttttgcaatatcttgcaagattatgaccgcttgaatgcctaactttcattcatctcttgtcctgcacttatctatcaaacaatctgtgtgaacacttgctgtcgttacagctccacttcgctctcgcttagcttcacccttgatttttggtaaggaggtgatccaaccgcaggttcccctacggttaccttgttacgacttcaccccagtcatgaatcataccgtggtaaacgccccccttgcggttaagctatctacttctggtacaacccactcccatggtgtgacgggcggtgtgtacaaggcccgggaacgtattcaccgcaacattctgatttgcgattactagcgattccgacttcatggagtcgagttgcagactccaatccggacttagacgtactttctgagattcgctcaccatcgctgggtcgccgccctctgtatacgccattgtagcacgtgtgtagccctactcgtaagggccatgatgacttgacgtcatccccaccttcctccggtttatcaccggcagtctcctttgagttcccgaccaaatcgctggcaacaaaggataagggttgcgctcgttgcgggacttaacccaacatttcacaacacgagctgacgacagccatgcagcacctgtctcaaagttcccgaaggcacttccgcatctctgcagaattctttggatgtcaagagtaggtaaggttcttcgcgttgcatcgaattaaaccacatgctccaccgcttgtgcgggcccccgtcaattcatttgagttttaaccttgcggccgtactccccaggcggtcgatttatcacgttagctacgggcaccagagttaaaccccaatccccaaatcgacagcgtttacggcgtggactaccagggtatctaatcctgtttgctccccacgctttcgcacatgagcgtcagtacattcccaaggggctgccttcgccttcggtattcctccacatctctacgcatttcaccgctacacgtggaattctacccctccctaaagtactctagactcccagtctgaaatgcaattcccaggttaagcccggggatttcacacctcacttaaaagtccgcctgcgtgccctttacgcccagttattccgattaacgctcgcaccccccgtattaccgcggctgctggcacggagttagccggtgcttcttctgtagttaacgtcaattgattgttctattaaaacaatcaccttcctcgctaccgaaagaactttacaacccgaaggccttcttcattcacgcggcatggctgcatcagggttccccccattgtgcaatattccccactgctgcctcccgtaggagtctggaccgtgtctcagttccagtgtggctggtcatcctctcagaccagctagagatcgcgggcttggtgagcctttacctcaccaactacctaatcccacttgggctcatcttatggcaggtggccaaatggtcccaccctttagtccttagacattacgcggtattagctaccgtttccagtagttatccccctccataagccagattcccaagcattactcacccgtccgccactcgtcacccaaggagcaagctcctttgtgctaccgttcgacttgcatgtgttaagcctgccgccagcgttcaatctgagccatgatcaaactcttcaattcaaaaagtttaatcgctcaatatgtactgacataaaaatcgcactccaaaatcaactaaaaagttaattaaagagaaaatgaatttctagttaagcacctattaagacttcaaaattaaaaatagttttaaaatcaagtcaatcaacaagtgcccacacagattgtctgataaatttttaaagaacaaaataaaacgacgcactgcaatctaaacaaaccgttcacaacagtgcgtcgttgtgtggtgcgtattatagggaaaaataaaatgaacgcaagcaaaaattgtaaaaaaattgaaaaatattaccgcttgctttgtttttatgcagctttgcgattttttattcaatttcataccgcattactcaaaaaatgatgccccttgcagccgaaactgcaaggggcagagcattacggtaattctttcgaattccttattgtagcaacgtttctcatttcgcagtgccactcaaaatattctagccaccctataatttttgtcaacaaaaaaatcattttgtggtaaaaatagcctattctttgttttggagaaatcgctatgcaactcagcaaattaaattacattcttggtttggatttaggtatcgcctccgtaggctggtcggttattgagattgatgaaactgaaatgccaattcggttaattgatgtcggcgttcgtacctttgagcgtgccgaagtgccgaaaacaggggaatcgttagcactggctcgccgtcttgcccgctcaacccgccgtctaattcgccgccgtgcgtttcgtctgctaaaagccaaacgattattgaaaaatcatcagattgtaagtgcagatgaactatcaacattgcctaatcattgttgggaattgcgtgtaaaaggcttagatgaacgcttaacctgccaagaatgggcggcagtgttacttcatttgctgaaacatcgtggctatctctcgcaacgcaaaagtgaagctcagaatgccgataaggaaatgggtgcattgctttcaggcgttgcaaataaccataaattgctgtctgaaaatcattaccgtacccctgctgaaatcgccgtgaaaaaatttgcacttgaagaggggcatatgcgtaaccagcgtggggcttatactcacacctttaaccgcttagatttattagcggaaatgcggctgctattccaaactcagcgagaactaggcagcccttatgcaagcggtgaattagagcaagaattttgcaaattgctgatgtggcaaaaaccggcgttatccggtgatgcgattttgaagatgttggggaaatgtactctcgaacctacggaatataaggcagcaaaaaatacctacaccgccgaacgtttcgtttggctgacaaagctcaataatctgcggattttggaaaacggctcagaacgtgccttaaatgcagatgaaagagccttacttctcaatcaaccttacgaaaaagccaaattcacttatgagcaggctcgcaagttattacaactgaatgaagctgcacgtttcaacagcgttcgttacggtaaagaaaatgccgaaaaaagtacattaatggaaatgaaagcctaccacgctattcgtaaagcagtagaaactgccgatagctctgcgtgggcaacactgaaaactcagccattactgcttgatgagatcggcacggcattctccatttataaaaccgatgaagatatcaaaacgcaactccaaggcaaattagcagataatgttattgatgtgttattggaaaatctcaattttgataaatttatccaactttcactcaaagcactctataaaatcctaccgctgatggagcaagggctgcgttatgatgaagcatgtagccaaatctacggcgatcattttggtaaaaaggagcagaaaaatgaccgcttgctaccacagatcccagccgatgaaatccgaaatcctgtggttttacgcaccttaagccaagctcgtaaagtgatcaacgccgtgatccgcctctacggttctccggctcgtattcatattgaaactgctcgtgagctaggaaaatcctataaagatcggaaagaaattgaaaaacgccaagagcaaaaccgtgctgaacgagaaaaggcggtggacaaattcaaagagctgttcccgaattttattggtgaaccaaaagctaaagatattctgacgatgcggctttacgaacagcaaaatggacagtgtttatatagcggaaaatcgcttgatttacaccgcttgctggaaaaaggttatgtagaaattgaccacgccctgccgttctctcgcacttgggacgacagctttaacaataaggtgctagtgcttgctggtgaaaaccaaaacaaaagcaatcaaaccccgtttgaatggctaggcaaagatgaacagaagtgggcattgtttaccgcccgagtaaacagctgccgtttcccttactcgaaaaaacagcggattttaaccaagaaattggacgatgaaggctttattcaacgcaacctcaacgatactcgctatatcgcccgctttttagtgaatttcgtcaatgacaatcttcatttaaccggcaaaggcaaacgccgagtgtttgcctctaatgggcagatcaccgcctttttacgtgggcgttggggattaaccaaagtgcgtgaagagagcgaccgacaccacgccttagatgcagtggttgttgcctgttctacggtttcaatacaacaaaaaattacccgctttgtgaaataccaagaagggaatttgcagacagcagaacggattgaccgtgaaaccggcgagatcattccgctgcatttccctgatccttgggcgtttttccgagaagaggtgatgatccgcattttcagtgaaatgccacaggaagatctggtaatcaaactacccgatcgcccgcaggcaaatcacgaatttgtgcaaccgttgttcgtctctcgtatgccgacccgtaaaatgagtgggcaggggcatatggagacgattaaatcagcgaaacggcttgatgaaggcatcagtgtttccaaagtgccactcactcaactcaaattgaaagatttagagaatatggtcaatcgtgatcgtgaaattgccctttatgaagccttaaaagcccgtttaaccgaatttaaagacgacccagccaaagcctttgccgagccgttctataaaaaaggcggcgtgcaagtcaaatcggtacgagttgagcaagtgcagaaatcgggtgtagtcgtgcgtaacggcaatggtgtggcggataatgcctcaatggtgcgagtagatgtctttattaaaggcggaaaatacttccttgtgccgatttacacttggcaagtggcaaaagggattttgccggatagggctgttatcgcttatacacctgaaaatgaatgggaattaatggatgattccgctcaattccagttttcaatataccctaatgatttaatcaaattaacaacgaaaaaagctattttctttggatattactcaggttttaacagattaactggagcaatcaacattaaagaacacgacctacaaatatcaaaaggcgataaaggtgttcatcttggattaggtgtaaaactcgccctttcccttgaaaaataccaagtcgatgaacttggcaaaaatatccgcccttgtcgtccaacccaacgacaaaacgtacgttaaacccaatccctgtactgctcagcagtacagggatttttttataggagatatgaaattatgagctggcgaagcattttaatcagcaaaggcggcaaattatcactgcggcaaaatcagatagtaatttggcaggaggagcaggaattttgcgtgccgctggaagatattgcggtgatcgtgattgaaagccgagaaaccgtcattaccaccccattactctccgccctcgccctaaacggcaccacccttttaacctgtgacgaacagtttatcccttgtgggcagtggctcccattcgggcagtatcaccgccaactgaaaaccctcaaactgcaactggaaatgagccaaccgctgaaaaaacagctctggcaggtcatcgtgcagcagaaaatccgcaatcaagcctttgtgttagcccaaaccaagcggtcggatatggcggaaaaattgcaaaaaatggcaaaccgagtgaaatcgggtgataaggaaaatctcgaagcccaaggcgccctgctctatttccaaaccgcattcggcagcgatttccgccgctggcaggagaatgcgattaacgcccaccttaactatgcctacaccgtgctacgctcggcggtggctcgttcactggtgctttacggctggctgccgacactcgggttgtttcatcacagtgagctcaatccgttcaaccttgccgatgattttattgagccgttccgaccgttagtagatttaatggtctggcaactgtggcaggaagataaactcagcgacaccttaacaccccacaccaaacagaaattgattgggctgctgcattaccaaatgcgatttcaagcccaaaccttcagcaccttggcagccatcgatcgcaccgttagctcgctgcaagcggcaatcagccaacgcaatgccgagctgctgaaactccccgaaatgctacccttaaaggaacaccactatgagtgaggcgatatttatgcggattattgtcttttttgatctccctgttaccacccgagccaaacgcaaagccgccaaccaattccggcaatttctactcaaagacggctatcaaatgttacaactttcggtttacacccgcattgtgcgaggacgggattcactggaaaaacacaataaacggctgacagaacatctgcccgaagaagggtcgatacgctgcttggaagtgactgaaaaacagttcgcttcaatgctgctcttagtcggcgaattaaaaccgcaagagaaaaaagtgaatgcaaatcaactgctacttttctaacaaattgaggaaagaaaacagtggctatgctacataaaataaattgttcgattgccgaaattttattcagcacagcgagctaatttcacactttttggctaaaaaccaccaaaaacaagcggtctatttcaagaaaaaatctgcaaaatcttgcaaaaattttcccaaaatagaccgtttactcagaatttttttgcgttttttctcaaagagaaaactcgctaaaaccttatcctatcaggctttgagaccgctcgattgtagcactgcgaaatgagaaagggagctacaactgaaaatgctcaactttaaaaccattttgaattgtagcactgcgaaatgagaaagggagctacaactaaaagactttcctgttgatgattataaagattgtagcactgcgaaatgagaaagggagctacaacaaacaaattataaagtatttatactaaaatattgtagcactgcgaaatgagaaagggagctacaactcatatatccaacttatttgctttatgtttattgtagcactgcgaaatgagaaagggagctacaactaagtcgtttagatggaaaagaaatattccattgtagcactgcgaaatgagaaagggagctacaacaaataaaaaggtatatccaaaatgaaatatattgtagcactgcgaaatgagaaagggagctacaacagatgtaattgcaataaattcatattctttattgtagcactgcgaaatgagaaagggagctacaacttctcaacctcaatgagacgcttctttttcattgtagcactgcgaaatgagaaagggagctacaacttattgattgatgatttaaaaacatggtgcattgtagcactgcgaaatgagaaagggagctacaacttaattttggttgttaaaatcggtgatacaattgtagcactgcgaaatgagaaagggagctacaacgctcaatagttttggcagtaaaagttacatattgtagcactgcgaaatgagaaagggagctacaactaagttcttctgctactgctcgaataattgattgtagcactgcgaaatgagaaagggagctacaacaataaattatttgattggttcaatggcacaattgtagcactgcgaaatgagaaagggagctacaacgcagaaacacaagtagaacaagctaaatcaattgtagcactgcgaaatgagaaagggagctacaaccctctaagggttcaatcgtgcgtggtggagattgtagcactgcgaaatgagaaagggagctacaaccctctaagggttcaatcgtgcgtggtggagattgtagcactgcgaaatgagaaagggagctacaacctaatttcctatctcactaatcaaattctataccacaaaaaactcgttattcttttcaacaagcggtagaatttcattaatcttttactgcaaggagaatctatgactactcaacactttatcggcttaggcgttgctggcaattttgccgggcatttggagcaagcaggcgaggcggctgatttcatgaaagtgaaaacagtggaagctgtccagccaaaagcaatttttccgttttatgtaccgtctgataatctaggagattatcagttcttagcaacttacccactttcaagcgatgcaattaattttccacaagatgcagataatctgcaaattgagccggaaatcgccttaatttgtgatatcaaataccaagctaataaggttgtaggcttacatcctacccattttgctgcttataacgattgttctattcgtcgtccaaatgctcgtaaaatctgtgaaaagaaaaactggggagcctcttctaaagggatttctttaacacacttacctttagatacttttagtgaggaaggcactttagatcactataatatcgcttgcttccataagcgtaacggcgagttgaatgcttatggcattgatagcccggcggtggaatatagctatttccatcaaaaattgttggattggattgtagatcgaatgaataatcaagctgatgaagggcctatgaacaacatcgctgaaatgcttaaacaatcggactatccgactaaaggcgattatcagtattggagcaacccgctatacgccttttggcgagagcaatttcttgcaagtaggtgatattagtatagtcgtggtttataacgctaaaaaatacagttacgcgcaaattgaagaaatggcaaatttagaagtgtttagtgaagatatttctgctctgattcaaagcgtgcgctaacttctacaagttctacaagcggtcagtttttaagaaatttttgcgatctgcttcgaaaattttgtgttaaattctgaccgactttttgctttccgttatactgccttcaatatttggaggcactatgaaaaaacttctcttattactattttgttttagctctactcttttcgcaaaatcattagacttaatgttactcggtcaatataaagatcaggatattgagggatgggtaatgagcgaaaaactagatggcgtacgaggcttttgggacggtaaacagcttatcagccgccagggttatccacttaatccgcctgattattttgtaaaaaatttccctccctttgcaattgatggtgaactctttagcgaccgaggaaaattcgaggaaatttcaagtattgtgcgctctaccgagtctaaaggctggtataagttaaaattgcacgtttttgatgtacctaatgcgaatggagatttatttgaacggctaaattcattaaagcactatttgaaccagcacccaactccatatattgaaataattgagcagattccaattcaagataaagcccatcttgagcaattttatcaatctattttaactaaaggcggtgaaggtgtcgtggttcgcaacccgaaagctcactacattcaagggcgttctgcccaaattctaaaaattaagcctgtattcgatgaagaatgtaccgttattgctcactataaaggcaaaggtaaatatgccgacaaactgggggccataagctgtgaaaatcatcgagggcgttttcgtatcggctccggttttaaagataaagatcgtgaaaatcctccccccattgggtcaatcgtcacatataaatacagaggcttaacagaatccggcaaaccaagattcgctacttttttaagaaaacgtgagccgagtgagtaatgccacttccagttgcaagttatcaagcggttaaatttggtaaaaaatttgtaaaattcaaccgcttgtaaaaataatttgtgatccagtcatcatttatgcactaaagcatttgaaattccagccaattttttttatttttcattaaacttgataagtcattaaattaaggaatcgctatgacaaacgcagaactctttggtgaaggactaaatctgatgtttgcaggaatgggatttgtaatgctatttctgcttgttctgatttatgctattagcttcatatctactctgattaaccgatattttcccgagcctattcctaatattccccaaaaagtagctccacctgctgatgatttagaagcattacgcccggtaattgcagcggctattgctcatcatcgccgagtgaaaggacagaattaatgcaaaaattcaaacaaatatattagaaggaatttcattatgacaactcaaccaaaaaaaattgctattactgatgtcgtcttacgtgatgctcaccaatctttgtttgcaactcgattacgtttagacgatatgttaccgattgccgcagaactcgataaaattggctattggtcgcttgaagcatggggtggagcaacatttgacagttgcattcgttttttaggcgaagatccttgggtgcgtttacgagagctaaaaaaagcaatcccgaatactccactacaaatgttattacgaggacaaaacctcttaggctatcgccattatgccgatgatgtagtagataaatttgtcgagcgttgtgtgaaaaacggtatggatgttttccgtgtgttcgatgccttaaacgatccacgtaatatgcaagccgcgttacaagcggttaaaaaacacggcgggcacgcacaaggaacgttaagctacaccactagcccggttcacaccttagaaacgtggctagaggtgactgagcaattattagaaatcggtgtggattctttggtcatcaaagatatgtcgggcatcttaaccccgatggcagcctatgaattagtcagtgaaatcaaaaaacgctacgatgtggagcttcacttacattgccactccaccaccgggatggcggaaatggcgttgttaaaagcgattgaagccggtgttgatggcgttgatacctcaatttcttctatgtcaggcacttacggccaccctgcgaccgaatccattgttgccactttacaaggcacacagtatgacacaggcttgaacattccggaattggaaaaaatttccgcttacttccgtgatgtacgtaaaaaatatgcgaaatttgaggggcaactacgcggtatcgacagccgtattttagttgcacaggtgccgggtggtatgctcaccaaccttgaaagccaactcaaacaacaaaacgccaccgacaagcttgatctcgtgttacaagaaatcccgcgtgtgcgtgaagatttaggcaatattccgttagtgacgccaacttctcaaattgtaggtacgcaggcagtgatgaatgtgttgatgggcgaacgctacaaaacaattgctaaagaaaccgcaggtattctaaaaggcgaatacggacgcacacctgcaccagtcaataaagcattacaagaaagagtgcttgaaggcggactacctattaccgaccgcccagcagatcatattccaccagaactgaataaattagtagcggacgtgactgctcaagcaaaagaaaaaaaatatcacactctctgaaaatagcattgatgatgttctgattgtggcactattccaacaagtcggttggaaatatttggaaaaccgcaacaatccatctgcctttgaacccgtaccaagtgctgatgatgttaaagcgactcaggctgctgcaccaaaagctcatccacaatcaggctccgcagtttacaccgttgagcttgaaggcaaagcctttgtagtgaaagtcagtgagggtggagatattaccaatatctcgccaaccacagctgcaccagctccacaagcggtcaattcttcagaaaaatctgcaaatgccgaacctgtaaatgcaccaatggcagggaatattctcaaagttgaagtgaaagaaggtcagcaagtagctgaaggctatgttctactgattctcgaagcgatgaaaatggaaactcaaatttgtgccgccaaatcagggactatccaaggcatcaatgtaaaacaaggcgatgtcgttgctgtaaatgataccttaatgagtattgcataggagtgatatatggacggtattattgctctatttaaaggaatgggaatagtacatcttgagtttgggcaagctgtaatgattgcgataagcgtgcttttgctctggcttgctattgcccgaaaattcgagccacttttacttgtacccatcggttttggtggcttgatgtcaaatattccggaagcagggatggcgatgacagctttagataatttgcttcatagcggacaagcagaacagcttgccattattgcggcaaaagtgaacagcacaagtttggatgttgattccatcaaagcagcaattgcacttgctgctccatcagtgcaaaatcagcttgaagtaatagccggtgatatgggttataccgcaggtgtgttagcattattctataaagtagcgattggctatggcgttgcacctttaatcatctttatgggtgtaggggcaatgacagacttcggacctttattggcaaaccctcgcatgctacttctcggtgcagccgcacagtttgggatttttgctaccgtactgggagccttaggattaaactggcttggcattatcgattttactctgccacaagcagcagcaattgggattattggaggagctgatggcccaacagcaatttatctcgcaagcaaattagcccctgaattattaggtgcaattgccgttgccgcttattcttatatggcgctggttcctcttatccaaccgcctattatgaaagcattgacaacggaacaggaacgtaaaatcagaatgacacagctacgcaatgtcagcaatcgtgaaaaaattatcttcccgattgtcttgcttctccttgttgcattgttattacctgatgccgcgcccctacttggaatgttctgttttggaaacttgttacgtaccagtggtgtagtagaacgcttaaacgacactgctcaaaatgcactaattaatatcgtaacgattttccttggcttatcggttggggcaaaattggtagcagataaattcctccaaccacaaaccttaggcattttagtactgggtgtgattgcatttggaatcggaactgcaagcggtgtgattatggcgaaaattatgaatcgctttagcaaaaataaaatcaatccgcttatcggatctgccggtgtttccgctgtaccaatggctgctcgcgtatcaaataaagtaggtcaagaatatgacaaacagaacttcttattgatgcacgctatggggccaaacgtagcaggcgtgatcggttcagcgattgccgcaggcgtaatgttaaaatatatcgccaatatgtagccatccgccaaataaaattagacctccgaaagatatacttttggaggttttttattttgttgataataattctcaaaaagttgttgacttcttatttgagaactattatcatcaactcacttcaaaaaataataggtaatcactccaactctttacgccgtattcccccacaaaatacggcgttttttttgcttatccgcccaaacctctatcaatttcaattcataccgctataatagaactatttttaaatttatagacgaagaaaggaaaataaatggctcaatctattgaatctatcattgctgaacttaaacgtggtgtagaaaatatttactcggaagaagatttaatcgcaaaattaaaagaagagcgcccattaatcatcaaattaggagcagatccaacagcgcctgatattcacttaggtcataccgttgtcttaaacaagttacgccaattccaacaacttggtcaccaagttgtattcttaatcggcgatttcaccggtatggtaggggatccttcaggcaaaagctcaactcgccccccattaacacgtgaagacgtactacgcaatgccgaaacctataaacaacaaattttcaaaattttagatccggtaaaaacccgcattgtatttaactctgaatggttgagtgaattaggtacagaagggatgatccgcttagcatccaactacacagtcgctcgtatgttagaacgtgaagattttaaaaatcgttttaataatcaacagtctattgcaattcacgagttcatctatccattattacaaggtcatgattctgtggcattaaaagctgatgtggaattaggcggtacagaccaaacgttcaacttattagtgggtcgtgaattacaaaaatcggcaggtcaaaaaccacaagtggcaatgacattaccgcttttagtaggcttagatggcgagaaaaaaatgtcgaaatcactcggtaactacatcggcgtgaccgaagcaccaagtgaaatgttcggtaaagtgatgtcaatttcagacgaattaatgtgggattggtacaatctactttcatttcgcccattagaagaaatcgcacaattaaaagcagaggttgctgcaggtaaaaatcctcgtgatgtgaaaattctgttagccaaagaaattattgcccgcttccatgatgaagcagcagccaatgcggctgaacaagaatttatcaatcgcttccaaaaaggtgccattccggatgaaatgccggaattcacctttgaaggcgaaatcggcttagccgcattattaaaagaagcaggacttgtgccatcaacctctgaagccatccgctcagcccaacaaggcggcgtgaaaattgacggcgaaaaagtggaaaatgtaaaacaaaatgcacaaaaaggcacctttgtttaccaagttggtaaacgtaaattcgcccgaattacggtaaaataatcttacccaataaaacaagcggtcataatttgaaaattatttgcaaattatgaccgcttgtattttataaaaacattagagcaaattatttaaactcataacgtctaattgtttttaaatctgaatcttgatttttaatctcatcagcaaggcgaactcgggcccccacggcagcatgagcatcatactgacgagttaaggttacagtttcaccgttatctctttgcacagttagctcaacaacatctgccgatactgctttgcttgataacacagttgcattacctttgtcagaataaacatcggccgtacaagctgctaagataaaagatgctaaaacagctaaagaaagttttttcattataagaatccctcaggaagaactaaaaattaaagtagagacacattcagatctgaattagatcctacaagt

SEQ ID NO: 3193 - DNA, 15794 bp, synthetic construct
  source 1..15794: mol_type = other DNA
  misc_feature 1..15794: note = Synthetic
ccttggcgtccgaaagagcggctgaaaaatgctgtcgagttgggcgacaccagcctgatgttcttagtacatccgacgctgaccgacggcgaaatcgcgttctgcaaagaacacatcgaagccgtattgaccgaagccacacgataacccttcagacggcatatgccgcctgaaagcacataccgccccacgatatgactctggaaaccctgcttgccctaccgcgcaacatcaagaaaatctgtttcctcatacacgattttctgatgattttcattgccttttggtttacccaaagcctgaaggccgactactcgaacgaatggttcgaccctgccaactggcagtctttcctattgaccgcgccgttgaccatcggcctgttcgtcagaatggggctctaccgtgccgttacacgcttcatcagcttccgcatcctctccaccgcgctggcaggcagcctcgcctccgccgtattgttcttcctcaacacattgatttttgaagaaaggctgcgcctcgccctgccgattgtctatttcttactgctgtttgtttccgtgaccggctcgcgtatggttttgcgcggactgttgtccgaacaccccaaaaaacagatgatccccgtcatcatttacggcgcggggcaggcgggcagacagcttctcgaggccgtcaaacaaatgcgcgaatattccgccgccgcctttgtggacgacgaccccaaactgtggcacaccgtcatctacgaccttgccgtttaccagcccgatgccatcgccttcctcatcgaacgctacggcgtggaaaaaatcctactcgccatccccggcgcgacccaggaacaacgccgccgaatcatcaacaaactggaagcctatccgtgcgaagtgttgaccattcccggaatgaaagacctgatggacgggaaaatcagcatcggcacgctcaaaaaaatctctgtgtccgacctgctcgggcgtgattccgtcgcgcccgacaaccgcctgatgagtgccgacatcgaaggcaaaaccgtcatggtaaccggcgcgggcggctccatcggttcggaactctgccgccagattatccgccgccgccccgaaaagctgctgctgttcgagttatccgaattcgccctgtacgccgtcgaaaaagaattgcgcgaaacctgcatccaaaaacgcctcgacaccgaaatcctgccctttctcggttcggtgcaaaaccgcacgctgctcgaacacgtcatgaccgccttttccgttgcgaccgtctatcacgccgccgcctacaaacacgtccccatggtcgagttcaacaccgtcgaaggcatacgcaacaacatcttcggcacactcgagtgcgcgcttgccgccacgacatcgggcgtggaaactttcgtcctcatctccaccgacaaagccgtccgccccaccaacaccatgggtgccagcaaacgcatggcggaactctgccttcaggcgctcgccgccgaacccggacaaaaaacccgcttcagcatggtgcgtttcggcaatgttttaggttcgtccggctccgtcgtccccgcatttgaaaaacaaattgccgaaggcggcccgattaccctgacccaccaagacattacccgctacttcatgaccattcccgaagcggcgcaactggttatccaagccggcgcgatgggcaaaggcggcgacgtattcgtcctcgatatgggcgaatccgtcaaaatcatcgaccttgcccgccaaatgattaccttaagcggcctcaaacccaaaacacccgaacaacccgacggcgacatcgaaatcctcattaccggactgcgtcccggcgaaaaactctacgaagagctgctcatcggcgacaacgtccgcaaaaccggccatccgcgcattatgacggctgacgaggcgatgctgccgtggcacgagctctctgtcctgctcgaccgcatccgtgcggcctgcgaccgttacgaccagcaggcaatccgcaccctgctcatcaacgccccgaccggctttaccccaagcgacggtatctgcgacctgctttgggtacgagaaacacacagaaaaaatgccgtctgaaccttcagacggcataacgtacaaaccaacctaccttacacacacggagtttgacatgcagttctcagcattcggcgaaaaattcacgcaacacagcggcatcctccaactgatggacgacctcggcgacgcgctcaaaagcgacaagcccgtcaatatgctcggcggcggcaatccggcgcgaatcgccgaagtcaatgccgtgttcgccgacgtattttccaaactggcagcagaacatgccgtcgaaaacatcggcaactactccaatcctcaaggagatgccgcgctgattgacgcgctgaccgccttcctcaaccgcgaatacggctggaacctgaccgccgacaatatcgcgctgaccaacggttcgcaaaacgcgtttttctatttattcaacctcttcggcggcaaattcaacctttcagacggcacatccgcagaaaaagccattttgttgccgctcgcgcccgaatacatcggctatgccgacgtgcatgtcgaagggcagcacttcgtttccgtcaagcccaaaatcgaaaacgtcgaacacgaaggcgaagcaggcttcttcaaataccgcgtggactttgacgcactggaaaacctgcccgaactcaaagcgggcaaaatcggcgcgatttgctgttcgcgcccgaccaacccgaccggcaacgtgctgaccgacagcgaaatggcgcggctggacgctttggcgcaagaacacggcattccgctgattatcgacaacgcctacggaatgccgttccccaacatcatttacagcgacgtaacgctgaattggcatgaaaacatcatcctctgcttcagcctttccaaagtcggtctgccgggcgtgcgcaccggcatcatcgtcgccgcgcccgaagtcgtcaaagccgtcagcagcctgaacgcgattgtgaaccttgcccccacgcgcttcggcgcggccatcgccgccccgctactggaaagcggcgagatgaaacggcttgccgaccaagtcatccggccgttttaccgcaatcaggcgcaaaccgccgtctcgctgctcaagcgcgagctgggcgcgtacccgatgaaaatccacaaacccgaaggcgcgattttcctgtggctctggtttgaaaacctgcccgtttcttcgcaaaccctgtacgaaatgctcaaagccgaaggtacgctgattattccgggcgaacatttcttcgtcggcatcgacacgcgggattatccgcacgcgggcgagtgcatccgtatgagcatcgcgcaggacgctcaaacgctggaaaaaggcattgccgccatcggtaaaaccgtccgaaaactgtacgacaacgtttaaaccgcaaaaaatgccgtctgaaggcctttcagacggcatttttatccgcattcaatgtcgggaaaaatgcgcccacactggcctgcagttttccggcagttcgggacacgcgccgaggatgccgccgctgaagtcgtttaaacggtggaagtcgctgcccgcactggcgagcatgccgaagcgttctgccaaaaatgcgtagttgaggcggtcgtttttgcagcagttgccgctgtggacttcgatgcccgcgccgccgaggtttttaaattcttcaaacagattgcgcttggcggtagcggacaaatcatagcgcatcggatgggcgatgactgccatgccgcccgcgccgttgacggcggagacgcagtcttccagcgtcgcccattcgtgtcggacggcgcaggatttgccgtcgcccaagtatttggtgaacgcctgctgcttgtttttgacgtgtcccacccgaatgaggaactcggcgacgtgtgtgcggctgaccatttctttgtttgccgccagcgcgagcgcgccgtcgtatgcgcccgaaatgccgcgtttttccagcttggcggcgatggcttcgaggcgtttcagacggccttgccgcacttgcgccaacaggttttgcaggttttcgtcttgttcgtcaaagtctaagccgacaacgtgtatggtacgcccgcgccacgttacggagatttccacgccgttaatcaggcgcaaaccgagcctgtcggcttcggcacgcgcttcggcgatgccgccggtgtggtcgtggtcggtcaacgccagcagcgtgcagccgttttgatgcgcgaggcgcacaacttcggcgggggagagcataccgtcggaaacggtggaatggcagtgcaggtctatcataaggcgttatgtgcgtggtaaatggtgggcagggtgtttcaatattgtcgggcggtgtggcggcggtgatttcaaaaaacaggtgtatggcaaatgcaaaggaaaagccgctatgccgtcattccagcgcaggcgggaatccagactttgatttattggaaatgtttaaggttaaccgctatttcaaacttccggattcctgctttcgagggaatggcgatatgaccgttttcaattttaatctactataaaagactgtctgaaaacgtggttttatagtgaattaaatttaaaccggtacagcgttggctcgccttggctcaaagagaacgattctctaaggtgctgaagcaccaagtgaatcggttccgtactatttgtactgtctgcggctcgccgccttgtcctgatttttgttaattcactatatcaagccgaaccgttttcagacggcatcgtccgaccaacccgcttctttcaatttccgccgttgcgcgtcgtagcgggccttatccgcccaataaatcgtctgaatacacgcctcgccgcagtcgctgccgcagcattcccacgactcgggtcggacgggttcgtctaaaagcggctcgcccaaaagggcttcggctttatgcttcagggtcatatccatcggcgatttccaagcgcgcaccgtcaaactcgatgacttcgccgccgcgtattttggcggttttacgggtttcggtttcgccgttgcgcgacaccaacccttcggcaatcaacgccttcgcctgtccgccgctttcggcaagtccggccaatttcaagaggtcgcacaaggcgatgtattcgttgtcttcgagatagacgatggcttccatgatgtccccttgcagaaagagaccgttattgtagcacctgccgccgccgtacccaaaattaccgcaaaaccagcgatgtatccgcaccgcctgttccgtaaaagtaaaaatgccgtctgaaaccccgtatgccgcaatccgttcaaagaaatcctgcccaacggcagactgcaaatcctgttccccgacgaatccgcattgacgctgatgcacatcctcaaacacgaactgcccgatacaccggcaatcggcatcaaaacgaaatcaaaaacctgtttgaacgtaaaattaatttaactgcttgccatccgtccgaataaggtatatagttccttataactagtttgatagtcctttatatctatcaatactccttgggaagcctccaccacacggtaggaggcatttttttgccgtcgtaaaagctcaaaaacatttgcaggtcatgccgtctgaatctgaaacggcatgacctacaccgccatctaaagacaaccctgctacaatacgccttttattgttcacgccgattttgccatgaccgagccgacctacatccccctgcgcctgcataccgagttctcaattaccgacggtatggtgcggattaaaaaactgattgccaaagcgcaggaatacggtttgcctgctttgggcatcagcgatttgatgaacgaattcggtttggtgaaattctataaagcctgccgcagtgcggggattaagcctgtcggggcggcggacgtgtggataggcaatccgaatgcgcccgacaagccgttccgcgccatgttgattatccgcaacgatgcgggctatcagcgtttgagtgagcttttgacagaggcctatgtcggtaaagaccgcaatgtccatcatgcggaactcaaccccgaatggctggaaaacggcgacaacagcggcttgatttgtttgagcggcgcgcattacggcgaagtgggcatgaatctgttgaacggcaatgaagacgcggcgcgcgcggcggcgttgaaatatgcggcatggtttcccgatgcgttttatttagagctgcaacgcctgcccgaacgccccgaatgggaggcttgcgtttccggcagcgtgaagctggcggaggaactgggtttgccggtggtggcgacgcatccgacgcagtttatgaaccgcgacgatttcaacgcgcacgaggcgcgggtgtgtatcgcgggcggctgggtattgacggacaaaaaacgtccgcgcgatttcacgccggaccagtttttcattccgccggaaacgatgctggagcgtttcgccgacttgcccgaagccttggaaaacacggtggaaatcgccaaacgctgcaacctgcacatcacattgggcaaaaacttcctgccccttttccccacgcccgacggtttatcgcgcgatgactatctcatcaaactctcaaacaagggcttgcaggaacgcatggttcagctttatcccgacgaggcggagcgtgcggcaaaaatgccggaatatcaggaacgtttggattttgagctgaacatcatcatccagatgaaattccccggctatttccttatcgtacaagactttatcaactgggcgaaaacgcacggctgtccggtcgggccgggacgcggttcgggcgcgggttcgctggtggcgtattcgctgaaaattaccgacctcgacccgctcaaatacgcgctgctgttcgaacgtttcttgaaccctgaacgcgtttccatgcccgacttcgacgtggacttctgtcaggcaaaccgcggccgcgtgattgaatatgtacgcgaaaaatacggtgcggaagcagtcagccagattgttaccttcggcacgatgtcgtccaaagcagtgattcgcgacgtggggcgcgtactggaactgccgtttatgctgtgcgacaaactgtccaagctgattccgttggaagccaacaaacctttgggtttggacgacgcgatgaaggcggagccgcagattcaggaattaatcgaagcggaagaagcggacgaactgattacgctggcgaaaaagctggaagatttgacgcgcggtttgggtatgcacgcgggcggcgtgttgattgcgccgggcaagatttccgattacagccccgtgtatcaggcggacgaatccgcctcgcccgtatccatgtacgacaagggcgacgtggaagacgtgggtttggtgaaattcgactttttaggtctgcgcaacctgaccatcatcgaaatggcgcagaacaacatcaaaaacaccaccggcgacatcatcgatgtcggcaaaattccgcttgacgaccaggttgcctaccaaatcttccgcgatgcgaacaccaccgccgtgttccagttcgagtcgacaggcatgaagaaaatgctgaaaacagcgcatacgaccaagtttgaagaacttatcgccttcgtatcgctctaccgacccggcccgatggacaatattcccgacttcgtcgcgcgtatgaaaggtcaggaattccaatacatccacccgctactcgaaggcatcctcgcaccaacctacgggattatggtgtatcaggaacaagtgatgcaggcggcgcagattatcggcggctactcgctcggcggcgcggacctgctgcgccgcgcgatgggtaagaaaaagcccgaagaaatggtgaaacaccgcgaaatcttcgccgaaggcgcggcaaaacaaggcatttcgcgcgaaaaatccgacgaaatcttcaactatatggaaaaattcgccggctacggtttcaacaaatcccacgccgccgcctacgccctgatttcctaccagaccgcatggctcaaggcgcactaccccgccgaatttatggcggcgaccatgtcgtccgaattggacaacaccgaccagctcaagcatttctacgacgactgccgcgccaacggcatcgagttcctgccgcccgacatcaacgaatccgactaccgctttacgccgtatccggacatgaaaatccgctacgcgctcggcgcgattaaaggcacgggcgaagccgccgtcgaatccatcaccgccgcgcggcaaagcggcggcaagtttaccggcctgttggacttctgcgagcgcgtcggcaaagaacacatgaaccgccgcaccctcgaagccctgatacgcggcggcgcgttcgacagtatcgaacccaaccgcgccatgctcttggcgaacatcgacctcgctatggacaacgccgaccaaaaagccgccaacgccaatcagggcgggctgttcgacatgatggaagacgccatcgaaccggtgcggctcatcgacctgccgaggtggagcgaatcggaaaaactcgccgaagaaaaaaccgtcatcggcttttacctgtccggccacccgttcggcccgtatgcccaagaagtctgccaaatcgcaccgaccaaattagaccgtctgaagccgcaagacagcgtgcgcctcgccggattcgttaccgccgtgcgtacgatgatgggcaagcgcggcaaaatcgccttcgtcagccttgaagatttgagcgggcaggttgaaatcatggtcggcagtcagacgctggaaaactgcgccgactgcctcaaagccgaccaagtgctgattatcgaatccaaagtcagccgcgacgactacggcggcggcgacggactgcgcatcatggcaaaccaagtcatgaccctgcaaacggcacgcgaacgctacgcccgcagcctcagcctcgccctcgccccgcatcacgacatcggcggactggtacggctgctctcctcccaccaactgcccgacacgccgcgcatcccgctgcaactgtcgtatgccaacgaaaaagcgtcgggcaggcttcaagtgccgccgaaatggacggttacaccgagctccgcattgttcggcgaactggaaacattgctcggcagccggtcggtgcgcgtcaactggtaacccaaaatataaatgccgtctgaagcccaaaatcggtttcagacggcattttttaaccgaaataaacgatgccccttaaagcagaagctttaaggggcagagcgttgcggcacatcttttcagacggccttattgtagcaacggttctcatttcgcagtgcgacaatatgtttgggattctagccgttgtgagatgataagtcaataatctatttgtatataaataagacaataagatatattatcattatttgcaacgttgtttacggagtaataaatggctgccttcaaacctaatccaatcaactacatcctcggcctcgatatcggcatcgcatccgtcggctgggcgatggtagaaattgacgaagaagaaaaccccatccgcctgattgatttgggcgtgcgcgtatttgagcgtgccgaagtaccgaaaacaggcgactcccttgccatggcaaggcgtttggcgcgcagtgtccgccgcctgacccgccgcgcccatcgcctgcttcgggcccgccgcctattgaaacgcgaaggcgtattacaagccgctgattttgacgaaaacggcttgatcaaatccttaccgaatacaccatggcaacttcgcgcagccgcattagaccgcaaactgacgcctttagagtggtcggcagtcttgttgcatttaatcaaacaccgcggttatttgtcgcaaagaaaaaacgagggcgaaactgccgataaagagcttggcgctttgcttaaaggcgtggccaacaatgcccatgccttacagacaggcgatttccgcacaccggccgaattggctttaaataaatttgagaaagaaagcggccatatccgcaatcagcgcggcgattattcgcaatcagcgcggcgattattcgcatacgttcagccgcaaagatttacaggcggagctgattttgctgtttgaaaaacaaaaagaatttggcaatccgcatgtttcaggcggccttaaagaaggtattgaaaccctactgatgacgcaacgccctgccctgtccggcgatgccgttcaaaaaatgttggggcattgcaccttcgaaccggcagagccgaaagccgctaaaaacacctacacagccgaacgtttcatctggctgaccaagctgaacaacctgcgtattttagagcaaggcagcgagcggccattgaccgataccgaacgcgccacgcttatggacgagccatacagaaaatccaaactgacttacgcacaagcccgtaagctgctgggtttagaagataccgcctttttcaaaggcttgcgctatggtaaagacaatgccgaagcctcaacattgatggaaatgaaggcctaccatgccatcagccgtgcactggaaaaagaaggattgaaagataaaaaatccccattaaacctttcttccgaattacaagatgaaatcggcacggcattctccctgttcaaaaccgatgaagacattacaggccgtctgaaagaccgtgttcagcccgaaatcttagaagcgctgttgaaacacatcagcttcgataagttcgtccaaatttccttgaaagcattgcgccgaattgtgcctctaatggagcaaggcaaacgttacgatgaagcctgcgccgaaatctacggagaccattacggcaagaaaaatacggaagaaaaaatttatctgccgcccatccctgccgacaagatccgcaaccccgtcgtcttgcgcgccttatctcaagcacgtaaggtcattaacggcgtggtacgccgttacggctccccagctcgtatccatattgaaacggcaagggaagtaggtaaatcgtttaaagaccgcaaagaaatcgaaaaacgccaagaagaaaaccgcaaagaccgggaaaaagccgccgccaaattccgagagtatttccccaattttgtcggcgaacccaaatcaaaagatattctgaaactgcgcctgtacgagcaacaacacggcaaatgcctgtattcgggcaaagaaatcaacttagtccgtctgaacgaaaaaggctatgtcgaaatcgaccatgccctgccgttttcgcgcacatgggacgacagtttcaacaataaagtgctggtattgggcagcgaaaaccaaaacaaaggcaatcaaaccccttacgaatacttcaacggcaaagacaacagccgcgaatggcaggaatttaaagcgcgtgtcgaaaccagccgtttcccgcgcagtaaaaaacaacggattctgctgcaaaaattcgatgaagacggctttaaagaatgcaatctgaacgacacgcgctacgtcaaccgtttcctgtgccaatttgttgccgaccatatattgctgacaggtaaagggaaaagacgtgtctttgcctcaaacggacaaattaccaatctgttgcgcggcttttggggattgcgcaaagtgcgtgcggaaaacgaccgccatcacgccttggacgctgtagtcgttgcctgctcgaccgttgccatgcagcagaaaattacccgttttgtacgctataaagagatgaacgcgtttgacggtaaaaccatagacaaagaaacaggaaaagtgctgcatcaaaaaacacacttcccacaaccttgggaatttttcgcacaagaagtcatgattcgcgtcttcggcaaaccggacggcaaacccgaattcgaagaagccgataccccagaaaaactgcgcacgttgcttgccgaaaaattatcatctcgccccgaagccgtacacgaatacgttacgccactgtttgtttcacgcgcgcccaatcggaagatgagcggtgcacataaagatactttgagatctgctaaacgatttgttaaacataatgaaaaaattagtgttaaacgagtatggttaaccgaaatcaagttggccgaccttgaaaatatggttaattataaaaatggtagagagattgaattatatgaggctcttaaggcgcgtttagaggcatatggaggtaatgctaaacaagcatttgaccctaaggacaatccgttttataaaaagggaggacaactggttaaagctgtgagggtcgaaaaaacccaagagagcggagtcttattaaataaaaaaaatgcttataccattgcagataatggagacatggtacgtgttgatgtgttctgtaaagtagataagaaaggaaaaaatcagtattttattgttcccatctatgcttggcaggttgctgaaaacattcttcccgatattgattgtaagggataccggattgatgatagctatacattctgttttagcttgcataagtatgatctgattgcttttcaaaaagatgaaaaatctaaagtagaattcgcctactatatcaactgtgatagctctaatggacgattctatttagcttggcatgataaaggctctaaagaacagcaattccgtattagcacccaaaatcttgtattgatacaaaaataccaagttaacgaactgggcaaagaaatcagaccatgccgtctgaaaaaacgcccacctgtccgttaaattaatctgtccctgcttcagacggcctgaagcagggattttttatatcaaaataaggggaaaacatgacttggcgcagcctacttattcaaaacggcggcaaactatccttgcaacgccggcaactgctgattcaacaaaacggcgagtcccataccgtaccattagaagacatcgccgttatcatcatcgaaaatcgcgaaaccctgattaccgccccgctcctatcagccttagctgaacatggcgcaaccctgctgacctgcgacgagcagttcctgccctgcggacaatggctgccttatgcccaatatcaccgccagcttaaaatcctcaagctgcaactgaacataagcgaacccttaaaaaagcaattctggcaacatatcgtccgccaaaaaatcctgaaccaagcatttatcgcagacgaaacaggcaatgatcttgcagccaaacggctgcgcactttggcatctgaagtccgttcgggcgatacaggaaaccgtgaagcccaagctgccgccctctacttccaagccctctttggcgaaaaatttacccgtaatgacaacaatgccgtcaatgccgcattgaactacacctacgccgtgctacgggccgcagttgcacgcaccctgaccttatacggctggctgcctgcattaggcttgtttcatagaagcgaactcaatccattcaatctcgccgatgactttatcgaacccttacgcccattagccgacctgaccgtgatacatttgtacgaacaaggccgtctgaaagccgaactgacccccggcatcaaacaacaccttatcaaaacccttcactatcaaatcagcatcgaacggcaacatttcagcaccttggctgccatcgacaaaatggtttcgtcatttcaagccggtgtaaccgataaaaacgccaaacaactgaaactgcctgaaatcctaccattgaaagaataccgatatgagtgaggccaaatttatgaggattatcgtcttcttcgacctaccggttatcacggcggcaaagcgcaaagccgccaatcaattccgccagtttttattaaaagacggataccaaatgctccagctttccgtatacagccgtatcgtcaaaggccgcgattcgttgcaaaaacaccacaatagactatgtgcaaaccttccgcaagaaggctcaatccgctgtttggagataacagaaaagcaatatgccgccatgaaactgctgttgggcgagctgaaaacccaagaaaaaaaggtcaattcagaccaattattgttattttaagcccattttttcagactaaataaaacgggaaatccttatagaataaggatttcccgttggggtattgtagcactgcgaaatgagaatgggagctacaaccggcggtctgttggatgccatgttgtcggaattgtagcactgcgaaatgagaatgggagctacaacgaccaacaaaaacgtacacccgagcaaagtattgtagcactgcgaaatgagaatgggagctacaacctgccaacaaattggttgaccaagacaaaaattgtagcactgcgaaatgagaatgggagctacaactcgccacgccgtgctgacccgcgccggtttattgtagcactgcgaaatgagaatgggagctacaacctctattttcagcagggcaaagttggtgctattgtagcactgcgaaatgagaatgggagctacaacgcgccatcaggaagatgcgttttttggtttattgtagcactgcgaaatgagaatgggagctacaaccacaaccaaaatatagaaattttcaaatttattgtagcactgcgaaatgagaatgggagctacaacctcgaatggcgagtacttgacgctcaatacattgtagcactgcgaaatgagaatgggagctacaaccaggtgcttgggcgtaattttatccgttggattgtagcactgcgaaatgagaatgggagctacaacccttttgcaacaatcgtgctttatttgtcaattgtagcactgcgaaatgagaatgggagctacaacttcctgtcggctttttcggctgctttgcggattgtagcactgcgaaatgagaatgggagctacaactatgcttgggtttgagtgggcgattgatgaattgtagcactgcgaaatgagaatgggagctacaaccttggcacgagatggtcgccgtattaaattattgtagcactgcgaaatgagaatgggagctacaactttatggctattcacctgtcgagcaaatcaattgtagcactgcgaaatgagaatgggagctacaacaagaagattgggaaatgtatctcacggaagattgtagcactgcgaaatgagaatgggagctacaaccggtttgaacagcagtatatgggaagaaacattgtagcactgcgaaatgagaatgggcgctacaaccagccgttgcgataagcgaacgtgcgttaaagtcattgagacacagtgcaattatggcaagaaaggcgacagatattgtgtcacagatttgaaataagaaaaaaccgcccactcacagagtaggcggaaaacttgcgtttttttgattgtggtcgggttagctactgcattgacttaacagcaaagcaaccgctaaaatgaacttgtggttcacttcaacggacagcagcaactttttcccacgcataaggaatttaagcattttagcttctcctagtgaagttaatcacacaggcgagagccgaacaaaaatccccgttgcagcggggatttttgctgttccctgtttgatgattaaactaaaatcttgcaaaatgagacctttgcaaaattccccaaaatcccctaaattcccaccaagacatttaggggatttctcatgagcaccttctttcagcaaaccgcacaagccatgattgccaaacacatcgaccgtttcccgctattgaagttggaccaggtgattgattggcaaccaatcgaacaatacctgaaccgtcaaaaaaaccgttaccttcgagaccaccgcggccgtcccgcctacccgctgttgtccatgttc

SEQ ID NO: 3194 - DNA, 15605 bp, synthetic construct
  source 1..15605: mol_type = other DNA
  misc_feature 1..15605: note = Synthetic
tctgctgaccggcaggagaaacggacacaccagtcacctgataatcataactcatttcattaataggaccgattgctgaaatttcagattcggcaaacgcatccaaatcaagttcggtgtcgcgtgggttgtaagtgatgttctctatcgtagccaagccttgtggcacagctgcaacaaagttcttgcaagagctgcgcaattgcgtataagtatgttgcaaataggtgacaagttggtcgtaatcttggattttgttaccttttacaatatttttaggtaatttggtaataacgtatttttccagctgaatttggtttaaactacggcctgtcagctgaaccatcttaatggcatgctgactgatgtcgatgccgatagtggcacggttgcttaaccctccggaagctttacttgctttgctgcttttgcttttagggctttttgataagctaatcatataatttccctgtatattgttaggagtgagtaactgtttcgatatccgtaaaggatttctttttctttgcacattaaatactgtgtttcacagaaatcggtttctattttactttatttaatgccagtgatggcaaaaattattacttagtcatgattaaaaagattataacgacctgtcttggtttgatattaggattggcactcttcggtgtcggcttgctcgctattgcgattttggtcacataccccaagttgcctgctcttgattctttacaacactaccaacctaaaatgcccctcacagtatattctgccgatggtcagattattggggtttacggcgaacagcgccgggagttcacaaaaatcggagattttccaaaggttttgaaagatgctgttatcgccgcagaagataaacgtttctatgaccactggggcgtagacgtagtaggtgttgcccgtgctgccatcggtaacgtagtcgccggcggcttgcaatcaggtgccagtaccattactcaacaggtagcaaagaacttctacttgagtaacgaacgtacgtttacccgtaaattcaatgaagccttattggcttataaaatcgaacagacgctcagcaaagatcagattttagaactctatttcaaccaaatttatttgggtcaacgggcttacggctttgcctctgctgctcaaatctatttcaacaaaaacgtgaaagatttgactttggctgaagcatccatgctggcaggcttacccaaagcgccttcggcatacaaccccatcgttaaccctgagcgtgccaaacagcgccaagcctacatcctgcggaatatgcaggaagaaaatatgattactgcacaacaacgcgatcaagctttgaaagaagagctgcattatgaacgttttgtgcaaaacatcgaccaaaacgctttgtatgttgctgaaatggcacgccaagagttgtatgaaaaatatggcgaggacgcatacactcaaggctttaaggtctacacaaccgtcaataccgccaaccaacgtgttgctactgaagcccttagaaaagcgttgcgtaatttcgacagaggcagcagttatcgcggcgcagagaactacatcgacctcagcaaaactgatgacgtagaagaaacgatcagccaatatctttctactttatatacggttgacaaaatggtccctgccgttgtcttggaagcctctaaaaaaggagttctgattcaactacctagcggaaaaagattcaatctgaacagctacgcgctcggctttgcagcccgtgcagtcaacaacgaaaaaatgggagacgaccgtattcgtcgcggttccgttatccgtgtcaaaggtggcggcaacaattggtctgtcgttcaagaacccctattgcaaggtgctctggtttcattagacgcgaaaacaggtgccgtgcgtgcattggtcggcggttatgacttccacagcaagacatttaaccgtgccacccaagccatgcgccaaccaggttctacctttaagcctttcgtatactctgcggcactcgccaaaggcatgacagcatccaccatgattaatgacgcaccactctccctgccgggtaaaggtgccaatggttctgcttggaatcctaaaaactcagacggccgttatgcaggctatatcaccctgcgccaagcattgaccgcctctaaaaacatggtttccatccgaatcttgatgtccatcggtatcggatacgcgcaacaatacatccaacgtttcggcttcaaaccgtccgaaatccctgccagcctgtctatggcgcttggtaccggtgaaacaacaccattgcgtgtcgctgaagcatatagcgtctttgccaatggcggttacaaaatttccgcatacgtcatcgacaagatttatgacagcgaaggtcgtctgaaagcacaaatgcaacctcttgttgcaggcgaaaacgctcctcaagccatcgacccgcgtaacgcatacatcatgtacaaaatcatgcaagacgttgtccgtgtcggtactgcaagaggcgcctccgcacttggccgttccgatatcgccggtaaaaccggtacgacgaacgacaataaagatgcatggttcgtcggcttcaacccaagtattgtcactgccgtatacatcggcttcgacaaaccgcgcagcatgggccgcgcaggttacggcggcacgattgccgttccagtctgggtcgattacatgcgcttcgcactcaaaggcgtagaaaacaaaggcatgaaagcaccggcaggtatcgtgaacagcggcggcgaatactatatgaaagaacgtatgaccaccagctccgatatcactctggacaatagcggtaccgttccacgccctgcacaacaaccttcccgacaacaacgcccggccaatgccaacactgctacaacgcctgatagcgatcgggatggcggagaccgcggtcgcggtgatttgcaagaaacgccggtacagccaagcaatgttaacaatcgacaattagactcgctgttctaattacaccggtcaaaaggtcgtctgaaacccgaatcaggaatttcagacgacctttttatatatggcagtacaatctcaattcattgccatgtgaacaagatagaaaaattcactttaaaccgatacagcattgcctcatccgagcctaaagcggagagtttccccaaatgctaaaaaaccagtttcataccatctgcactgttcatcaaacttatcccctaccccttgatttcaaattacctcaccacgctagattccgcctcttccaatcactccatcaatcaaacgaattgtatagtggattaactttaaactagtacggcgttacctcgccttagctcaaagagaacgattctctaaggtgctgaagcaccaagtgaatcggttccgtactatctgtactgtctgcggcttcgtcgccttgtcctgatttaaagttaatccactataaaaacaacaaggtcgtctgaaatatgatccaacattttcagacgaccttttcgggtttatctattttaaagcaacatacacagcagcaagacgattttgttctctccctctgcaagacaataaacggatttgcgtcccgtcaatgcagactatactacgaccgattacaatgactcggaattttccggatttccgatattcaagttgtccatttcttcttgatgcgtagcaaaccattctccgacaacttgattgacttcttctatgccttgctttttaaggctggagaacagctgcacgctgatgcgctgacgggtcatatagggtttgagcgattttttgactgcgcctaaagttttgatttgatcgtttttcgacagtttgtcggctttcgacaacaaaatatgtacaggacggccggtaatgtggaaaaagtccagcatacgcaaatccagctcttttaacgggtggcgcgcatccataatcaacaccaagccaatgagttggcgtcgttgttgaagatagtcgcccaatagtttgacccaatgcgtacggatggcttcgggaacttgcgcataaccgtaacccggcaaatcgaccatgaagctgccgttgctcaattcgaagaaattgatgtgttgggttcgtcccggcgttttagaaacataggcgagccggacatgattggtcagggtattaatcgcgctggatttgcctgcattgcttcgtccgacaaatgcgatttctgcgggcgtgtcgggcaggtctttgagatggttgacggtggtgaagaatttggcgttctgaaagaggttcatccgtatttccttgtttcctaggatggagtggcagaatttgccgtgtccatgttgcgaaacatggtagtaatttaatgtaaatctagtatagaatagcacgtttatagaattatcggtttttatcgggtaaaatttatccggcgttttgagtataaaaaaggcattgtcgcggtatgcaatgctgtaatcaggagcactccatgaaacgattgactttagcggccttggttttggctgccggtgcggctgtcgctgccccgaaagcggatattgcaaaaggcaaagaagtagctactaccatttgtgcggcatgtcatgcggcagacggtaacagcggtattgctgcatatcctaagcttgccgcacaacatactggctatatctaccgtcaaaccttggacattaaagaaggtaaacgtacacacggttctgccgctgtgatgaaacctatggtgatgaacctgtccgaacaagacatcctgaatgtgtccgcattctatgccaaacagcaacctaaacccggtgaagccaaccctaaacaaaatgatcctgttttgggcggcaaaatctaccgtggcggtttggtggataaaaagatccccgcttgtatgtcctgccacggtcctagcggcgcaggtattccgggcggcggcactgaaatcgttgcttatccgcgcttaggcggccaacatatggcttatgtggtcgatcaaatgaaggcgtataaaaccggacaacgcaaaaatgcgattatggaagacatcgccaaacgcatgaccgaagaagagttgaattcagttgccaactttatccaaggtctgcattgatttctgccggatttgtactgtttgcccgcttttgcagcgaacgggaatatgaggtcgtctgaaaactcctgctcttctgggcttggttgttttcagacgaccttgtgcgatggtagctgccgctcttaaggcaataagttttttcaaatggcggctctgggctttttactccatcatatccacctgtccgcgccgtttccaatgtttgggttcttccgaaccctgacagtctttgtattccttatagaatcaaaccgctatgagcaaatcctcttcatccgtccctcttatccacaaaccttggtttgcttttttaagctccatgcgttttgccgttgccctgctcagccttttgggcgtcgcttcggttatcgggacggtgttgcagcaaaaccagccgcaggtcaattatgtcgtgaaattcggtccgttttgggcgcagattttcaactttttaggcttgtacgatgtctatgcatccgcttggtttgtggtcatcatgatgtttttggtgatatcgaccagcttgtgcctgattcgcaatgttccgcctttccttcgtgaaatcaaatcattccgtgaaaacgccaaagaaaaatcattggctgcgatgcgtcattcgaccgttttggaaggcaagatgtcgtctgaaatcgcccagcgttatcttgaagtacaaggcttcagctgcaaaaccgtaacgcgtgaagacggatcgattttggttgccgccaaaaaaggggcgatgaacaagtggggctatatttttgcccatgccgcgctgattgtgatttgtttgggcggcttgatagacagcaacctgctgctgaaaatcggcatgctcaccggacgcatcgtaccggacaaccactccgtctatgccaaagacttcaagcctgaaagcgtcttgggtacgtcaaacctgtcgttccgcggaaatgtaaacattaccgaagggcaaagcgcggacgtggtcttcctcaatgccgacaacgggatgctggttcaggatttgccgtttgaagtgaagctgaagaaattccacatcgacttttacaataccgggatgccgcgtgattttgccagcgatttggaaattaccgacaaggaaagcggcaaaaaatccgaacacaccatccgcgtcaaccatccgctgacgctgcacggcatcaccatctatcaagcgagctttgccgacggcggctccgatttgaagttcaaagcctggaatttgggcaacccaagccgcgagccggttacgctcagggcgacatctatgcgcgatttcccgctcgacatcggcaatacgtcctacaaactggagtttgaccaattcacgtccatgaacgtggaagacacgagcaagtcgtctgaaaaagagcaaaccctgcaatcagcgattaacgacgtgcgcgccgtgtcccaagagaacaaaaaatacaccaacatcggcccgtccgtggtttaccgaatccgcgacaaagcgggtcaggctgtggaatataaaaactacatgctgcctgttaaacaagaacaggattatttcttcatcaccggtacgcgcacaggtctggaacagcaataccgttggctgcgcattcctgccgataagactttcaaacccgataccttcatggcgatgcgcgaactcttgaaagacgaaaccgcacgcaaaaccgtcatccaaaacgcgaccttgaacgcgcccgaaaacatccgcgagcaatttacccttgccgccgaaaataccttgggcatttttgcgaaaggcggctatttggcgttggacgaatttattactaaaaacatccccaaagagcaacaggaaaaaatgcagggatatttttacgaaatgctgttcggcgttatgaacgccgtattggaagaaaccatccaaaaatacaagctgaccgagtggcctcaagacgaagcgcgcaaccgcttcctgctgcacagtatggacgcctacaccggcctgaccgaatatcccgcacctatgctcctgcaactggacggctttgaagaagtccgctcttccggcttgcaaatgacccgttcgcccggtgcatttttagtctatttaggctctgttttgctggttctcggcacgatatttatgttctacatccgcgagaaacgcgcgtgggttttgttttcagacgaccgcatccgctttgccatgtcttccagccgcaacgagcgcgacctgcaaaaagagtttccgcaacatacacaaagcctgcaacgactggcgaaagatttgaaccatgacgcataaccataaccccctacccgaacacgagctgctgacgcacaaatcgttcctcaagtccctaaatacggtcgactgcatattcgccctcttgaccgcagccggcgcattcttcgcccaaacccgcatccagcacaccatggacatctacgaaatggtgattttgtgggcaagcgcgggcattaccgtctttttaggctggtttttcaaacccatgcgttggtttgcccccttgtgtgccgtcctcgcatacggcgcagtcatgctctacgatggcgaaatcaaacacgccgacgacttcctgctcaaatacttcctcagcagccagtccgcgattatgtggcaatgcgccttcgtcttcttcgcactcttcgcctacatcaccggcgccgtactggcacaacgcaaaaacgtcgccaccaacaccctgctcggtatgggttccgtattcgcctgggtgtctgccgtcgcaggctttaccggacttctagtgcgctggcacgaaagctacctcctgcgccctgacgcaggacacatccccgtttccaacctctacgaagtcttcatcctcttcctcgtcatcaccgccctgatgtacctctactacgaagcccgtttcgccgtacaaaaactcggcggttttgtcttcagcttcatggcgatcgttgtcggcttcgtcctttggtacagcttttcccgcgaagcacacaccatccaacccctgattcccgccctgcaatcatggtggatgaaaatccacgtccccgccaacttcatcggctacggcgcattctgtatcgccgccatgctcggcatcgccgaactttgggcattgaaaaacgaaaacgccggcaaaaaatcatggctaccgcattcgcaagtcatcgaagaagtcatgtataaagccatcgccgtcggctttctgttcttcaccatcgccaccatcctcggcgcactgtgggctgccgacgcatggggacgctactggagctgggacccgaaagaaacttgggcattcatcgtctggctcaactacgccgtctggctgcacctgcgccttgtcgcaggctggcgcggcaaaatcctcgcatggtgggcagtgatcggactctttgttaccgccttcgccttcatcggcgtcaacatgttcctgagcggtctgcactcttacggcaccttgtaagcatcaaagcaaaatatcgaaaggtcgtctgaaaagctcatacggttttcagacgaccttttcacaccatcagacgcagcaaaagacaatcacaccgaatttacccccaatatccctccccttcctattgaaacaccccttccgatagaccataatcccatctatcacgcaaaacacttatacattgcgccgatttacccctgttttgcccctacccccacaccaaaataacaaaggtcaacatcatgtgccaactgctcggcatgaactgcaacacccccacagacatcgtcttttcctttgaaggcttccgccgtcgcggcggcatcaccgaccaccacgccgacggtttcggcatcggcttcttcgaaggcaaaggcgtacgcctgtttcacgacgacaagcccagcgccgattcccccgtcgccgacctcgtccgtgcctaccaaatcaaatccgaaaacgtcatcgcccacatccgcaaagcctcacaaggacaaacctcgctggcgaacacccatcccttcatgcgcgaaatgtggggcgaatactggctgtttgcacacaacggacatttgatggatttctaccccgagcaaggcgagtattaccatgccgtcggcaccaccgattccgaacgcgccttctgctacatcctcaatcgcctgcgcagccgcttcgccaccaaacccgatccggacaccctattcgatgccctcgccgccctgacccacgaaatccgccgcttcggcctgttcaacttcgtcatgtccaacggcgacaacctgtttgcccacgccagcacgctattgcactacatcgtgcgcaaagccccgttcggcaaagcacggcttttagacgacgacgtaatggtcgatttttccgaagtcaccactccgaacgacaaagtcgccgtcatcgccacattaccgctgacccgagacgaaacctggtcgcaattggcagtggacgaactggcgatgttccgacagggcgacatcgtccgcagcgaccgccccgaaaaccccgtctacatgagcgcagaagaaggcctggcaatcgcccgcgccgtcggcgtatccgtataaaacgaagaggtcgtctgaaaaacagaaaacagttttcagacgacctcttacacttgttcatgctatccccaaaacagatatctctattcccaaacacaacggtttgagtgctctctcacaacaacgccaacccaaatacttttaaatccctcctcatccccgacaacatcagattttagttagacagccataaaaacgatgccccttaagactaaagccttaaggggcagagcgttgcggcacatcttttcagacggccttattgtagcaacgtttctcatttcgcagtgcaacaatatgccgcagattctagcgggtacaataaccgaagtcaactatttcatttgcatgttaatgcttttttcagatatattgctgttgttgtttatgaaattgcggagaaacaaatgactgcttttaaacccaatccactgaattacatcctcggcctcgacatcggcattgcctccgtcggttgggcgacggtggaaattgatgataaagaaaatcctattcgtctgattgatttgggtgtgcgtgtctttgagcgtgcggaagtgccgaaaacgggagactcgctggcagcggcaaggcgtgctgcacgcagcattcgccgactcatccgccgccgcgcccaccgtctgcttcggacgcgccgtctgttaaagcacgaaggcgttttaaaacccgaagattttgatgaaaacggctttatcaaattattaccgaatacaccgtggcaacttcgcgccgccgcattagaccgcaagttgacacccttggaatgggcagcggttttactgcacttggtcaaacatcgcggctatttgtcgcaacggaaaaatgaagagcaaactgccgacaaggaacttggcgatttgctgaaaggcgtagccgacaacacccacgctttacagacaggcgattttcgcactccggccgaattggctttgaataaatttgaaaaagaaagcggtcatatccgtaaccagcgcggagattattcacatacgttcagccgcaaagacttgcaggcggaactggttttgctgtttgaaaaacaaaaagaatttggtaatccgtatgtttcagacgacctcaagaacggtattgaaaacctgctgatgacgcaacgtcctgccctatccggtgatgccattcaaaaaatgttaggacattgcaccttcgagccggcagaaccgaaagcggccaaaaacacctataccgccgaacgttttatctggctgaccaagctgaataacctgcgtattttgaatcaaggcagcgagcgtccgctgactgataccgaacgtaccacgcttatggacgaaccatacaaaaagtctaagctgacctatgcccgagtccgcaaattgctgggcttggacgatacggcatttttcaaaggtttgcgttacggaaaagacaatgccgaatccacaacgctgatggaaatgaaggcttaccatgccatcagtcgcgcactggaaaaagaaggtttaaaagacaaaaaatctcctttgaacctttctcccgaattgcaggatgaaatcggcacagcattctccctgtttaaaaccgatgaggatattacaggtcgtctgaaagactgtctgcaacctgaaatcttggatgcactgttgaaacacatcagcttcgacaagttcgtccaaatttctttgaaagcattgcgccgaatcgtgccgctgatggaacagggcaaacgttacgatgaagcctgcgctgaaatctacggggatcattatggcgagaaaaattcggaggaaatgctttatctgccgccgattcccgccgacgaaatccgcaaccccgtcgtcttgcgcgccttatcgcaagcaaggaaagtcattaacagcgtggtgcggcgttacggttcgccggtgcgcatccacatcgaaacggcaagggaagtgggcaaatcgttcaaagaccgcaaagaaattgagaaacgtcaggaagaaaaccgcaaagacagggaaaaagccgctgccaaattccgagaatatttccccaattttgtcggcgaacccaaatccaaagatattttgaaactgcgcctgtacgagcaacagcacggcaaatgcctgtattcgggcaaggaaatcgacttaggccgtctgaacgaaaaaggctatgtcgaaatcgaccatgccctgccgttttcgcgcacatgggacgacagtttcaacaataaagtgctggtattgggcagcgaaaaccaaaacaaaggcaaccgaacaccttatgaatatttaaacggcaaagacaacagccgcgaatggctggaatttaaagcacgtgtagaaaccagccgtttcccgcacagtaaaaagcaacggattctgctgcaaaaattcgatgaagaaggatttaaagaacgcaacttgaacgacacgcgctacgtcaaccgtttcctatgtcaatttgttgccgaccatatgcaactgaccggcaaaggaaaaagacgtgtatttgcttccaacggacaaattaccaatttattgcgcggcttctggggattacgcaaagtgcgtgtggaaaacgaccgccatcatgctttggacgcagttgtcgttgcctgttcgaccgttgccatgcagcagagaattacccgttttgtacgttacaaagaaatgaacgcatttgacggtaaaaccatagatgaagaaacaggggaagtgctgcatcaaaaaacacacttcccgcagccttgggactttttcgctcaggaagtcatgatccgcgtctttggcaagcccggcggcaaacctgaatttgaagaagccgatacgcctgaaaaactgcgcgcgctgcttgctgaacaagtatcttcacgcccgcaagccgtacacgaatacgtcgcaccactgtttgtttcgcgtgcgcccaatcggaagatgagcgggcaaggtcatatggaaaccgtcaaatccccaaaacggttggacgaaggcatgagtgtattacgcgtaccgctgacgcagttaaaactgaaagacttggaaaaaatggtcaatcgggagcgcgaacccaagctgtatgaagcgctgaaagcacggttggaggcgcataaagacgatcctgccaaagcctttgccgagccgttttacaaacaggataaagcaggtaacccaactcagcaggtaaaagctgtgcgcatcgagcaggtacaaaaaaccggcgtatgggtgcgcaatcaaaacggcatcgccgataatgcgactatggtacgggtagatgtgtttgaaaaagctggcaaatattatttggtgccgatttatagctggcaggtggcgaaagggattttaccggatagagcggtggtacaagggagagatgaagaagattggacggtaatggatgatagttttgagtttaagtttgtactttatgccaatgatttgattaaattaaccgccaagaaaaatgaatttttaggctatttcgtcagcctaaatagagcaactggagcgattgatattcgtacacatgatacggatagtacaaaaggcaaaaacggcattttccaaagtgttggtgttaaaaccgccctttcattccaaaaataccacatcgacgaactcggcaaagaaatcagaccatgccatctgaaaaaacggccgcccgtccgttaagtcaactcatccctgtttcagacgacctgaagcagggatttttcgtcgcacaaacacaaaggagaaaacacatgacatggcgcagcctgcttatccaaaacagcggcaaactgtcgctacaccgcgaacaaatgctgattcgtcaaaacggagaatcttataccgttcccttggaagacattgctgtcattgttgtcgaacatcgggaaaccctgattaccgccccgcttttatcggcattggcagaatatggaaccactctgctgacttgcgacgaacaattcctaccctgcggccaatggctgccttactcgcaataccaccgacaattaaaaactctcaagctgcaactgaatatcagcgaacccttaaaaaagcagctttggcaacatatcgtccgccaaaaaattctaaatcaagcatttgttgccgacgaaacaggcaatgacatcgcagccaaacggctacgcgcattggctgctgacgttcgctccggcgatacagggaaccacgaagcgcaagctgccgccctctattttcaagccgtgtttggagaaaaatttacccgcaacgatgacaacgctgtcaatgccggtctgaattacgcctacgccgtgattcgtgccgccgttgcccgatccctcgccttatatggttggttgcccgcattggggctgtttcataaaagcgaactcaaccccttcaatcttgccgatgactttatcgaaccattgcgcccgcttgccgacctgaccgtacttgatttacaagatcaaggtcgtctgaaaagcgaattaacgccgcaaaccaaacaagccttgatcagagtcctgcactcccaagtcggcatcgaacagcagaccttcagtacactggcagccatagacaaaatgattgcctcattccagccgagcatcgtcgcaaaaaacaccaaattgctgaaactgcccgacatcctgcctttgaaagaatatcaatatgagtgaggcaaaatttatgcggatcatcgtctttttcgacctaccagtcactaccgtcgccaaacgcaaagccgccaaccaattccgacatttcctattgaaagacggctatcaaatgctgcaactttcggtgtatagcagaattgtcaaaggcagggatgcgttacaaaaacactacaacagactgtgcgccaacttaccgcaagaaggctcgatacgctgtttggaggtaacggaaaagcagtttgctgccatgaaactgcttttaggcggactcaaaacccaagaaaaaaaggtcaattcagaccaattattgctgttctaatctccgttttttagacaaaagaaagcggggaatccttataaaataatgattccccgctgaggtattgtagcactgcgaaatgagaaagggagctacagcctgctgcccgtgacaggtaacagttgtcggattgtagcactgcgaaatgagaaagggagctacagccagcgggcagcgttcccgacgcgctggtcgattgtagcactgcgaaatgagaaagggagctacagcctgaagtacgagcagtatgacagttcttctattgtagcactgcgaaatgagaaagggagctacagcttgacaccattagaacaagacgcattgattattgtagcactgcgaaatgagaaagggagctacagcatggcaataactcaacctctttacaaaccgattgtagcactgcgaaatgagaaagggagctacagcatggcagctcctcaacggctttaactacctattgtagcactgcgaaatgagaaagggagctacagcttccgtctttggacattccgacaatcacgtattgtagcactgcgaaatgagaaagggagctacagcctcaacctttgtgcagcttcacatataggcattgtagcactgcgaaatgagaaagggagctacagcaggcaaaggaacagggcgatacatcgggaaattgtagcactgcgaaatgagaaagggagctacagctattcgccttgagataactcaacgcccggcattgtagcactgcgaaatgagaaagggagctacagctgattcacacggctttttagtcggacgcggattgtagcactgcgaaatgagaaagggagctacagcctgaaacatctgtccgagccgaggcgagatattgtagcactgcgaaatgagaaagaataaaatcagaagttgctaccgcatattactcaccacaggtcgtctgaaaactgaactgcaccccaaaagttggacatcccctccaactcacaaggtgcagtttttt

SEQ ID NO: 3195 - DNA, 14373 bp, synthetic construct
  source 1..14373: mol_type = other DNA
  misc_feature 1..14373: note = Synthetic
aaattacacgtattgatcgtgacagtacggcacgaaaaggcaaattagaggattatctcaccgatattcaacaggggaaaagtcaaattctgattggtacacaaatgctcgcaaaaggacaccattttcctaatgtgacgttggtggcgttagtgaacgtagatagtgccttattctctttagattttcgtgcagaagagcgcttggcacaactttatgtacaagtggcaggtcgtgcaggtcgtgtggagaaacaaggggaagtggtgctacaaacccattacccagatcatccattattacagcgtttgttgcagcaaggttatgcagattttgcagagtacgcgttacaattacgacaaaaaatgggcttgccaccgtttagtgcacaagcattgtttaaagcacaaagccggcattcagaagacgccgagcaagtcttgcagcaagttgctgagtatttttacacttggaatcaaagctcgcagtgtgcgatacaaattttaggaccgattgcggcacctttcagtaaaaaagctggtcaatatcgttggcaattattgctacaacatccttccagagcccagttacaccatgccttatcggcatttcaagcaacatcaacgattaaattcggttcagtacgttgtgtattagatgtggatcccattgatttaaattagcttgtgtttgagttataagggatttttcagtagaattgtgccaatttttatgaatgtttttaggaataggttttagcgtggcaagacgaaattatgccggtcgtggcagtagaaagaaaaagaaaggaacaagcaaaatggtattattactgttagtgggggtaatcattgccgttttcctatctgtgttgatgttgatgaaagagaaaaacgccaaaggaaattgtggcgcttcctaaaaagtgaaaatcaatcaacgaaaagtgtactaccaaatcgtccagaagaagtttggagttatattcaagcattagaaacgcgtactgtacctgttacggatgatccaaaatcttagtataagaatatgcgtttgacagaagagcaacgaaaaattttattggcgatggaacaagaacaaaaagcagcagaacaggcgcgtttaaaacaacaagaagaacagcgtaaaatagaagagaataaaaaagaagagagtaaaaaagacaatagcgcaacgctgataaaaacaaatgaaacccaaaatgggcaaactaaggcagtcaataaaccacaaactacacctgctgtgattgaagtgaaaaagggagagccggtgaaagaggtggttaaagtggaaccgcctaaaaaagtcgaggttatcaatgcggcaccgagtgagaaaaaatatggcttacaatgtggtgcatttaaaaacaaaacgcaagcagaaaacttgcaagcgcgtttagcaatgttagggctcaatgcaagggtcaattctaatcaagaatggaatcgagtagtaatcggaccggtaggtgatcgcgcctcaaccttgaaagctcaagaaaaagcgaaagcaatcgcacagtgtgtggtgattggtatgtaaatgtggtgtatgtaaaaaaaacgtgggagaatcccacgttttttttgtttttacacttgcttaaatattaaaaagtcttaaaatgaacgatcgttatttcagaaatacagatctatttctgactttttatttcattcatttagtgaacttattatgcgtcaatctgatatagatatgactgagcatatttttatggcaatcgatcacctgatggcgaaagaagggttacataatctttatatgcataaaattgcaaaggctgccaaaatttcaccagggaccatttatatttattttaagtgtaaagaggaattgctagaacaatttgctcagcaagtattcgcacgttttcagcgtgcattagaaaagaatcatgacgaccgtcagccattctttgaacaataccgccaaatgtggtggaacatttggcattttttgttggaaaacccaaatattttgttaaatatgcaccaatatcaatccctacctgggtttgataaggtgattaaatcgtgggatcgtagccactggacattgttttgcgaaagagcacagcaagccggtgaggtatgtgatttacccaccaatattctttttgcacttggactagaaagtgcaataaaaattgcttggaaacaaatttattttaaagaaacgttctctgttgagttgctggaatctgtgattcaacggacatggtgtgctattcaaaaataatttatcttttaattttacggagtttttgtatgagtgtgactcaagcaaatcaaccaaaacgatctcattcgattgccatgaaaatcattctcggcgttattgtcttactttttgctggggtcattatttttaatgtgatcaaaggcaaaatgattgaaaaatttattgcgggtgctggggaaaaaatttatcccgtaactgcaatgactattcagcctcagcaatggacacccgtgattgaaaccactggcattgtgcgtcctaatcagggcgcgatgttaagtgcacagacatcaggtacagtacagcaagtcttagttcaatctggacagcacgtgaagaaaggcgaggtgttagtggtattagacagttcagtagaactagcgaacttgaaagcatcccaagctcaacttttatctgtgaaagctacataccaacgttatttaagtttgtataaaaccaagagcgtgtcgcaacaagaacttgataatgcgaaatctgcttatgaagcattagagtcaaatatcgctgctttaaaagcgggcattgcacgtcgtcagattttggcgccttttgatggacaaaccggtattgtgaaagtcaacgtcgggcaatatgtcaatccaggaatggaaattgtacgtgttgaagacaccagtagtatgaaaattgatttcgccctttcacaaacggaattggaacacttacatgttggacaaaaaagtgacagcgactgctgatgcgcgtagtggtgaaacctttgcggcaaagattactgccattgaacctgcgatcagcgcaacaacagggttaattgatgtacaagccacctttgaaccagaagatggacgtaaactcctttctggtatgtttactcgcttacgggttgctttgccgacaaaatatgatcaagtcgttgtgccacaagtcgcgattaattacaacatgtatggggaaattgcttatattcttagcgaactttctgcagaagagcgtgaaacattagtcgcacgacaggatttcgaccgcgaaaaaattgacaatgcctatcgggttaaacaagtcactgtatttacccaagatcgtcaagggatttatgcccagttaaaaggggaagaaattaaacccggtgataaaattgtaaccggtggacaacaaaatttaagtaatggcagtttagtactcgtcgctgataaagccggggtgggaaccatgcaacctgctgtaaaaaataacctataaagtgcggttccaaagaggaaaaatttgatgaactacgccttattattaaaacaacttgaacaaattctagaacctgaaacctatatcatttcaagaatggcaaatacgtctgcttttttgtatcagcacatgccggaattaaactgggtcggattttatcttgtcaaagacggggtactcaaagtcggtcccttccaaggtaaagttgcctgttctgatattggctttggtaaaggagtatgtggttatacttggcaaacgggcacaacgaccgtcgtagatgatgtacatcaatttgcggggcatattgcttgtgatagcgcatcacaatcagaagttgtagtaccgatttttcaagggggagagatgattgctgaattggatgtcgactcacctcgtttagcccgtttttccgcagaagatgtagcctttttagaaaactgtgcggcacttatctgtattaaggaataggaaattaccatgcgatttaccgatatttttattcgacgccctgttttagcggtttctattagcttgctgattattattttaggattacaagcgattgcgaagttagcggtgcgcgaatatcccaaaatgactacgacggtgattaatgtttctacggtgtacccgggggcagatgcaagtcttatccaagcgtttattacttcaaaactagaagaagctgttgcacaagccgataacattgattacttatcttcaaaaagtagcccaaataactcgttaattacaattaaaatgaagctaaataccgaaccgaacggggctttagcagacgtgttagcgaaagtgaactctgtacgttcgcaattaccacgtgggattgatgatccggtcattacgtcttcgacggggggaacggggatgatgtacatccagtttagctccactaaactggatgccagtcaggtaacagactacattgaacgtgtgattaagccacaattctttacggttgaaggggtggcggaagtacaaatctttggggcatcggattatgcgctacggatttggttagatcctgccaaaatggccgcacagaatttatccgcgatggcagtcagaaatgcgttatcttcgaataatgtgcaaacggcggcggggaatgacaatggtttttatgtcacctataaaaataaagtggagacaaccaccaaatcagtggaagagctggggaatctgattatttcctcacaaggcgataagttagtgcgtttacgtgatatcgctgacgtagaattaaataaatcgagtgatagctcaagagcggttgctaatggttttgaatctgtggtgttagcgatcaatccaacctcttcagccaacccacttgttgtggcagaaaatgtgcgtccattgtatgagcaaattaagcaaaatttgccagatagcatgcaggcagaaattctttatgacaccacgatagcaattaataggtcaattgatgaagtaatcaaaaccattttagaggcgacaatcattgttttagtggtgatcacattatttattggttcattgcgtgcaattctcattccggtgattacgattccgatttctttgatcggcgtaatcatgctgttacaggcgtttgatttctccattaatttaatgactttacttgccttaattttggcgatcggactcgttgtggatgacgccatcgtagtgcttgagaacgtggatcgtcacattaaattaggcgaaacacctttccgtgctgccattattggtacacgtgaaattgccgtgcccgtgatttcgatgaccattgccctcatggcagtttactcgccaatggcattaatggatggcattacaggttctttgtttaaagagttcgccttaaccttggctggtgcggtatttatttctgggatcgtggcgttaaccctttcaccgatgatgagcagtaagttgcttaaaccgcacactgacccaagtaagttggaacaatgcatcgaaaaaatgctcaccaccattaatcatggctataactatgctttaaatctggtgatggcaagccgtcgttgtatgctggcttttgcggcggttatttttgctacgctgcctttcttgtttaatgggttagcgagtgagttaaccccagcagaagataaaggggcgttcatggtgattggtcgtgcaccgtccaatgtcaatgtggattatgtacaagaagcaatgcatgagtatgaacagattttgaaagacacaccggaagtggatttttccatggtgatttcaggggcaatggggagtaaccaatcctttagtgtggtgacattaaaagattggaaagaacgtacccgtagccaagcggaaatcttagcggagttaaataaaaaatcggcgcatattccagaagtggcgttgacgggatttaacttcccagaaatcaacacgggagagcaaggtccaccaattggttttgtgatcagtactgcgagtggctatgaagatttagccaatgtagcagaaaacttcctacaagaaatgaaaaaatccggtcactttgtttataccgcgttggatttaaaatttgatacggcgcagatgcggattaaagtcgataaagaaaaagcaggtacctatggtgtcacaatgcaacaaatcagtgccacattagggagtttcttgtctgccgccacgattgaacgagttgatattgatggacgtgcttatcgaatcatcatgcaagttaaacggggtgaacgtttgtcaccagaaagtttaaacaactattatgtgacggcaagtaacgggaaatcagtaccattaagcagtttcttaaccatgacgttagaatcacagccaacttctttacctcgttttagccagcttaattcagcggtcattagtgcagttcctctcccaaccaaaagtacaggtgaggcgattgcgtggttaaaaatggcagcgaaagagtatttaccgcaaggctataattatgactttactggtgaagcgcgtcagttagtccaagaaggcaatgcattagccgttacctttgtacttgctgtggtgattatcttcttggtcttagcgattcaatttgagtcaattcgtgatccgttagtcattatgatttcggtgccacttgccgtgagtggggcgctattaatgctgaatttcttaggcttcttccgtattcctggaaccagtctgaatatttactcacaggttggtttaatcacgctagtaggtttaattactaagcacgggattttgatgtgtgaagtggcaaaagaagagcaattacagcatggtaaaaatcgtattgaagcgattactgaagcagcgaaagtgcgtttacgcccgattcttatgacaaccgctgcaatgattgcaggtcttatcccgctcttgtatgcttcgggcgcaggtgcggtgtcgcgctttagtattgggattgtgattgtatcaggtttagcgattgggacattatttaccctgtttgtgttacctgtgatttatagctatattgcaacggaacataaaccactaccggaatttgatgaaagcataaaaccgttaacggataatagcgcacattaatttcaacataaaaaaaataccgcacttttgtgcggtattttttgcgtgaaaaacagaattaacgtgtatcttgttcagttgatggccatgcatttaccacagctttgactagagtggctaatggaatagcgaagaaaacgccccaaaagccccatagtccaccaaaaattaataccgcgataataatggttagagggtgcaaattgacggcttcagaaaaaaaggaacgggactaataagttaccgtctaaaatttggctgatgacgtaggcagtaatgatataccaaaaagtaggagtgatgccaaattgcgcgacggcaacgagggcaataggaatcgtgacaaggacggcaccaatataaggcacgagtacggatagccctaccgcaacagctaacaataacgaataatttaagttaaagaagacgaaaatcgcgtaagtcacggcggtgacaatgatgatttcgaataatttaccgcgaatataattcgcaatttgttgttgcatttctttccaaacgctcgatgcaagcgtgcggttacgcggaaggaaacggcttacactggcgattaattctgttttatcttttaataaaaagaataccattaaaggcactaaaaacgcataaatccctagggtgaccaggcttaataacgaggtcagggagaatttgagggcggattcaccaaagccaagaattttggagcggacagtacttaatacagaatcaatggtttggtaatccactagctcgggataatgttcaggtagagaaagtaaccactcattgagtttattaaacatatgtggcaaatcagtcactaaattcaaggtttgagtccataacgttggaatgaagaccaatacgataacgaggatcaaccctaaaaaaccaccaaaaataatggcagttgagagtaggcgtggaaacttgagtttttctgtgagaacgcgaattggccattccaataaataagctaatacaatagcgatgaggagtggcgcaatgaggtgactaaaaaaataaatggatataaaaccaaagagtaagatggcaaacaaccccatggcttgtggatcactaaaacggttgttataccagtttttcaacatttcgatcataagatatccttaatttaggcattttgagcgattataaggtaaaatctaataagatcatatcattaagcgaggaaattctatgtgcgtgactatatatcataacccacgttgttctaagagccgtgaaacgctagccttactcgaagcgaaatacggtcaaccgaaaattgaactttatttagaacaacaattctctgcctcacagttacagcaaattgcgcaaaaattaggagtaaccagtttccgagagatgatgcgcacaaaagatgaactctatcgtgatttgggcttagataagccggaagtcagcgaacaacaactgttggaagcattggttgcacatagtagtttgttggagcgtccaatcgtcattcatggtgacaaagcaaaaattggtcgtccaccagaatccgtacttgagattctgtaatttcgttttataatgacgcccgtttgtttcacacaaatgggcaatttttttatcacaacttatgaggaaaaatatggctaaaaagcaaaaacagccactcagtgcacagccttatcagcacagccgtggtgtcattcgcgataatgcaatttgtgcattattacatgatccgttgtttcgtcaacgtattgagaaaaaaaggaaaggaaaaggcagttatcaacgcaaagccaagcatgtagggaaatattttgaaaagcccgattataagatttttgatttgaaagattttataatcgggtttttcttaacgatattttacaacaatgcaactcatttaaactcagcgaggtaaatttatgactgtgcaaacggaagtcctttttagtaataattggaatgttagaatcagcgacccgggcgaagaaggggcacatagccatttctttgaaactatttatattaccttagtcgcccatattgatggctcgaatatttcttatgaatttacaagaaaagtcgaagaacaagttaaaattcaccgcactttttactgacttaagtgagcttttcaaattccttggtgattaccttgaccctgttagcatgggatttttagggattaaaattgggaatttgagtgttaaagcctaaacgtactttccccaaaaacgatgccccttgcaattaagaatcacaaggggcagagcgttacggtcattcttttcagaagccttattgtagcaacgtctctcatttcgcagtgcaacaatatgtgatccactctacattattgtgtaaatttaatcaacacatttttatttttactttaagataagaaaaacaagtaagttaatcaagacaaataaggaatacatatgcaaacaacaaatttaagttatattttaggtttagatttggggatcgcttctgtaggttgggctgtcgttgaaatcaatgaaaatgaagaccctatcggcttgattgatgtaggagtaaggatatttgagcgtgctgaggtacccaaaactggagaatctttagcactctctcgccgtcttgcaagaagtactcgccgtttgatacgccgtcgtgcacaccgtttactcctcgcaaaacgcttcttaaaacgtgaaggtatactttccacaatcgacttagaaaaaggattacccaacaagcttgggaattacgtgtcgccggtcttgaacgtcggttatccgccatagaatggggtgcggttctgctacatttaatcaagcatcgaggttatctttctaaacgtaaaaatgaatcccaaacaaacaacaaagaattaggagccttactctctggagtggcacaaaaccatcaattattacaatcagatgactaccgaacaccagcagagctcgcactgaaaaaatttgctaaagaagaagggcatatccgtaatcaacgaggtgcctatacacatacatttaatcgattagacttattagctgaacttaacttgctttttgctcaacaatatcagtttggtaaccctcactgtaaagagcatattcaacaatatatgacagaattgcttatgtggcaaaagccagccttatctggtgaggcaattttaaaaatgttgggtaaatgtacgcatgaaaaaaatgagtttaaagcagcaaaacatacctacagtgcggagcgctttgtttggctaaccaaactcaataacttgcgcattttagaagatggggcagaacgagctcttaatgaagaagaacgtcaactattgataaatcatccgtatgagaaatcaaaattaacctatgcccaagtcagaaaattgttagggctttccgaacaagcgatttttaagcatctacgttatagtaaagaaaacgcagaatcagctacttttatggagcttaaagcttggcatgcaattcgtaaagcgttagaaaatcaaggattgaagaatacttggcaagatctcgctaagaaacctgacttactagatgaaattggtaccgcattttctctttataaaactgatgaagatattcagcaatatttgacaaataaggtacctaactcagtcatcaatgcattattagtttctctgaatttcgataaattcattgaattatctttgaaaagtttacgtaaaatcttgcccctaatggagcaaggtaagcgttatgatcaagcttgtcgtgaaatttatgggcatcattatggcgaggcaaatcaaaaaacttctcagctactaccagctattccagcccaagaaattcgtaatcctgttgttttacgtacactttcacaagcacgtaaagtgatcaatgccattattcgtcaatatggttcccctgctcgagtccatattgaaacaggaagagaacttgggaaatcttttaaagaacgtcgtgaaattcaaaaacaacaggaagataatcgaactaagcgagaaagtgcggtacaaaaattcaaagaattattttctgacttttcaagtgaacccaaaagtaaagatattttaaaattccgcttatacgaacaacagcatggtaaatgcttatactctggaaaagagatcaatattcatcgcttaaatgaaaagggttatgtggaaattgatcatgctttacctttctcacggacttgggatgacagttttaataataaagtattagttcttgccagcgaaaaccaaaacaaagggaaccaaacaccgtatgaatggctacaaggtaaaataaattcggaacgttggaaaaactttgttgctttagtactgggtagccagtgcagtgcagccaagaaacaacgattactcactcaagttattgatgataataaatttattgatagaaacttaaatgatactcgctatattgcccgattcctatccaactatattcaagaaaatttgcttttggtgggtaaaaataagaaaaatgtctttacaccaaacggtcaaattactgcattattaagaagtcgctggggattaattaaggctcgtgagaataataaccgtcatcatgctttagatgcgatagtcgtggcttgtgcaacaccttctatgcaacaaaaaattacccgatttattcgatttaaagaagtgcatccatacaaaatagaaaataggtatgaaatggtggatcaagaaagcggagaaattatttcacctcattttcctgaaccttgggcttattttagacaagaggttaatattcgtgtttttgataatcatccagatactgtcttaaaagagatgctacctgatcgcccacaagcaaatcaccagtttgtacagcccctttttgtttctcgtgctccaactcgtaaaatgagtggtcaagggcatatggaaacaattaaatcagctaaacgcttagcagaaggcattagcgttttaagaattcctctcacgcaattaaaacctaatttattggaaaatatggtgaataaagaacgtgagccagcactttatgcaggactaaaagcacgcttggctgaatttaatcaagatccagcaaaagcgtttgctacgcctttttataaacaaggagggcagcaggtcaaagctattcgtgttgaacaggtacaaaaatcaggggtattagtcagagaaaacaatggggtagcagataatgcctctatcgttcgaacagacgtatttatcaaaaataataaatttttccttgttcctatctatacttgcaagttgcgaaaggcatcttgccaaataaagctattgttgctcataaaaatgaagatgaatgggaagaaatggatgaaggtgctaagtttaaattcagccttttcccgaatgatcttgtcgagctaaaaaccaaaaaagaatacttttttcggctattacatcggactagatcgtgcaactggaaacattagcctaaaagaacatgatggtgagatatcaaaaggtaaagacggtgtttaccgtgttggtgtcaagttagctctttcttttgaaaaatatcaagttgatgagctcggtaaaaatagacaaatttgccgacctcagcaaagacaacctgtgcgttaaattatatcatcccgatttcctctatataggcaatcgggattttttaggagttattatgagctggcgaagcatcttaattagtcagggtggtaaactatcgctacaacggaaacaaatgttaattcaacaatctaataactcgtttaccgttcctttagaggatattgctgttatcgtaatagaaagtaaagaaacccttattacagcaccactgctttctgctctcgcacaatatggtgtgaccttacttacttgcgatgaacaatttttaccttgtgggcaatggctcccttttggataatattacaggcaattaaaaaccttaaagctacaacttgagacaacattgccacagaaaaaacaactttggcagaaaatagtacagcagaaaatccgtaatcaagggtttgttttagaacaagtggggtattttaatgaaacgaagcgtctaaaccgaatggcaaaccaagtgaaatctggagacaaagaaaatgtagaagcacaggccgcattaatttatttccaaaccctgtttggcaaaacgtttaagcggagtgaggaaaataacattaacgcacaccttaattatgcttataccgtcttacgatcagccattgctcgagctttagtattatacggctggttacctcagctagggatatttcatcgcagtgaagtgaatccttttaatctagcagatgattttgttgaaccttttaggcctttagttgatttgatggtatggcaactatggcatacaaaccaactcacttcaggattatcgccaaataccaaacaaaaaacttatcagcttgctacatcatcaaatgtcatttcaagaagaaactttcagtgtactcgcggcaatagatcgaacagttggttcctttcaagcagcccttaccactccaaatgccaatttactaaaattacctgaaatactccccctaaaggagcatcaatatgagtgagggaaaatttatgagattaattgtcttttttgatttacccgtgacaacaaaagcaaaacgtaaagcagcaaatcaattccgtcaatttttattaaaagatggttatcaaatgttacaactttctgtatatgctagaattattcgaggtcgagactccatgcaaaagcataataaacggctcagtgaacacctccctgaagaaggttcaatacgttgtttagaagtgacagaaaagcaatttgcaggaatgaaaatactcttggggagattgagacttcaagagaaaaaagtaaacgcaaatcaaatgttgctgttctaagtaaactatttacctattctataaaaatagacaaaaagactattctctattttagcctagcgcatctcagaaccaggggtaacatacaacagatgttatcccagtcagacaaaatcaatgaactttttaaagaaaaattttctaaaaatagaatgcttaatatcgtgaattcaagtaatttttgagcattaaaaacgcccttatcccttgtgccacaaggataagggacacgagattgtagcactgcgaaatgagagagggaactacaactgtttggtggctgtttagatctggcttagtattgtagcactgcgaaatgagagagggaactacaacctgtaaaagtgggaagcaatgaaagaatcaattgt

SEQ ID NO: 3196 - DNA, 12826 bp, synthetic construct
  misc_feature 1..12826: note = Synthetic
  source 1..12826: mol_type = other DNA
agggcttgcggtgagaagccgttgtcgagtttcagacggcctacgttgaggatttccacctgcggcggccgcgcggcggggttggcgcggcgggcgagttccaataatcgatacgcgccgctttgggctttgtgccagctctccaaactcggcgtcgcgctgccgagcataatcgggcaaccgctctgcttcgcccgccacacggccaaatcgcgggcgtggtagcgcaattcgttgtcttgtttgaacgagctatcgtgttcttcgtccaccacaatcaacccgacatcggccagcggcgtgaacaccgccagccgcgtgccgatgaccagcttggcctgatttgccatcgcgcgaaggtaatcctgcgtgcgccgtccggcggcggtttggctgtgcaatacggcggtgggcacgtcggcaaaccgcgcctccacgcgcgccaaaagctgcggcgtgaggttgatttcgggcagtaaaaacaacacctgccgccccgatgccaacactttttccatcacatcaaaatacacttcggttttgccgctgccggtgatgccgtaaagcaaaaagggctgaaactgcccgaaggccgtctgaaccgcctgcgaggcggcgagctggtcggggttgagcgttttttcagagtgcgaagcctgcccgtggtacggcaccaacacgggtttgcccgccgtatgtgcgtctatccaaccctgcgccaaccattcgtccaccagcttggccgcctgcgcgttgatacgtttgagctgcgccatcgtcaggccgtctgaatcggccaaagcctgccacaacgcggcttttttgtgaaaacgcgccctcggcggctgctgcgccctgcccgcttcgtttaacgcgtaaaacagcggcggctgcggcatctccacggccttcggctctttcaaaccctgcggcagcgcgagcgaagcggtttggccgagcggatagtggtaatagcgcgaggcaaacgcaatcaggccgcgccagtcttcgggcagcggcatttcggcggtaaaggccgtctgaacgggcaaaatcttggccgggtcaaaatcgggcgcaataccggcttcccacacaatccccaccatcacgcgcccgcgaaacggcacggccacgcgcgtgccgggcggcagggcttcgggatgggaataggtcaaaaggccgtctgaaaggggcacattaagggcaatgcggtggtaaatcatgggcgtgggtagtttggggttgaggccgtctgaaaatagtttttcagacggcctttttatgcgtaggtcgggcatttatgcccgacattttccgttaccggtttgcacgtcgggcataaatgcccgacctactatagtgagtcagcacaaaaagatacaaggcagcaagccgaagacagtacaggtttgcttggcatttttgatgcagtagatttttatgttggctcactatattccgctgcaatcgggaaaagggcgtaatcgccgctcatctcgccgacggcggccagacggttgttgacaaagaggtattccgtttcaaaacagcagtcgctctcggcaatgcgccagttggtttcgccgatgatgtagagatagtcgtcggcgcagcggccgtgggcggggaagatgcaggcggtgtatgcgggttcggggcggtcggacgcgcggggaataatgcggcccgcgcggatttgttcgcgatagagcgcggccagttgccgccgcagcgccgcgccttggtcgggcagagcgaggaagtcggcgaaaatccgcctctggcgcggcgagaaaccggcataacggctgctttcgctgtagacccacaactcggcggcggcgttcagcggcggcaggaaaacgggttcgacggaagaagcgatgccgtcttctttggtaaagcggatgttttgcatattgtttgttcgagcggcgggaggccgtctgaaagcgtttttctgctttcagacggcctttgtgcgtcagcaaatcagggcagggggcgggtttcgatcagttcggggttgtcggcgttgtcgaacagtatggctttggtgcgcccctgccacatttcttggaacaggcgcagctcgtcggcggtggcggtgccggagacggctttgggcatgatgtcggccatttcgggggcgaaggggacgaggccggcgtggtaggacacttccacggccgatccggtgtcgcggcggcgcagggagaggacgccgtcgatgttgccgtcgaatgagagcaggttgcggcgggagaagcggcggtgcatgccgatgccgccgaagccttgttcggaggccgcgccggtgagcagggtggcgacggcggcgatcacgccggtcgtgccttcgtcgcgcgcgccctgcatctgcacttcgatgccgccgcgctcgggaatgtcgccgccgtagagggctttgaggccgcggtacaccatcaggtaggcgccggcgacggtggggcaggagtgtccggccagttttaccgcatcgaggtagcggtaggtaatcaggccgctttcggacgcgccgaggaaggcggccagcgggtcgcgcaggatgaggacgggggctttgctgtaataggtggggaaaccgtcggtgtcgtaggtgaggctcatgattgctccttgcagtgggtggaaaagtgggtttcagacggcctgtgcctgccgctgcgggaatgatgtttctgaaagcgcggtttcaacggagttgaaacgggtgcggctgcacggcggaaaacgggttttgtctttgtctgtgcggcgggcttttggcaaaacagcggcaggccgtctgaaaacggctgccgctgtccggattgcgccgcgcttattcggcgcaggtttcgacctgtgtcagttcggctgcggccggggcggctgcggcggggcggggcaggtcggcgcggcgtttgccctgcggtgcggccggtgtttgggcggctgcggctgcggccagtgcggcggcgtcggtctgcaccagcaccatgccttgcggcgcggcggggatttccgatgcggcggcgggcgctgctgcgcttgtaccgttttgcggtgcggggttgccggcggtttcgtccgcagcgtggctttcgccgacgatgagggcgacggcttcggcgactttttcgctgctgctgccgattacggcggcttcgtccgcaacagcgacggcggcgggtgcgtcgtcctgcggcgcggggatggtgatgaccagcggtttgtcgctgctgttctgcggcaggggggcggcggggcgggtttcgccgaaaacgtgcgccacggcatcgagtacgcggcctgcggcttcgtcgatcatcagatactgctcgattttggcggcggaggggatgttgcgttttttctcgttgcggcggctgccgttttggccgttgcggttgcggctgccgcgctcttggttgcggccgcgcgggttgcggcggttgtcgctttgtgcggacgcgttgccgttttgtccgctgtctgctgcgttgtcctgcggtgctgcggcgttttcagacggcctttcgtcctgtgcctgcatcagggcggcgggtgcgttttccgttacggattcggcttcgccgccgcgtttgccgcgtttgcggctgtcgcgtttttcgcctgcggcggcattttcgccgcgcggggtttcgctttcggtttcggcgggtgcgctttcgctgcggcggttgtcggcattgcggctgtttgcgccgctgccgcgtttgccgctgcggccgtttttgtcggctttgtcgctgccgctgtcgcctgtttcgctgtcggtttcgccttcgtcctgtgctttggcctgcgcgctgcgtgccgtctggctgcggttgccgctgcggcggcggttttgcgggcggcggctgccggaggtgcgtttgcgctcctgcggctgcggctcggcggcgggggtgtcgccgaagagtcctttgaaccagcttttgaatttgtcccaccagctgcttggctcttcggcggcaacgggggcgggctgggtgtgtttcacgcctttgacggcgggctcggggcgggcggctttgacgcgctcgccgccgaagggtttggcgttttcgtcggctttgggtacggaaacctgtttgtagctcggttcgccgtcttcttcgatgtcgtcggtgcggatgcggctgatttcgtagtgcgggttttccagacggatgttgggaatcagcatgacgctgacgtcgaggcgctcttccatggcgaagagttcggcgcgtttttcgtttaacaggaaggtggcgacgtcgacgggtacttgggcgtgcacttcgccggtgttgtccttcatcgcttcttcctgaatgatgcgcagcacgtgcagggcggtggattcgatgccgcggatgacgccggtgccggcgcagcgcgggcaggcggtgtggctggattcgccgagggcaggtttgaggcgctggcgggagagttcgagcaggccgaagcgggagagtttgcccatctgcacgcgggcgcggtcttttttcagggcgtcgcgcagggtgttttcgacgtcgcgctggtgtttggggttttccatgtcgatgaagtcgatgacgaccaggccgccgaggtcgcgcaggcgcatttggcgggcgacttcttcggccgcttccatattggttttgaaggcggtgtcttcgatgtcggcgccgcgggtggcgcgggcggagttgacgtcgatggaaacgagggcttcggtgtggtcgatgacgatggcgccgccggagggcaggctgacgctgcgcgagaaggcgctttcgatttggtgctcgatttggaagcgggagaagaggggggtgtggtcctgatagagtttcagacggcctgtgttggccggcatgacgtaggacatgaattcggaaatttcggcgtgcacttcggcgttgtcgaccaggatttcgccgatgtcggggcggaagtagtcgcggatggcgcggatgagcagcgagctttccataaagagcaggtagggttcttggtgggcgttgcctgcttcttcgatggcgtgccacagtttgagcaggtagtcgaaatcccattgcagctcttcgacgctgcggccgatgccggcggtgcgggcgataaggctcatgccgcgcggcacgttgagttcggccattgcgtctttgagttcctgccgctcttcgccttcgatgcggcgggagacgccgccgccgcgcgggttgttgggcatcaagaccagatagcggccggccagtgagatgaaggtggtgagcgccgcgcctttgttgccgcgttcgtctttttccacctgtacgatgacctgcatgccttctttgagcacgtcttggatgcgggctttgccgccttcgtagtcttggaaataggagcgggaaacttctttgaagggcagaaagccgtggcggtcggtgccgtaatcgacaaagcacgcttcgagcgagggctcgatgcgggtgatgacgcctttgtagatattgcctttgcgctgttctttgcccagcgtttcgatgtcgagatcgagcaggttctgcccgtcgacgatggccacgcgcagctcttcggcctgcgtggcgttaaacaacatacgtttcatgatgattgaccttgcgggcgggcgtgtttcagacggcctgccttgttggtacccacgaagcgcgtaatcagttttcggacggtgtgccgcagcggatgaggccgtctgaaaacggccggtgcggctttcgggtggatgaaagaaggcggttaaagaacggcgccggtaaaaccggcgcagcgcgcaccgtgtcggtgcggcatcggagggtctgccgccggacggagccggcgtcttcttgttatcttgtcgtctgcctgtttgcggtgttttgtgcggcgcggcgggagcctgtcgtcttatgccaaaacgggtcggcagtgtgatccgaacttaatcacggccttcgcgccgctgtcttgcacgggcgggaaggaaatgctttgcagagtacgtttttaattaatagaatcgcttttttaatacgttttgccctcgggcaaaacggcgcagattataagagaaaatgcagccgataagcaaaaattcagtcagccgggccgccgtgggcgaaaacgaagcggggcaacgccttgacaactatctgataaaaatcctcaaaggcgtacccaagagccatatccaccgcattatccgcgcgggtgaagtgcggctgaacaaaaaacgctgcaagcccgacagccgcattgcggcgggcgacattgtccgcattccgccggtgcgcacggctgaaaaggagaggccgtctgaaaaggggcaggacgcgcccgcgcgtgagtttgacaccgtttacgaagacgacgcgctcttggtcatcgacaaaccggcgggcgtggcggtgcacggcggcagcggcgtgagcttcggcgtaatcgagcagctgcgccgcgcccgacccgaggcgcgctatctggaactcgtccaccgcctcgacaaagataccagcggcctgctgatgattgccaaaaaacgcagcgcattggtgaagctgcacgaagccatccgcagcaaccacccgaaaaaaacctatttcgccctcggcgtcggcggtcttgcaaacgaccgctttcatgtgaaactgccgcttttgaaatacaccggcgcgcagggcgaaaaaatggtgcgcgtgagcgaagaaggccaaagcgcgcacaccgtattccgcgttctcaaccgcttttcagacggcctgctgcaccaggtcggcctgtcgcggctcacgctggttgaagccacgctcaaaaccggccgcacccaccaaatccgcgtccatatgcagtcgcaaggctgcccgattgcgggcgacgaacgctacggcgactatcaggccaaccgccgcctacaaaaactcggcctgaaacggatgtttctgcacgccagcgagctgcacatcgaccacccgctcacgggcgaaaaactcgtactcaaagcaccgttgccgcaggatttggcgcagtttgtgacgatgttggaacacggttgtcggaaatagccgacaagattgtacagaggccgtctgaaaacctttcagacggcctgtctttgtacacaattcgtttataatgccgcccctttttacccaacttaaattttcttaaaactatggacaaaccggcaaacagcctgctcgaacgcctcttcgggctttccgcacacaacaccggcgtacgcacggaaatcatggcgggcatcaccaccttcctgaccatgtgctacatcgtcatcgtcaacccgctcaccctgtcgcaggcgggcatggacttcggcgcggtgttcgtcgccacctgcatctccgccgccatcggctgcttcgtgatggggctggcggccaactaccccatcgccctcgcccccggcatggggctgaacgcctacttcacctacgccgtcgtcaaaggcatgggcgtgccctggcaggtggctttggctgccgtgttcgtgtcgggcatcatcttcttattgttcagctttttcaaactgcgcgaaatgctggtcaacgccctgccgatgagcctgaaaatggccatcgccgccggtatcggcctgttcctcgcccttatcgccctgaaaaacgccggtgtcatcgtgtccagcgacgccaccctggtcaaaatgagcgacgtttacatcctcggcgaaaacggcggcaaaagccccaactggccggtgctgctggccatgctcggcttttttcttatcatttttctcgactatttccgcgtgcgcggtgccatcatcatcggcattctcgccgtcaccctgctcggcatcgccctcgggcaggccgaattcaaaggcattgtttccgccatccccagcatccaacccaccctgctgcaaatggactttaacggcctgttccacggcagcatggtcgccgttatcttcgtgttctttctagtcgacctcttcgacagcaccggcaccctcatcggcacgacgcaccgcgccggccttttggtagacggcaagctgccgcgcctcaaacgcgccctcttggccgactccaccgccatcgtcgccggcgcggcgatgggtacgtcgtccgtcaccccctatgtcgaaagcgcggcgggcgtggcagcgggcgggcgcaccggcctcaccgccgtaaccgtcggcgtcctgatgctcgcctgcctgtggttctcgccgctggcgcaaaccgtccccgccttcgccaccgcccccgccctgctttatatcggcatccacatgctgcgctcggtgctggaaatcgactgggaagacatgaccgaagccgcccccgccttcgtcaccatcgtcttcatgcccttcacctactccatcgccgacggcatcgccatgggctttatcagctacgccgccatcaaactcctgtgcggccgtgccaaagacgtaccgccgatggtgtggctggtcgccgttttgtgggcggcgaaattctggttcttgggcgtgtaaaggccgctcccgccttcgcgggaacgacgtttctgaaaacgcccgaatggcaaaaggccgtctgaaaacccgaaaggggttttcagacggccttttgccgacagggggaagggattcgacaaacaaaaaacgatgccccttaaaaccggagttttaaggggcagagcgttacggcacatcttttcagacggccttattgtagcaacgtctctcatttcgctgtgcaacaataggcgaaatcttagtttgcggtgtcggaaatgtcaagaaaagatttacacaaaccctgttaataatatattgtgttaattttcattaataactaagcgagacacattatggcgccatttactttgaaaccattgaattacattttgggcttggacatcggcatcgcctcggtaggttgggcggtggtcgaaaccgattcagacgtcctgccttaccgtttgattgacgtgggtgtgcgtacgtttgaccgtgccgaagtgccgaaaacgggcgaatcgcctgcggcggcgcggcggctggcgcgcagcgtgcggcgcatgatccgcaggcgggcgcaccgtatgctgcgggcgcggcgtttgctcaaacgcgagggcatgttgcaggcggccgattttgacgcgcacggtttggtcgaaaatctgcccgtcaatccgtggcagcttcgcgtggatgcgttaagccgcaaactgatgcctttggagtgggcggcagtgttgctgcatatggtgaagcatcgcggctatttgtcgcagcgtaaaaacgaacggaacagcagcgataaggaattgggcgcgctgctgtcgggtgtggcggccaacagcgaagccttgcagggcggagatttccgcacgccggcggaattggcggtaaacaaatttgaaaaagaaagcggccatatccgcaaccagcgcggcgattattcgcacacgttcaaccgcaaggatgtgcaggcggaattggttttgctgtttgaaaaacaaaaagaatacggcaatccttatatttcagacggccttttgacaggcgtggaagatttgctgatgacgcaacgcgccgcgctttcgggcgatgcggtgcaaaaaatgctcggccgctgtacgtttgaacctgaagaatacaaggccgctaaaaatacctattcggccgaacgctttgtctggctgaccaagctcaacaatctgcggattttggatcagggcagcgagcggccgctgactgattccgagcgtgccaagctgatggacgagccgtataaaaaaaccaaactgacttacgcgcaggtacgcagattgttggaactcgacgatactgcgtttttcaaagggctccgctacagcaaggacaacgctgaatctgcaacgctgatggaaatgaaggcctaccactccatcagcggcgcgttggagaaggccggtttgaaaaacaaaaaaatcgccgctggccttatcgcccgaattgcaggacgaaatcggcgaggcgttttcgctattcaaaaccgatgaggacatcagaggccgtctgaaaggcaagctgccggacgaacagctcgacgcgctgctcgaatatgtgagcttcgacaaatttgtgcagctctcgctcaaagccctgcggaaaatcctgccgctgatggagcagggcaaacgttacgacgaagcctgtgcggaaatctacggcgaccattacggcataaaagacgacaagcaggcgcagtttctgccgcccgtatccgccgacgaaatccgcaatccggtggtgctgcgcgcgctgtcgcaggcacgcaaggtggttaacgccgtggtgcgccgctacggttcgccagcgcgtgtccacatcgaaacggcgcgcgaagtgggcaaatcgtttctagaccgcaagaaaatcgaaaaacgccaagaggaaaaccgcaaagaccgcgaacgctctatcgccaagttccgcgaatattttcctaattttgtcggcgaacccaaagccaaagacatcctgaaaatgcgcctttacgagcagcagcaaggccaatgcctctattcgggcaaggcgatagatttacgccgtctgaacgaaaaaggctatgtcgaaatcgaccacgcgctgccgttttcgcgcacttgggacgacagtttcaacaataaagtcttggtgttggccggcgaaaaccaaaacaagcgcaaccaaacgcctttcgagtggctcggcggcgatgaaaaacgctggcgcgaatttaccgcgcgggtggaacactgccgtttcccgcgcagcaaaaaacagcggattttgatgcagaaacttgatgaaaaggattttaaagagcgcaatttgaatgacacgcgttatgtaaaccgctttttgtgcaactttatcgcgcaaaatatgctgcttaccggcgaggataaaaaccgcgtgtttgcttccaacggccagattaccaacctgttgcgcggcatgtgggggctgaaaaaagtgcgcgaaagtaacgaccgccaccacgcgctcgatgcggtcgtcgtggcctgctccaccgtagcgatgcagcagaaaatcacgaattatgtgcgccaaaaagagatgaatgtatttgacggcgaaatggtggataaaaccaccggcgaagtgtcgcgcctgcattttccgcagccgtgggattttttccgccaagaagtgatgatgcgcgtgttcggcaagcccgatacgccgtctgaaaacaatgaagaagccgatacgccggaaaaactgcgcgcgctcttggccgacaaactctcttcgcgccccgaagctgtacacgaagccgtaacgccactgtttgtatcgcgcgctccgagccggaaaatgagcgggcaggggcatatggaaaccatcaaatcggccaaacgcttgagcgaaggcaagagcgtattgcgcgtaccgctgacgcagttgacgcccaagctgctggaaaacatggtcaaccgcgagcgcgagccgcagctttacgaagacctgttaggccgtctgaacgcacacggcggcgatccggccaaagcctttgccgcgccgtttttcaaacgcgacaaagcaggcaatcctacccagcaggttaaggccgtgcgtgtggaagatgtgcagaaatcgggcgtaatcgtgcgcgaaggcaacggcgtggcagacaatgcaacgatggtgcgcgtagatgtgtttgaaaaaggaggaaaatattatctgatgccgatctacacctggcaggcggcaaaagggattttgccgaacaaggcagtgattgctcatactgatgaagcaaactggcaggaaatggatactagttttacgtttaaatttgcgctttatccgaatgatttggttctcgctagtcttaaaaaagaaacttatttcggctatttcgcaggattggatcggtcaactggaaacattagtctacgtgtgcacgatttggaaaaatccaaaggcaaagacggtgtgtaccgtatcggtgtcaaaaccgccttatctttccaaaaataccaagtcgacgaattgggcaaaaccatcagaccatgccgtctgaaaaaacgcccgcccgtgcgttaaaagcaacgcccctgtttcaggtcgtctgaaacaggggcattttgtttataccaaccaaaaatgacaaaggggaacatcatgacctggcgcagcctgcttatctcaaacagcggcaagctctcattgcagcgcaaacaaatccttatccaacaaagcggcgaatcctatactgtccccatcgaagacatcgccgtcatcgtaatcgaacaccgtgaaaccgttatcacagcccccttgctctccgcattggccgaacacggcgcgaccctgctgacctgcgacgagcagttcctgccctgcggccagtggctgccttattcgcaataccaccgccagctcaaaaccctcaagctgcaactgggcatcagcgtgccgctcaaaaaacagctttggcagcacatcgtcaaacaaaaaatcctcaaccaagcctttgccgccgacgaaaccggcaacgacatcgccgccaaacacctgcgcggcctggctttggaagtcaaatcaggcgacaccggcaaccgcgaagcccaagcagccgcactgtatttccaagccatgttcggcgaaacatttacccgcagtgacagcaatgccgtcaacgcacatctcaactatagctacgccgtgttacgcgctgccatcgcccgcagcctgactctatacggatggctgcccgcgctcggcctgtttcacaaaggggctgtactagataagccctaaatt

SEQ ID NO: 3197 - DNA, 12330 bp, synthetic construct
  misc_feature 1..12330: note = Synthetic
  source 1..12330: mol_type = other DNA
  variation 1887..1986: note = note, n is a, c, g, or t
aagttacctgccacgccacccaataccgcaccagcagcagtgttgcgctgggtttgagtcatattggcacatgcacccaaagaagcggccagcatgatcaaggtcacagtttttgcaaaagttttcttcatggtttgattctccatcaggggttaagctgtatatagagcagtatggcacaacctttcattaatatattttctgataagtaaagacagattaaactaagataacgctcttgatgaacggttaacttcaaaaataaacggcaattccaatattatatttataaaatttaatatatttggcataaaattgcgcatacatcaaccgcattcggtagtgatacaatgacgacttgtctgaattaccggaaacacccgtcatgagtatctacgcactggcacacatcatccacgtttattgcgcgattgcctttgtcggcggcgtatttttcgaaatgctggttctctccgttttgcacaccggccgcgtttcgcgcgaatcgcgccgcgaagtcgaacgtgccatgtcctatcgtgccgtccgcgtaatgccgcctgtcgtcattaccttgttcatcagcggcatcgtgatggtgtacaaccgctacctgccgatacttcaccacccattcgacagctctttcggcatcatgctgagcatcaaaatcctgttggcaataagcgttttggtacattttgccatcgccgtcgtcaaaatggcacggcacaccctcaccgtcggctggtcgaaatacatacatgccgtcgtattcagccatatgctgtttatcgtcttttttgccaaggcgatgttctacctgtcttggtaaaccttacccataccccacacacaaggattgtttatgacccaatacccgtccgtcggctcgccgatgttttacggcatcttctttattgccgtcttaatcatgatcgccatcgatatggtatcgctgaaaaaaaacggcgcccacaaagtcagcataaaagaagccctcgcctggagcggcatttgggtggccgtatcctgcacgtttgcaggctggctctattttgaactggcgggcaacccgacttacggggccgttgtcgccaaagaaaaagtcctcgaattcttcaccggctatgtactcgaaaaatcccttgccgtcgataacatcttcgttttcctgatgattttcggctacttcaaagtagaacccaaattccaacaccgcgtcttactctatggcgtattcggcgccatcgtcctgcgcgccatcatgatcttcatcggcgcagccttggtacaacaatttgaatggattttgtacctcttcggcgcattcctcttatacaccggcattcacatgatgaagcccgaagccgaagctgaagaagacctttcccaaaacaagatcctgactctgctcaaaaaagtcatcccgaccagccaacagtttgacgatgaaaaattctttaccatcgaaaacggcaaacgtatcgctacgccgcttttgctggtattgattatgatcgaattgagcgacgttatcttcgccgtggacagcattcccgctatttttgccgtaaccaccgaccctttcatcgtcctcacttccaacatttttgctattttgggtcttcgtgccatgtactttttgctggcagactttgccgaacgctttattttcctcaaatacggcttggctttcgtattgagctttatcggtatcaagatgctgattatgcactgggtacatatcccgatttccatttccctgtctgtcgtcttcggcgcactgggtgcgtccatcctgacttctttggtatatacgcgtcagcaagagaaaaaataatctgccgatataaaaaggccgtctgaacatttcagacggccttnnnnnnnnnnnnnnnnnnnnnnnnnnnnnnnnnnnnnnnnnnnnnnnnnnnnnnnnnnnnnnnnnnnnnnnnnnnnnnnnnnnnnnnnnnnnnnnnnnnnggccgtctgaacatttcagacggccttttcaaatatcaaacatcagcttatttagcagcgtctttcaatttgtcggcagcttcttgagtcgcatcggctgctttacccatagcgtctttagctgcgtctttggcagcatccttagcatcagaaaccgcttctttagcttcttcaaccgctttaccggcagcatctttagcatcagaaactgctttatctgcagttgctttagcatctgcagcagcgtctttaacatcagaaacagcttgctcagccgcacctttggcttcagaagcagcagcatccacagcagaagctgcattttcagcagcagcgtttacatcggaagcaacagcagaagccgcctcttgggtttcttttttcgcttcttgtgtacacgccgccaagccggctaccatcattgcagcaatcaataattttttcatgttgtatatcctttggtctaaaaaatatccgtcaaaactgacagacccaaaaatcataacataataaatgctcaaaaaaggaagaattaacgccaaataacagccaatttacgttttttgaaaaaaatttcaaaaaaatagttgacgaaaagaaacaagttccctataattcacagcttatcgggtcgttagctcagtcggtagagcagcggacttttaatccgttggtcgagcgttcgaatcgctcacgacccaccaaatatgaaaacctgctttttttcaaagcaggttttttttatattctccatcaaacctttcttcactcaatacctcccttattatcaacatcaagaatattcgagctttgtcacaatgctgttatagatgtgactgaaagcatcacaaacctcttgaatcaatcaaacccaactcctcacccaacatctttttctaaaaacttccaaatacctaccatcaacccacgctaaatcctcttgtatgccagacaatttaggcatagactaaaactacatccaactacaacaacaggagaaggtttgatgaaacaactgtctatgtatattaacggccgctttgaaaccgattttaacggcgcatggcgtgatgtattgaatccggcaaccgaagaagtcatcgcacgtgagcctaaaggcggaaaagccgatgttgatcgtgccgttgctgcggccagagatgcacaaactgcatgggagcgtttgcctgccgttgaacgcggcgcatacctgcgcaaaattgcccaaggcatccgcgaacgcgccgacgagctgaccgacaccattgtcgccgaaggcggcaaaaccaaagatttggcacgcatagaagtcatgttcactgccgattatctcgactaccaagccgaatgggcgcgccgttatgaaggtgaaatcatccaaagcgaccgcccgcgcgaaaatattttattgttcaaacgtcctttgggcgtaatcgccggcattttgccgtggaacttcccattcttcctgatcgcccgcaaaatgggcccggctttggtaacaggcaataccatcgtcgtcaaaccaagcagcgttaccccgattaactgccacatttttgctgaaatcgttcatgcttcaggcttaccggccggcgtattcaacgtcgttaacggccctggcgcagaaatcggcaatgccttggcatcacatccgcaagtcgatatggtcagcctgaccggttctgtcgatgcaggccgccaagtgatggaagcagccgccgccaacattaccaaagtctcactggaactgggcggcaaagcccctgccatcgttctgaaagatgccgacttggatctggccgtcaaatccatcttggcttcacgcgtgggcaataccggccaaatctgtaactgcgccgaacgcgtgtatgtccacaacagcctgaaagacgcgtttatcgaaaaaatgaccgccgccatgaaaggcgtacgctacggcaacccggccgaagccgaagcaggcgcgctggaaatgggtccgctgattgaagagcgcgctgtcaaagccgttgctgaaaaagtggaacgcgccgtcaaacaaggtgcgacactggtctgcggcggcaaacgcgccgaaggacgcggctatttcttcgagccgaccctgctgaccgataccgacaacagcatggacatcatgaaggaagaaaccttcggtcccgtcctgccggttgccactttcgacacgctcgatcaagtcatcgctttggcaaacgacagcgaattcggcctgaccagctccgtctataccaccaatctgaatgaagcgttttatgtaacccgccgcctgcgtttcggcgagacatacatcaaccgcgaaaactttgaagccatgcagggcttccatgccggttggaaaaaatcaggtatcggcggcgcggacggcaaacacggtttggaagaatatctgcaaacccaagtcgtttatttggaaaccgatatctaactgcccttcatgaaacaaaaggccgtctgaagttgatttttcaggttaaactgcacccaaaaagttgctactccaactaacaaggtgcagtttttttataactaatttttattaaataggaaagtaaccatgttgcacaaaatcgggataatgagcgcattgatcttgggttttgccatgccggctactgccgaatgtttgattcaaaaagacagtatcggaggaattaaattagggcagaacttaaagcaggtaaaacagaaattcccgaaggcaaaaatggaaagagaaagcgatgccgaaggtgtggcgtttgttgccattacgctatctaaagacgttatggttatcgcttttcaagatggagacgacgatcctgattctcctataaaactccataaaaaaattaattttttggaaaccgattctcctacctgtcacacggcttcaggtgtacacccgggcatgaagattaaagatgcagaagccaagttgggcaaagtcaaaaaaatcataatgtcggaaatagaagcgcgtgaatatgtaacatttgcccgccaacctaaacattttacatttgaagtggaacgtggaacagggatttatccgggtaaaggtggagcaccgaatcaaactcggcgttaccgtcaaatggcacgtattgaagcaatttccgtatctaaatccagaggttttgataattgaagagcaagatattagacagaatgaactacatccccaaagttgccctccaactaacaaggtgcagtttttttatgtccctatatgcattacacttcaaataccaagaccaataccacatctcacgcacccatctgcaacgttggataaccgcctgtcaggaaagcggcatcggcgcactcaaacccttcagtccaaaatcttgaccgaccaccgcaaaaatcccttcatcgccgacaagccgatcacaaaaatacagttttttggggggcagttcaggtttcagacggcctttctgcctttatagaaaaaaacaccgacatcgcgtaaaatagagccaatttttcactttattcaggccgtctgaaaactccggcagcctgactcattttccggaaaacaccatgagcgaacaaaacaatccgcaaaccgagccgcagttggacgaaaaccaaatcatcgccctgcgccgcgaaaaactgcacaacatccgccaacagcgcattgcctatcccaacgacttcaagcgcaacagctttgccgccgatttgcacgcccgatacggcgaaatcagcaaagaagaactcgacccgcaagccgttcccgtcaaaattgccggccgcatgatgctcaaacgccaaatgggcaaggcgagcttcgccaccatccaagacgtaaccggtcaaatccagctttatctgaacaacaaaggcgtgagtcaggaagttttggacgatttcaatcattgggacttgggcgacatcgtcggcgcggaaggcactttgttcaaaaccaaccacggcgaattgaccgtgcgcgtgtccgacatccgcctgctgtccaaatccctgcgcccgctgcccgacaaacacaaaggcttgagcgatcaggaaaccaaataccgccaacgctacgtcgatttgattgccaacgaagagtcgcgcaatacgtttatcaaacgcagccaaatcatccaatccgtgcgcaatttcatggtgaacgagcattatctcgaagtcgaaaccccgatgatgcacccgattcccggcggcgcgacggcgaaaccgttcgtgacccatcacaacgctttggacatcccgctctacctgcgcattgcccccgagctgtatctgaaacgcctggtggtcggcggtttggagcgcgtgttcgagatcaaccgcagcttccgcaacgaaggcatgtccgtacgccacaaccctgaattcaccatgatcgaattctacgaagccttctccgactacgaacgcatgatgcaaatggcggaagacatcatccgcaacgcttcccgcgcagtaaacggcacggcaaaaatcagctacaacggcaaagaagtcgatttggaaagcccgtttgaacgcctgaccattctcggcgccatcaaaaaatacaatccgcactacaccgatgagcagttgaacgatgaagaatggctgaaaaaagaaattgtcaaacacggcgaaagcctgcctccgtctccaggcatcggcagcctgcaacttgccctgtttgaaggttgcgccgagggcaagctgtggaacccgactttcatcatcgattaccctgtcgaagtatcaccattggcacgcgcatccgacagcaaaccgggtttgaccgaacgcttcgagcttttcgttgtcggccgcgaactggcaaacggctactccgagttgaacgatccggaagaccaagccgaacgcttcaaagcgcaagtggcgcaaaaagacgctggcgacgatgaagccatgcactatgatgccgactacatccgcgccatggagttcggtttaccgccgaccggcggctgcggcatcggcatcgaccgcttggtaatgctactgaccgattcacaaaccatccgcgacgtgattctgttcccgcaaatgcgtcccgaataacgcattgaaataaaatcaaggccgtctgaaaacaagactctgttttcagacggcctttttgttcaaatatgtaaaacggaagagtttaaatcgataaatcctttacaccataataataaaattacatgataatcaaaaagataatataaaaaagaatatgtaaacgtttttcagtttgttgacagtctgctagaatacatccagttacagacagcctccacacacaggccgtctgaaaatgcagaaactctgaaaggtttgtatggatcaatttttcgaacagcttcacggctggataaacgccatcaacgacccaatgtggtcggggttggtatatatgcttttaggcgcaggcctctttttcaccgttaccaccggttttgtacaattccgcctcttcggccgcagtatcaaagaaatgttgggcggccgcaaacaaggtgatgatccgcacggaatcacaccattccaagcattcgttaccggcttggccagccgcgtaggcgtgggcaacatcgccggcgtggcgattgccatcaaactcggcgggccgggcgcggtattctggatgtgggtaaccgccttaatcggcatgagttcggcgtttgtcgaatcttcactggcccaactctttaaagttcgggactacgacaaccaccacttccgcggcggtcctgcctactacatcactcaaggcctgggacaaaaatggctgggcgttttgttcgccctgagcctgattttctgtttcggctttgtatttgaagccgtacagaccaataccatcgccgataccaccaaagcggcatggggctgggatcaacactatgtcggtgtcgccctggtcattctgactgcccctattatcttcggcggtatccgtcgcgtatctaaagccgcggaaattatcgttccgctgatggcggttttatatctcgtcatagcactcttcatcattgctaccaatatttccctgattcctgacgtgttcggtcagattttctccaacgcgttcaacttcgattcggctgcaggcggtttcctcggcggtctgatttcgaccaccatgatgcagggtatcaaacgcggcctgtattccaatgaggcgggtatgggttccgcgccgaatgccgccgccgctgccgaagtgaaacaccccgtctcccaaggcatgattcaaatgctgggcgttttcgtcgataccatcatcgtctgctcatgcacagcctttatcatcttgacctatcagcagccttacggcgacctgagcggtgcggcgttgacgcaggcggcgattgtcagccaagtgggtcaatggggcgcgggcttccttgccgtcatcctgtttatgtttgccttttcaaccgttatcggtaactatgcctatgccgagtccaacgtccaattcatcaagagccattggctggttaccgccgttttccgtatgctggttttggcatgggtctacttcggcgcagttgccaacgtacccttggtatgggatatggcagacatggcaatgggcatcatggcatggattaacctcgtcgccatcctactcctgtccccgcttgccttcctgctgttgaaagactacacagccaagctgaaaatgggtaaagacccagagttcaaactctctgaacacccgggcttgaaacgcaaaatcaaatccgatatctggtaaaaccaaaggccgtctgaaatttcagacggcctttttaatccctgccatttagacaaaacgatgccccttaaagcagaagccttaaggggcagagcgttgcggcacatcttttcagacggccttattgtagcaacgtttctcatttcgcagtgcaacaatatattcaaattctaattccaaatcggcacccagtcaagcatttcatttgcatagtaatacttacctaggatatatttatacttaccaaacatcacattacggagaaactgatggctgcattcaaacccaacccaatcaactacatcctcggcctcgatatcggcatcgcatccgtcggctgggcgatggtagaaattgacgaagaagaaaaacccatccgcctgattgatttaggcgtgcgcgtatttgagtgtgcagaagttccgaaaacaggtgactctctcgcagcggcaagacgcttggcacgcagtgttcgccgcctgactcgccgtcgcgcccatcgcctgcttcgggcccgccgcctattgaaacgcgaaggcgtattacaagccgccgattttgacgaaaacagcttgatcaaatccttgccgaatacaccgtggcaacttcgcgcagccgcattagaccacaaactgacgcctttagagtggtcggcagtcttgttgcatttaatcaaacaccgcggctatttgtcgcaaagaaaaaacgagggcgaaactgccgataaggagcttggcgctttgcttaaaggcgtagccgacaatgcccatgccttacagacaggcgatttccgcacaccggccgaattggctttaaataaatttgaaaaggaaagcggccatatccgcaaccagcgcggcgattattcgcatacgttcagccgcaaagatttgcaggcagagctgaatttactgtttgaaaaacaaaaagaatttggcaatcctcatgtttcagacggccttaaagaaggtattgaaaccctgctgatgacgcaaagagattccattcctgatgaaagtgctattctgcggatgcaaggaaaatgtacttttgaaaaaaataaatctagggcagcaaaacatagttggagcgcagaacgttttatatggttaagcaagttggctaatttaaggataacggatgaatttggcactaggaaattaactgaaatagaacgtcaaatacttatagatcttccatataaattaaagaccgtcagctatcaacaagtaaggaatgccttaacctccctttctcccaatgctctttttaatatcggatatcataaaaaagataaaaaagggggagataaaatcatcagataaaattgaaaaagatacgaaattcatggaaatgaaattctggcacaaaattaaggaaactttagaagggaatggaagaaaaacagaatggcagagcctttcaagcaatcataatttactagatgaaatcggaacagtttttaccatctgtaaaaatgatgagagaagaaaagtcctcttgaccggtaagataaaagaagatcaagatattcttgatattttgtgtgatcatgttgattttacatgcactgtgaatttatctttagaagcattgaaaaatatccttccttttatggaacaaggtgatgactacgatactgcctggagaaaagtttatcctccgcaatcaactaaaaaagaatctgttctgccgcccatccctgccgacgaaatccgcaacccagtcgtcttgcgcgccttatctcaagccagaaaagtcattaacggcgtggttcggcgttacggctcccctgcgcgtatccatattgaaacagcaagggaagtgggtaaatcgttcaaagaccgtaaagaaattgaaaaacgccaagaagaaaaccgtaaagaccgtgaaaaatccgctactgaattccgagagtatttccccaattttatcggcgaacccaagtccaaagatattctgaaactgcgcctgtacaagcaacaacacggcaaatgcctgtattcgggcaaagaaatcaacttaggccgtctgaacgaaataggctatgtcgaaatcgaccatgccctgccgttctcgcgcacatgggacgacagtttcaacaataaagtgctggtattgggcagcgaaaaccaaaacaaaggcaaccaaaccccttacgaatacttcaatggcaaagataacagccgcgaatggcaggaatttaaagcgcgtgtcgaaaccagccgttttcctcgcagtaaaaaacaacggattctgctgcaaaaattcgacgaagacagctttaaaaaacgcaatctgaacgatacgcgctacgtcaaccgtttcctgtgccaatttattgccgaccgtatgcggctgacaggtaaaggtaaaagacgtatctttgcatccaatggacaaattaccaatctgttgcgcggcttttggggattacgcaaagtgcgtgcgggaaacaaccgccatcacgccttggacgccgtcgtcgttgcttgctcgaccgttgccatgcagcagaaaattacccgttttgtacgctataaagagatgaacgcgtttgacggtaaaaccatagataaagaaacaggagaagtgctgcatcaaaaagcacatttcccgcaaccttgggaatttttcgcacaagaagtcatgattcgcgtcttcggcaaaccggacggcaaacccgaatttgaagaagcggatacccccgaaaaactgcgtaccctgctcgcagaaaaattatcctctcgtcccgaagccgtacacgaatacgttacgccactgtttgtttcacgcgcgcccaatcggaagatgagcggtgcacataaagatactttgagatctgctaaacgatttgttaaacataatgaaaaaattagtgttaaacgagtatggttaaccgaaatcaagttggccgaccttgaaaatatggttaattataaaaatggtagggagattgaattatatgaggctcttaaggcacgtttaggggcatatggaggtaatgctaaacaagcatttgaccctaaggacaatccgttttataaaaaggggggacaactggttaaagctgtgagggtcgaaaaaacccaagagagcggagtcttattaaacaaaaaaatgcttataccattgcagataatggagacatggtacgtgttgatgtgttctgtaaagtggataagaaaggaaaaaatcagtattttattgttcccatctatgcttggcaggttgctgaaaacattcttcccgatattgattgtaaaggataccggattaatgatagctatacattctgttttagcttgcataagtatgatctgattgcttttcagaaagatgaaaaatctaaagtagaattcgcctactatatcaactgtgatagctctaatggacgattctatttagcttggcatgataaaggctctaaagaacagcaattccgtattagtacccaaaatcttgtattgatgcaaaaataccaaatcgatgaactgggcaaagaaatcagaccatgccgtctgaaaaaacgcccgcctgtccgctaaattaatctatccgagacctttgcaaaaaagcccttccccaac

SEQ ID NO: 3198 - DNA, 10516 bp, synthetic construct
  source 1..10516: mol_type = other DNA
  misc_feature 1..10516: note = Synthetic
ggcgtcggtggccgcagatgtcgccgtgtccgatgccgtgccgtcggtggctgaaggcccggagggaccgggttttgtccatctgcggatgcgttccgagtattcggtggtggattccatcgtgcggctggatgaggccgtggcggcggccgtggccgacgggcagacggcgctggcgctgtcggatgcgtccaacctgttcggctgggtgaagttctacaagcaggcttcgggcaaggggctgcagcccatctgcgcggccgatgtctggatcaccaatgccgagaaccgtgatcggccgtaccggctgctgctgatcgcagccaacaatgccggctaccggcggctgtgcgagctgctttccagggcctggctggagaacgagtacaagggccacgccgagctgttgcccgaatggctgacggcggagacgacgggcgggctgattgcgctgtcgggggccggtggcggcgaggtgggccagttcctgctggcgggcaaccatgcccgggcggtcgaggcggcgcaacactgggccgcggcgttcccggatgccttctatctggaggtgcagcgcgacggcacgcccgaggccgagagctgcacgcgggccacggcgcggctggcggtggagctggacctgccgctggtggccacgcaccccatccagttcctgcgcgaggaggattttcgggcgcacgaggcgcgggtgtgcattgccgaaggtgaggtgctggctgatccgaagcgggtgcggcgcttccagccgacacagtatttccgcacgcgcgcggagatgatggcgctgttcgccgacctgccggcggcgctggccaactcggtcgagattgcgcggcgctgtgcggtgacgctgcggctgggcaatccgcagctgcccatctacccgacgccggaaggggtgtcgatcgaggagtatctggttcaccaggccgaggacgggctggcaaagcggctggagaggctctatcccgatccggaggtgcgggtgcagaagacgcccgagtacgaggcgcggctcaagcgcgagtgcgagaccatcatcaagatggggttcccgggctacttcctcatcgtggcggacttcattgtctgggccaagcagaacggggtgccggtggggccggggcgggggtcgggtgcgggttcgctggtggcgttctcgctgggtatcactgacctggatccgctgccgtatgccctgctgttcgagcgcttcctgaacccggaacgggtgtcgatgcccgacttcgacatcgacttctgccaggacaaccggggcaaggtgatcgagtacgtgcgccgcaagtacggctacgacgcggtgtcgcagattgccaccttcggcacgatggccagcaaggcggtgatccgcgatgcgggccgggtgctggacatgccctacaacttctgcgaccagctctccaagctgatcccgatcgagcaggccaagccgctgtcgctggacaaggcgctcaaggccgagcctcagctggccgagcggctggccaacgaggaggaggtggcggagctgttcgcgctggcgcggccgctggaggacatgacccgcaacatcggcatgcacgcgggcggggtgctgattgcgccgggcaagctcacggacttctgtccgctctaccgggcgccaggcaccgattcggtggtcagccagtacgacaaggacgatgtggaggcggtgggcctggtgaagttcgacttcctgggcctgcgaaacctcaccatcattgacctggcggtgcgctatgtgaacgagcggcgcgcgcgcgaggggcaggagccgctcgacctggacaacctgggcttcgacgatcaggcggcctatcagatcctgcgtgacggcaacacggtcgccatcttccaggtggaaagtgacgggatgaagaagctgctgagaaagcaaaaaccttaaactgataggaggctggcatggatgtcatgcgagttgaagtggtaagtaacgaatataacatctattcaggcgaggccagctttgttgtggttccgactgttcagggtgagctcggtatttatccgcgacatgagccgattatgagtttggtacggccaggtgcattacggctgcaaattccaggtgaaaaagaagaggttttggtagcagtttcaggcggcgttttggaggttcaacctgataaattgaccgtattggctgacgtggctatccgtagtagtgaaatggatcaagcccgtgccgaagaagcgaagaaggcagcagaggcaggtattgccaaggctgcggacgacgaagctttggccaaggcgcatagtgcgttggctgctgctcttgcagaactcaaaaccctcgactatattcgctcaagaaaacatcaataatctatatttatattttagattagataaaaagcacggcttgccgtgcttttattcaattctgtaattatttaattcattgatttaaaataaaatttattcatattttgaagttatggctagattagtttcaaagatttaagtactgtaaaaataaatatcaaagaccggccaagagtttattggggtaagaagaaggaaagattaaattaacaccctcggaattcattttaattgcagataatggagtaagagaacagacgaggcagcttttgatgggcttagtttaatggtgatgttgttctgttcttaataaaattaaactagataaatcaaaagttctctatctttgatgttagttcggatatataagttgtctgaataaggaaaaaaaattatgggaaaaatattgtgtttcgttgttgggctgctattgtcggcttgcgcgagtatgccaagcagtgaggcgctaaatggtgaatggctgccggaggaaattggtggcagtccgtttactgcccaagcgagtttgacattcgatggcgaacagcagttgctcagcagttatgccggatgcaatcggctgacaactcgttatagtgccgacaatgggaaattggatttcggttatacgtcatctacgaggatggcttgtgatcccgaacatagcgaggcagagcataaaatcagccaagtatttgttcaggctgagaggtttgggattcaagacggaaagttgttgattaaagacgggcaggggaatgtcctactgcgcgctgtaaaatcgtcttaagcatttgttttaaagaatatgacggtaatgcgtaacctcacggtgcagtcgttttgaatgaccatgaggccgtctgaaaatcgaaaacggcaaaattggcaaacggcggccggatgcttgtcatcttactttgccgaatcgggcccaaacatattttcagacggccttccaatcaaatccgtcgaatgacgggcggcctgcaaataggcagccagcggatgtccgcagtccaacatacccagccgatggaataaatcggctgttaccaaaacggaatcgttcatcatttccccattgcacatcgccaatgcggcttcttccgcagacattaaagcaaacgacgccacttcaccgtcttgattttgcggcattacctcattcggcagtatcacatcgaaaatatgcaaacactcgcggtgcaatccgcgcgatacctgatgcaggctgatgcagcgtccggtgtattgcaagcggttgagaaccgcatctgtcagcccggcctcttcgcggccttcccgtttcgctgcttcccatatctgttctccagccgaaataccgccgcctaccaacgtatccaacttgttgggatcgacggccttatgcggactgcggcgggcaatccaaaaacgcaggccttcttccgtaaccgccaaaccattgatatggaccgcatggctatataggccgagcgggcggaaggcggagcgttcgagggcaaagaggatttgcctgccgtcggcagaccaaacatcaaaacgttcgttgcgccacccgccgaaaaggccggcatcatgccagcggcgggcaagctgttccaactgcctgcccatttctatccaattgtccgcaaacagatgcaggccgtctgaatcttcgtgtagaggattaggccaatcctgaatcagatgttttcgccaaaccttattcacaaaacccaatgccaatccgttcaaccgcagcggcagccaatcttcggcatggtagcggaaagctgtttgcagggcagaaagcaagccgtcctgcagggtggtaggcaatggaggcatggaggggtagggcaggtgcatggcattccttattcgccgacgctcggacgtgtaggcagataaatgtcgaaacgggtggacttgccgctgtattgataggcaggcgtgcattgcgccagcaaggctcccaaccgaggccgcttgaccacaatgcgtttcgttgcaacatctcgggcggcggccaacaactccgcatcgtcggtgttttgtgccgaaccgagtaattggtggaaataagccatttcctttttgacggcggccgatttttgccgttcaggatacatagggtcgagatagacgacatcgggcctgcctgccgcagccaaatccgacagcagccgcaccgcatcgccgtaatgcagcgtcatccgttccgcaatggcagaggtttcttcagccgcccgtgcccgtctgaggccgtctgaaagcaggcaggcgacaaccggatgacgttcgataatcgaaaccggcaaaccttgtgccgccaaaacgaaggcatcgcgccccaagccgcctgtggcatcgataaccgacgggcgggccgtatggtttaccgcctttgcaatcagctcgccgccgcctttcaaacggcggtattgcgcgccgccgccgacaaaatccacccgcacacgccccttttcccccgctttgcacaaactgatgccttcactatccgcatacaggtagaggccgtctgaaggaggatggtcatatatggagatgccgtatccgccgctgatttcagccagagtgtcgtcagatgcgccgtctgcggcataacagaaaaaattcatgatttccttgggatatatggaagggtaaatgagaaggccgtctgaagagtgatgcggcaacgcaaaatcgctgatacagaaaaacgcattgagtttctgtataaaaaacgatatttctgtgtaatgggtttgaatttagaaaaaatgataaacgatgccccttgaaaccgaagaatttcaaggggctgatgatgttctctagaacagtggttctaaaggacagagcattgcgacacgatgtattttcatacacccttcgaggtcttattgtagcaacgtttctcatttcgcagtgcaacaatatgcgccgattttaaggttaaagtttaattaagtcaagcatttttatttgcatatttatctttctttctgatatattttatatcgaaatagttctggttattgattcataaatggagaaacaaatgactgcttttaaacccaatccactgaattacatcctcggtctcgacatcggtattgcatccgtcggttgggcaatggtggaaattgatgataaagaaaatccagttcgcctgattgatttgggagtgcgtgtttttgagtgtgctgaattgctgaaaaagggggattcgctggctgcggcaaggcgtaaggcgcgcagtattcgccgcttgatccgccgccgcgcccaccgtctgcttcgggcgcggcgtctgttgaagcacgaaggcgttttaaaacccgaagattttgatgaaaacggttttatcaaattattaccgaatacgccgtggcaacttcgtgtcgccgcattagaccgcaaactgacacctttagaatgggcggcagtcttgttgcatttaatcaagcatcgcggctatttgtcgcaacggaaaaatgaagagcaaactgccgataaggaacttgaggctttgcgtgaaggtatgaagagcaacactcaagccttacagacaggcaatttccgcacaccggccgaattggctttgaataagtttgaaaaagaaagcggtcatatccgcaaccagcgcggagattattcgcatacgttcagccgcaaagatttgcaggcggaactggttttgctgtttgaaaaacaaaaagaattcggcaatccgtatgtttcagacgacctcaaaaacggtattgaaaacctgctgatgacgcaacgtcctgccctatccggcgatgccattcaaaaaatgttaggacattgcaccttcgagccgacagaaccgaaagccgcaaaaaacacctataccgctgaacgttttatctggctgaccaagctgaataacctgcgtattttgaatcaaggcagcgagcgtccgctgactgataccgaacgtgccacgcttatggaggcgccttatacaaagaagctgacttatgcacaagctcgaaaactgctgggcttggacgatacggcatttttcaaaggtttgcgttatggtaaagacaatgccgaatccgcaacgctgatggaaatgaaggcttaccatgctatcagtcgcgcactggaaaaagaaggtttgaaagacaagaaatctccgttgagcatttcccctgaattgcaggatgaaatcggtacggcattctccctgtttaaaacagatgaggatattacaggtcgtctgaaaggctgcttgcaacctgaaatcttggatgcactgttgaaacacatcagcttcgacaagttcgttcaaatttctttgaaagcgttgcgccgaatcgtgccgctgatggaacaaggtgatgactacgatactgcttggagaaaaatttatcctcctccgcagccagttaacaaagaacctgttctaccaccgattcccgccgacgaaatccgcaaccccgtcgttttgcgtgccttatctcaggctagaaaagtcattaatgccgttgtacgacgttacggctctcctgcgcgtattcatattgaaacagcaagggaagtgggcaaatcgaaagctgagagagataaattagatcggcaaaataatgagcgtaaaaatgatcgtgatcgtcggataaaagatattcaaaaatatttcggttttgatcccaagccaaaagatattttgaaattgcgattatatgaagaacaaaatgggaaatgcctatattccaatctgaagagtgaaaaaggaaaatgtctttatacaggcgaagcgatagagttgagcagattgtttgaggacaattatgttgaaatagaccacgcattacctttcagtaaaacgtgggatgatagcctaaacaataaggtgcttgttttaaaagcatccaatcaaaataagggaaatcaaacaccttatgagtggttggatggtaaaaataataatctaaaatggcgtgaatttgttgcgagagtgcagagttgcaatttcccacacagtaaaaaacagcggattctgctgcaaaaatttgatgaaaaagaatttaaaaagcgtaatttgagtgatacacgctatatcaatcgtttcctgtgtcaatttgtcgccaaccatatgcggttgctgagtgatggagaaaaccgcgtatttgcctccaacggacaaattaccaatttattgcgcggtttttggggactacgcaaagtgcgcgcagataacgaccgccatcatgctttggacgcagtcgtcgttgcctgttcaaccgttgccatgcaggagaaaattacccgcttcgtacgttacaaagaaatgaacgcgtttgacggtaaaactgtggataaagagacgggcgaagtgctgcatcaaaaaacacacttcccgcaaccttgggaatttttcgcacaagaagtcatgatccgcgtgttcggcaaacccgacggcagacccgaatttgaagaagccgacacgcctgaaaaactacgtgcgttgcttgctgaaaaattaccatctcgccccaaagccatacacgaatacgttatgccactgtttgtttcgcgtgcgcccaagcggaagatgagcgggcaagggcacgatgcaacgttattttcagctaagcattttaagaaatccaaagaagcagttaagcgtaaacttttaactgaaataaaaatcgcagatttagacaatatgatcaataaagatagggagcgggaattatttgaggcattaaaaaatcggttatcccaatataacaacgatcctcaaaaggccttcgatcccaaaaccaaccctttttataaaaaaggtggacagttggttaaatctattcgtgttacagaacctaaaaaaatgaagacaggtctgcttttaaataaggacgcggcagtagcaaagaattctgatatggtgcgagtcgatgtattcgagaaaggcggggagtattatctcgtgccgatttacagttggcaggtggcgaaagggattttgccggatagggcgattgtccaaagaaaagatgaagaagattggcaacttattgatgatagtttcaattttaaattctcattacatcctaatgatttagttgaggtaataactaaaaaagctagaatatttggttactttgccagctgtcatcgaggtacaggtaatattaatatccgtatccacgatctggataataaagtcgggaaaaacggaattctggaaggcatcggtgttaaaaccgccctttcattccaaaaataccaaatcgacgaactgggcaaagaaataaaaccatgccgtctgaaaaaacggccacccgtccgttaagtaaactcatccctgtttcagacgacctgaagcagggatttttcgtcgcacaaacacaaaggagaaaacacatgacatggcgcagcctgcttatccaaaatagcggcaaactgtcgctgcaccgcgaacaaatgctgattcgtcaaaacggagaatcttataccgttcccttggaagacatcgccgtcattgttgttgagcatcgggaaacactgattaccgctccgcttttatcggcattggcagaatacggaactacgctactgacttgcgacgaacaattcctaccctgcggccaatggctgccttactcacaataccatcgtcaattaaaaaccctcaagctgcaactaaatatcagcgaacccttaaaaaagcaactttggcaacatatcgtccgtcgaaaaatcctcaaccaagcatttgttgccgacgaaacaggcaatgacattgctgctaaacgactacgcacattggctgccgaagttcgctccggcgatacagggaaccgcgaagctcaagccgccgccctctattttcaagccgtgtttggagaaaaatttacccgcaacgacaacaatgctgtcaatgctggcctcaattatgcctacgccgtgattcgtgccgccgttgcccgctccctcgccttatatggttggttgcccgcattgggactgtttcataaaagcgaactcaatcccttcaatcttgccgacgactttatcgagcccttgcgcccgctcgctgatctgaccgtattgaatctgcaagagcaaggccgtctgaaaagcgaattgacgccggacaccaaacaaaccttgatcaaagtcctgcactcccaagtcagcatcgaacagcagaccttcagcacactggcagccatagataaaatgatggcctcattccagccgagccttgccgccaaaaacgccaaactgctgaaactgcccgaaatcctgcctttgaaagaatatcaatatgagtgaggcaaagtttatgcggattatcgtctttttcgacctgccagttaccaccgtcgccaaacgcaaagccgccaaccaattccgacatttcctattgaaagacggctatcaaatgctgcaactttccgtatacagccggattgtcaaaggcagggatgcgttacaaaaacaccacaacagactatgcgccaacttaccgcaagaaggctcgatacgctgtttggaagtaacagaaaagcagtttgccgctatgaaactgcttttaggcgaactcaaaacccaagaaaaaaaggtcaattcagaccaattattgctgttctaatctccgttttttagacaaaagaaagcggggaatccttataaaataaggattccccgctgaggtattgtagcactgcgaaatgagaaagggagctacagcggctgcggcaaatttacggttagacagcgtattgtagcactgcgaaatgagaaagggagctacagcggatagacattgcggtggattttttcaacaattgtagcactgcgaaatgagaaagggagctacagcgggcttataactcacaagcgaaaggtgcgtattgtagcactgcgaaatgagaaagggagctacagcaactcaaagtatcgaggcagccagttaataattgtagcactgcgaaatgagaaagggagctacagcgaagcaacataacttctcatatcgcctttaattgtagcactgcgaaatgagaaagggagctacagccccaagtattgcaagagacctttgcaaaaaagcccttcccccgacagccgaaacccaaacacaggtttt

SEQ ID NO: 3199 - DNA, 8790 bp, synthetic construct
  source 1..8790: mol_type = other DNA
  misc_feature 1..8790: note = Synthetic
tgccgacgaaccctccgccaacctcgaccgcgcctacgcgctcgacatcatggaactgttcaaaacctttcacgaagcgggtaccaccgtcatcgtcgccgcccacgacgaaaccctgatggccgattacggccaccgcattttgcgcctgcaggaaggcaggtttgcctcatgaactactttaccctacacttcgaagcggccaaaaacgccgtccgccagctgttcaaacaacctttggccaccctgctgatactcgtcatgctggccatcgccatgagcctgccgctggcactctacctcggcgtgcaaagcagccaagccgtgctcggcaaactgaacgaatcgccgcaaatcaccctatatatggaacaaaacgctgacgaagccgacagcgccgtcgtcaaagaactgcttgccgccgacaaacggattgaaaaaagcgaatttatcggcaaggcgcagggcttgagcgaactgcaaaccagcatgggcgagcaagacatcgtctccatgctcgacagcaacccgctgcccgacgcattcgtcgtcagccccaaaccaggcggcacgccgtctgaaatgcaggcactgaggcaggatttggccaagctgccgatggtggaatccgcccaactcgacaccgaatggatgcaaaccctctaccaaatcgacgatttcgttcaaaaagtgctggccttcctgtccgttaccctcagcgtggccttcgttttggtggcgcacaacaccatccggctgcaaatcctcagccgcaaagaagaaatcgaaatcaccaaactcctaggcgcgccgtcctccttcatccgccgccccttcctctatcaggccgtctggcagagcctcctggccgcaggcctgagccttgccctgtgcgcctggctgatacacgccacccagcccctggtggcacagattttccgcccctacggtctcaacatcgaatggcgtttcttccacacatgggagtggctgtccgtctgcggcatcgtcgccgccctcggcatcgccggcgcatggctggccacacggcagcacctgctcagcttcaaagccaaacgctgacacacaggccgtctgaaaatgcaaaaactctgaaaggtttgtatggatcaatttttcgaacagcttcacggctgggtaaacgccatcaacgacccaatgtggtcgggattggtatatatgcttttaggcgcaggcctcttttttaccgttaccaccggttttgtacaattccgcctcttcggccgcagtatcaaagaaatgttgggcggccgcaaacaaggtgatgatccgcacggaattacaccgttccaagcattcgttaccggcttggccagccgcgtaggcgtgggtaacatcgccggcgtggcgattgccatcaaactcggcggaccgggcgcggtgttctggatgtgggtaaccgccttaatcggcatgagttcggcgtttgtcgaatcttcactggctcaactctttaaagtccgggactacgacaaccaccacttccgcggcggccctgcctactacatcactcaaggcctgggacaaaaatggctgggcgttttgttcgccctgagcctgattttctgtttcggctttgtatttgaagctgtacagaccaataccatcgccgataccaccaaagcggcatggggctgggatcaacactatgtcggtgtcgccctggtcattctgactgccccgattatcttcggcggtatccgccgcgtatccaaagccgcggaaatcatcgttccgctgatggcagttttatatctcgtcatagcactcttcatcattgctaccaatatttccctgattcctgacgtgttcggtcagattttctccaacgcgttcaacttcgattcggctgcaggcggtttcctcggcggtctgatttcgaccaccatgatgcagggtatcaaacgcggtctgtattccaatgaggcgggtatgggttctgcgccaaacgccgcagccgcagccgaagtgaaacaccccgtctcccaaggcatgattcaaatgctgggcgttttcgtcgataccatcatcgtctgctcatgcaccgcctttatcgtcttgacctatcaacagccttacggagacctgagcggtgcggcgctgacccaagcggcaatcgtcagccaggtaggcgaatggggcgcgggcttccttgccgtcatcctatttatgtttgccttttcaaccgttatcggcaactatgcctatgccgagtccaacgtccaattcatcaagagccattggctggttaccgccgttttccgtatgctggttttggcatgggtctacttcggcgcagttgccaacgtacccttggtatgggatatggcagacatggccatgggcatcatggcatggattaacctcgtcgccatcctgctcctgtccccacttgccttcctgctgttgaaagactacacagccaagctgaaaatgggcaaagccccagagttcaaactctccgaacaccctggcttgaaacgcaaaatcaaatccgatatctggtaacaccaaaggccgtctgaaatttcagacggcctttttaatccctgccatttagacaaaacgatgccccttaaagcggaagccttaaggggcagagcgttgcggcacatcttttcagacggccttattgtagcaacgtttctcatttcgcagtgcaacaatatgtccaaattctaattccaaatcggcacccagtcaagcatttcatttgcatggtaatacttacctaagatatatttatacttactaaacatcatattacggagaaactgatggctgcattcaaacccaatccaatcaactacatcctcggcctcgatatcggcatcgcatccgtcggctgggcgatggtagaaattgacgaagaagaaaaccccatccgcctgattgatttgggcgtgcgcgtatttgagcgtgcagaagtaccgaaaacaggcgactctctcgcagcggcaagacgcttggcacgcagcgtccgccgcctgacccgccgtcgcgcccaccgcctgcttcgggcccgtcgcctattgaaacgcgagggcgtattacaggctgccgattttgatgaaaacggcttgattaaatccttaccgaatacaccatggcaacttcgcgcagccgcattagaccgcaaactgacgcctttagagtggtcggcagtcttgttgcatttaatcaaacaccgcggctatttgtcgcaacggaaaaatgaaggcgaaactgccgacaaggagcttggtgctttgcttaaaggcgtagccgacaatgcccatgccttacagacaggcgatttccgcacaccggctgaattggctttaaataaatttgagaaagaaagcggccatatccgcaaccagcgcggcgattattcgcatacgttcagccgcaaagatttgcaggcagagctgaatttactatttgaaaaacaaaaagaatttggcaatccgcatgtttcagacggccttaaagaaggtattgaaaccctgctgatgacgcaaagagattctattcctgatgaaagtgctattctacggatgcaaggaaaatgtacttttgaaaaaaataaatccagagcagcaaaacatagttggagcgcagaacgttttatatggttaagcaagttggctaatttgaggataacggatgaatttggcactaggaaattaactgaaatagaacgtcaaatacttatagatcttccatataaattaaagaccgtcaactatcaacaagtaaggaatgccttaaccaccctttctcccaatgctctttttaatatcggatatcatcaaaaagataaaaagggggagataaaatcatcagataaaattgaaaaagatacgaaattcatggaaatgaaattctggcacaaaattaaggaaactttagaagggaatggaagaaaaacagaatggcagggcctttcaagcaatcatcatttactagatgaaatcggaacagtttttaccatctgtaaaaatgatgagagaagaaaagccctcttgtccggtaagataaaagaagatcaagatattcttgatattttgtgtgatcatgttgattttacatgcactgtgaatttatctttagaagcattgaaaaatatccttccttttatggaacaaggtgatgactacgatactgcttggagaaaagtttatcctccgcagtcaactaaaaaagaatctgttctaccaccaattcccgccgacgaaatccgcaaccccgtcgtcttgcgcgccttatctcaggctagaaaagtcattaatgccgtcgtacgacgttatggctctcctgcgcgtattcatattgaaacagcgcgtgaagtgggcaaatcgttcaaagaccgtaaagaaattgagaaacgtcaggaagaaaaccgcaaagaccgtgaagaatccgctactgaattccgagagtatttccccaattttattggcgaacccaaatccaaagatattctgaaactgcgcctgtacaagcaacaacacggcaaatgcctgtattcgggcaaagaaatcaacttaggccgtctgaacgaaataggctatgtcgaaatcgaccatgccctgccgttttcgcgtacatgggatgacagtttcaacaataaagtgctggtattgggcagcgaaaaccaaaataaaggcgaccgaacaccttatgaatatttaaacggcaaagacaacagccgcgaatggcaggaatttaaagcacgtgtagaaaccagccgtttcccgcacagtaaaaagcaacggattctactgcagaaattcgatgaaaaagaatttaaaaaccgtaacttgagtgatacacgctatatcaaccgttttctgtgtcaatttgttgccgaccatatgcagctgactggaaaagacaaaaaccgtgtctttgcctccaacggacagattaccaatctattgcgcggcttttggggattgcgtaaagcgcgtgcggaaaacgaccgccatcacgccttggacgccgtcgtcgttgcctgctcgaccgttgccatgcagcagaaaattacccgttttgtacgctataaagagatgaacgcgtttgacggtaaaaccatagataaagaaacaggagaagtgctgcatcaaaaagcacacttcccgcaaccttgggaatttttcgcgcaggaagtcatgattcgcgtcttcggcaaaccggacggcaaacccgaatttgaagaagcggatacccccgaaaaactgcgtaccctgcttgcagaaaaattatcatctcgtcccgaagccgtacacgaatacgttacgccactgtttgtttcacgcgcgcctaatcggaagatgagcggtgcacataaagatactttgagatctgctaaacgatttgttaaacataatgaaaaaattagtgttaaacgagtatggttaaccgatattaagttggtagaccttgaaaatatggttaattataaaaatggtagggaaattgagctatatgatgctcttaaagcacgtttagagaaatatggaggtaatgctaaacaagcatttgatcctaaggacaatccgttttataaaaagggaggacaactagttaaagctgtgagggtcgaaaaaacccaagagagcggagtcttattaaacaaaaaacatgcttataccatagcagataatggagacatggtacgtgttgatgtgttctgtaaagtggataagaaaggaaaaaatcagtattttattgttcccatctatgcttggcaggttgctgaaaacattcttcctgatattgattgtaaaggataccggattgatgatagctatacattctgttttagtttgcataagtatgatctgattgcttttcagaaagatgaaaaatctaaagtagaatttgcctactatatcaactgtgatagctctaatggacgattctatttagcttggcatgataaaggctctaaagaacagcaattccgtattagtacccaaaatcttgtattgatgcaaaaataccaaatcgacgaactgggtaaagaaatcagaccatgccgtctgaaaaaacgcccgcctgtccgttaaattaatctatccctgtttcagacggcctgaagcagggattttttatataaaaataaggggaaaaacatgacttggcgcagcctacttattcaaaacggcggcaaactatctttgcaacgccggcaactactgattcaacaaaatggcgagtcccataccgtaccgttggaagacatcaccgttatcattatcgaaaaccgcgaaaccctgattactgccccgctcctatcagccttagccgaatatggcgcaaccttactgacatgtgacgaacagttcctgccctgcggacaatggctgccttatgcccaatatcaccgccaacttaaaatcctcaagctacaactgaatataagcgaacccttaaaaaagcaactctggcaacatatcgtccgccaaaaaatcctgaatcaagcatttgtcgcagacgaaacaggcaatgatcttgcagccaaacggctgcgcactttggcagttgaagtccgttcaggcgatacaggaaaccgtgaagcccaagctgccgccctctacttccaagccctctttggagaaaaatttacccgtaatgacaacaatgccgtcaatgccgcattgaactacacctacgccgtactccgtgccgcagtcgcacgcgccctgaccttatatggctggctgcctgcattaggcttgtttcatagaagcgaactaaatccattcaacctcgctgatgactttatcgaacccttacgcccattggccgacctggtcgttatacatttgcatgaacaaggccgtctgaaaactgatctgacccccaacatcaaacaaaaccttatcaagacccttcactgtcaaatctgcatcgaacggcaacatttcagcactttggctgccatcgacaaaatgatttcttcatttcaagccagcgtaaccgacaaaaacgccaaacagctgaaactacctgaaatcttgccattgaaagaataccaatatgagtgaggccaaatttatgaggattatcgtcttcttcgacctaccagtcaccacagcggcaaagcgcaaagccgccaatcaattccgccagtttctattaaaagatggataccaaatgctccagctttccgtatacaaccgtattgtcaaaggccgtgattcgttgcaaaaacaccacaataggctatgtgcaaacctaccgcaagaaggttcaatccgctgtttggaagtaacagaaaagcaatatgccaccatgaaactgctgttgggagagctgaaaacccaagaaaaaagagtaaattcagaccaactattattattctaagctcatttttttagacaaaataaaacgggaaacccttatagaataaggatttcccgttgaggtattgtagcactgcgaaatgagaaagggagctacaaccagggttaattcagtaatttcgttttgaccattgtagcactgcgaaatgagaaagggagctacaacactcgaacctacgacctcctgcttccaaggattgtagcactgcgaaatgagaaagggagctacaaccttcagtcggttctgattcttcaaaagcctattgtagcactgcgaaatgagaaagggagctacaactgtgaagattgagcaagaccgcgtgtggcgattgtagcactgcgaaatgagaaagggagctacaaccgtcagtaggttctgattcatctggagcttattgtagcactgcgaaatgagaaagggagctacaacttcacaaaccatcatatgatgcccgatggcattgtagcactgcgaaatgagaaagggagctacaacgcaaaacctcgcgcgtcgtgtccatgattcattgtagcactgcgaaatgagaaagggagctacaacaatgatcataacgacaccctcgtgatgttgattgtagcactgcgaaatgagaaagggagctacaactatgttaatgttggttgctatggaattgatattgtagcactgcgaaatgagaaagggagctacaaccctgatttaaaaataccccacgaagaaataattgtagcactgcgaaatgagaaagggagctacaactcggattcggtattagctcccctgctcccgattgtagcactgcgaaatgagaaagggagctacaaccaagagtaataatgcaggccgtctgaaatgaattgtagcactgcgaaatgagaaagggagctacaaccatcgccgccatcatgcggaaattactcgtcattgtagcactgcaaaatgagaaagggtctatccaaataaaaagcaccacctaaacaggtagtgctttcatattaatatgcttattcagcagaattagctgctttatcaaccaattcaactaatgccaaaggagcattgtcgcctttacggaaaccgtatttcagtacacgaacatagccgccgttacgagcagcaaagcgtggacccaattcgtcaaacaatttaactacaacatcacgatcgcgagtgcggtcaaaagccaaacgacggtttgccaaggaaggttttttacccaaggtaatcaagggctcaactacgcggcgcaattcttttgctttaggcaaagttgtcacgatagtctcgtgagtcaacaaggaattcgccatattgcgcagcatcgcagcacggtggctgctagtacggtttaatttgcggttgccattacgatgacgcatgtcattatccttt

SEQ ID NO: 3200 - DNA, 7866 bp, synthetic construct
  misc_feature 1..7866: note = Synthetic
  source 1..7866: mol_type = other DNA
ggcaaacggctattccgagttgaacgaccccgaagaccaagccgaacgcttcaaagcgcaagtggcgcaaaaagacgccggcgacgacgaagccatgcactacgatgccgactacatccgcgccatggaattcggcctgccaccgaccggcggctgcggcatcggcatcgaccgcttggtaatgttgctgaccgattcgcaaaccatccgcgatgtgattttgttcccgcaaatgcgtcccgaataatgcattgaaataaaatcaaggccgtctgaaaacaagactctgttttcagacggcctttttgttcaaatatgtaaaacggaagagtttaaatcaataaattctttacatcataataataaaattacatgataatcaaaaagataatataaaaaagaatatgtaaacgtttttcagtttgttgacagtctgctagaatacatccagttacagacagccttcacacacaggccgtctgaaaatgcagaaactctgaaaggtttgtatggatcaatttttcgaacagcttcacggctgggtaaacgccatcaacgacccaatgtggtcggggttggtatatatgcttttaggcgcaggcctctttttcaccgttaccaccggttttgtacaattccgcctcttcggccgcagtatcaaagaaatgctgggcggccgcaaacaaggtgatgatccgcacggaattacaccgttccaagcattcgttaccggcttggccagccgcgtaggcgtgggcaacatcgccggcgtggcgattgccatcaaactcggcggaccgggcgcggtgttctggatgtgggtaaccgccttaatcggcatgagttcggcgtttgtcgaatcttcactggctcaactctttaaaatccgggactacgacaaccaccacttccgcggcggccctgcctactacatcactcaaggcctgggacaaaaatggctgggcgttttattcgccctgagtctaattttctgtttcggctttgtatttgaagccgtacagaccaataccatcgccgataccactaaagcggcatggggctgggatcaacactatgtcggcgtcgctctggtcattctgactgccccgattatcttcggcggtatccgccgcgtatccaaagccgcggaaatcatcgtcccgctgatggcggttttatatctcgtcatagcactcttcatcattgttaccaatatttccctgattcctgaagtgttcggtcagattttttccaacgcgttcaacttcgattcggctgcaggcggtttcctcggcggtctgatttcgaccactatgatgcagggtatcaaacgcggcctgtattccaatgaagcgggtatgggttccgcgccgaacgccgcagccgcagccgaagtgaagcaccccgtctcccaaggcatgattcaaatgctgggcgttttcgtcgataccatcatcgtctgctcatgcaccgcctttatcgtcttgacctatcaacagccttacggagacctgagcggtgcggcgctgacccaagcggcaatcgtcagccaggtaggcgaatggggcgcaggcttccttgccgtcatcctatttatgtttgccttttcaaccgttatcggcaactatgcctatgccgagtccaacgtccaattcatcaagagccattggctggttaccgccgttttccgtatgctggttttggcatgggtatacttcggcgcagttgccaacgtacccttggtatgggatatggcagacatggccatgggcatcatggcatggattaacctcgtcgccatcctactcctgtccccacttgccttcctgctgttgaaagactacacagccaagctgaaaatgggcaaagacccagagttcaaactctctgaacacccaggcttgaaacgcaaaatcaaatccgatatctggtaacaccaaaggccgtctgaaatttcagacggcctttttaatccctgccatttagacaaaacgatgccccttaaagccgaagccttaaggggcagagcgttgcggcacatcttttcagacggccttattgtagcaacgtttctcatttcgcagtgcaacaatatgtccaaattctaattccaaatcggcacccagtcaagcatttcatttgcatggtaatacttacccaggatatatttatacttactaaacatcatattacggagaaactgatggctgcattcaaacccaatccaatcaactacatcctcggcctcgatatcggcatcgcatccgtcggctgggcgatggtagaaattgacgaagaagaaaaccccatccgcctgattgatttgggcgtgcgcgtatttgagcgtgcagaagtaccgaaaacaggcgactctctcgcaacggcaagacgcttggcacgcagcgtccgccgcctgacccgccgtcgcgcccaccgcctgcttcgggcccgccgcctattgaaacgcgaaggcgtattacaagccgccgattttgatgaaaacggcttgatcaaatccttaccgaatataccatggcaacttcgtgcagccgcattagaccgcaaactgacacctttagaatgggcggcagtcttgttgcatttaatcaagcatcgcggctatttgtcgcaacggaaaaatgaagagcaacctgccgataaggagcttggggctttgcgtgcaggtatgaagagcaacactcaagccttacagacaggcaattttcgcactccggccgaattggctttgaataaatttgaaaaagaaagcggtcatatccgcaaccagcgcggcgattattcgcatacattcagccgcgaagatttacaggcggaactcgttttgctgtttgaaaaacaaaaagaattcggcaatccgcatgtttcagacggccttaaagaaggtattgaaaccctgctgatgacgcaaagagattctattcctgatgaaagtgctattctgcggatgcaaggaaaatgtacttttgaaaaaaataaatccagagcagcaaaacatagttggagcgcagaacgttttatatggttaagcaagttggctaatttgaggataacggatgaatttggcactaggaaattaactgaaatagaacgtcaaatacttatagatcttccatataaattaaagaccgtcaactatcaacaagtaaggaatgccttaaccaccctttctcccaatgctctttttaatattagatatcatcaaaaagataaaaagggggagataaaatcatcagataaaattgaaaaagatacgaaattcatggaaatgaaattctggcacaaaattaaggaaactttagaagggaacggaagaaaaacagaatggcagagcctttcaagcaatcataatttactagatgaaatcggaacagtttttaccatctgtaaaaatgatgagagaagaaaagccctcttgtccggtaagataaaagaagatcaagatattcttgatattttgtgtaatcatgttgattttacatgcactgtgaatttatctttagaagcattgaaaaatatccttccttttatggaacaaggtgatgactacgatactgcttggagaaaagtttatcctccgcagtcaactaaaaaagaatctgttctaccaccaattcccgccgacgaaatccgcaaccccgtcgtcttgcgcgccttatctcaggctagaaaagtcattaatgccgtcgtacgacgttatggctctcctgcgcgtattcatattgaaacagcgcgtgaagtgggcaaatcgttcaaagaccgtaaagaaattgagaaacgtcaggaagaaaaccgcaaagaccgtgaagaatccgctactgaattccgagagtatttccccaattttattggcgaacccaaatccaaagatattctgaaactgcgcctgtacaagcaacaacacggcaaatgcctgtattcgggcaaagaaatcaacttaggccgtctgaacgaaataggctatgtcgaaatcgaccatgccctgccgttttcgcgtacatgggatgacagtttcaacaataaagtgctggtattgggcagcgaaaaccaaaataaaggcgaccgaacaccttatgaatatttaaacggcaaagacaacagccgcgaatggcaggaatttaaagcacgtgtagaaaccagccgtttcccgcacagtaaaaagcaacggattctactgcagaaattcgatgaaaaagaatttaaaaaccgtaacttgagtgatacacgctatatcaaccgttttctgtgtcaatttgttgccgaccatatgcagctgactggaaaagacaaaaaccgtgtctttgcctccaacggacagattaccaatctattgcgcggcttttggggattgcgtaaagcgcgtgcggaaaacgaccgccatcacgccttggacgcagtcgtcgttgcctgctcgaccgttgccatgcagcagaaaattacccgttttgtacgctataaagagatgaacgcgtttgacggtaaaaccatagataaagaaacaggagaagtgctgcatcaaaaaacacacttcccgcaaccttgggattttttcgcacaagaagttatgattcgcgtcttcggcaaaccggacggcaaacccgaatttgaagaagcggatacccccgaaaaactgcgcactctgcttgctgaaaaattatcttctcgtcccgaagccgtacacgaatacgttacgccattgtttgtttctcgcgcgcccaatcggaagatgagtggtgcacataaagatactttgagatctgctaaacgatttgttaaacataatgaaaaaattagtgtgaaacgagtatggttaaccgaaatcaagttggccgaccttgaaaatatggttaattataaaaatggtagagagattgaattatatgaggctcttaaggcgcgtttagaggcatatggaggtaatgctaaacaagcatttgaccctaaggacaatccgttttataaaaagggaggacaactggttaaagctgtgagggtcgaaaaaacccaagagagcggagtcttattaaataaaaaaaatgcttataccattgcagataatggagacatggtacgtgttgatgtgttctgtaaagtggataagaaaggaaaaaatcagtattttattgttcccatctatgcttggcaggttgctgaaaacattcttcctgatattgattgtaaaggataccggattgatgatagctatacattctgttttagtttgcataagtatgatctgattgcttttcagaaagatgaaaaatctaaagtagaatttgcctactatatcaactgtgatagctctaatggacgattctatttagcttggcatgataaaggctctaaagaacagcaattccgtattagtacccaaaatcttgtattgatgcaaaaataccaaatcgacgaactgggtaaagaaatcagaccatgccgtctgaaaaaacgcccgcctgtccgttaaattaatctatccctgtttcagacggcctgaagcagggattttttatataaaaataaggggaaaaacatgacttggcgcagcctacttattcaaaacggcggcaaactatctttgcaacgccggcaactactgattcaacaaaatggcgagtcccataccgtaccgttggaagacatcaccgttatcattatcgaaaaccgcgaaaccctgattactgccccgcttctgtcagctttagccgaatatggcacaaccctgctgacctgcgacgagcagttcctgccctgcggacaatggctgccttatgcccaatatcaccgccaacttaaaatcctcaagctacaactgaatataagcgaacccttaaaaaagcaactctggcaacatatcgtccgccaaaaaatcctgaatcaagcatttgtcgcagacgaaacaggcaatgatcttgcagccaaacggctgcgcactttggcagttgaagtccgttcaggcgatacaggaaaccgtgaagcccaagctgccgccctctacttccaagccctctttggagaaaaatttacccgtaatgacaacaatgctgtcaatgccgcattgaactacacctacgccgtactccgtgccgcagtcgcacgcgccctgaccttatatggctggctgcctgcattaggcttgtttcatagaagcgaactaaatccattcaacctcgctgatgactttatcgaacccttacgcccattggccgacctggtcgttatacatttgcatgaacaaggccgtctgaaaactgatctgacccccaacatcaaacaaaaccttatcaagacccttcactgtcaaatctgcatcgaacggcaacatttcagcactttggctgccatcgacaaaatgatttcttcatttcaagccagcgtaaccgacaaaaacgccaaacagctgaaactacctgaaatcttgccattgaaagaataccaatatgagtgaggccaaatttatgaggattatcgtcttcttcgacctaccagtcaccacagcggcaaagcgcaaagccgccaatcaattccgccagtttctattaaaagatggataccaaatgctccagctttccgtatacagccgtattgtcaaaggccgtgattcgttgcaaaaacaccacaataggctatgtgcaaacctaccgcaagaaggttcaatccgctgtttggaagtaacagaaaagcaatatgccaccatgaaactgctgttgggagagctgaaaacccaagaaaaaagagtaaattcagaccaactattattattctaagctcatttttttagacaaaataaaacgggaaacccttatagaataaggatttcccgttgaggtattgtagcactgcgaaatgagaaagggagctacaacgtagtagttattgatgaagcgcaaaatattattgtagcactgcgaaatgagaaagggagctacaaccagattgtaactcaagtaaatgctgttgcaattgtagcactgcgaaatgagaaagggagctacaacacatcacgccatacaaaacctattgccgaaattgtagcactgcgaaatgagaaagggagctacaacgcactgggtggggcaagaattagtaaggaaattgtagcactgcgaaatgagaaagggagctacaactctcgctgtatcaagcatttttataagtgaattgtagcactgcgaaatgagaaagggagctacaactgagaatggttccgtattcaaacggtgggaattgtagcactgcgaaatgagaaagggagctacaacgcttcttgctacctttcttccctctcttaaattgtagcactgcgaaatgagaaagggagctacaacaatggtggaagcggttcaagtgggacgactattgtagcactgcgaaatgagaaagggagctacaacacattgatggccgtctcagatttggcaaaaattgtagcactgcgaaatgagaaagggagctacaaccaaatcgctacgccctttgtgcttgtttttattgtagcactgcgaaatgagaaagggagctacaacgcgtgtcggcttgcaatgctttcagtcagcattgtagcactgcgaaatgagaaagggagctacaacaggtgtatcaacttcaacaatcataaaataattgtagcactgcgaaatgagaaagggagctacaacagcggtgtttttatatggaacaatataggcattgtagcactgcgaaatgagaaagggagctacaaccatatgttttgaattaccctacccttagaaattgtagcactgcgaaatgagaaagggagctacaacgttggccaacagcttgcaagcagggaagatattgtagcactgcgaaatgagaaagggagct

SEQ ID NO: 3201 - DNA, 5740 bp, synthetic construct
  source 1..5740: mol_type = other DNA
  misc_feature 1..5740: note = Synthetic
gactacattgataagcactcaattccaataccttaatgtgcgtttagacacggtaaatgtacgacaggttaaagaaagactttcctcgtgttgaaagtagaaatctaccacttgttgtttaaatgtttggttatatttagtcataaaaaatctgcacctctgtatgttattggataataagtccaacttttggggtgcagatcattttaaagagtggtggtttttatcttataaacaatcaacttaactttttcactttagcttgtttaatcatattatcactgacttccagaatcttatatttcggaatatggtaaagaattgatgaggaaatgattgaagtaatctaatatgttaatacttaaaaaatgatgtcccttaataattagctaattataagggacagagcatttcggacaatcttttcagaagccttattgtagtaacgtttctcatttcgcagtgctacaatatgtgatctattctatgttttaaaaaaaatttgtcaacaagtaaatggttttatggtaaaaaagaaaaaattctacatttcatataaggttgataaaaaatggaacaattaaattatattttgggtttggatatcggtatagcatctgtaggatgggctgttgttgaaatagatcataatgaagatccaattagattaattgatgttggagtaagaacatttaataaagcagaagtggcaaaaacaggggagtccttatctttaataagacgccttgctagaggttcgagacgtttagtaagacgaaaaaagatgagattattaacagctaaacgtttattaaagagcgaaggtattttgtctgatttagattttaataagggagctattttaaatttgcctaataattgttgggagttgagagttaaaggacttgataaaaaattatcagacaaagagtgggcagctgtgttattacatattattaaacacagaggatatctgtcacagagaaaacatgatagaaaaacagatgataaggaattaggagcattactatcaggtgttagcaaaaatcatagtttgttggaagaaggcgaatttagaacagcagctgaattagcaattaatgtattttgtaatagtaaggggcatattagaaatcagtggggagattattcgcacacttttagccgattggatttacagaaagaaattaaacagctttttgtatctcagagagagttaggtaatccttatacatcatcttcttttgaagaaaatattatttcattattaatgaaacaaaaagaagcaatttcaggtaatgatattctaaaaatgcttggtaaatgtacatatgaaaaaaatgaatacaaagcagctaaaaatacctatagtgctgaacgatttgtttggttaacaaaattaaataatttgcgtattgtggatgatggtgttgagcgagcattgaattcttctgagaggaaattattaattgatgaaccttataaaaaagcgaaattaacttacgcacaagtcagaaaaatattagagcttcctgatagtgctgtatttaaaggagttcgatattttgctgataatgctgagtcatcaacattaatggagatgaagttttggcattctatcagaaaagctttggaaagtaataacttgaaagatgagtggttagtactaaaaacaaaaccagaattgttagatgaaataggaacaggtttttctatttataaaacagatgatgatattacaagttatttatctaataaattagataagaaagttctagatattcttttagtagaagtaagttttgataagtttattgaattatcgttaaaatgcttgagaaagattattcccttaatggaaaaaggatatcgttatgatgaggcttataaatatatatatggcgaggttaatattgaatataacttaaatgatattaaaaatccggttgttttgcgctcattctctcaatcaagaaaagtgattaatgctgttattcgtttatatggatctccagcaagaattcatattgaaacggctagagatataggaaaatcatttaaagaacggaaagcaatagaaaaacagcaagaaaaaaatcgtttagaaaaagtacgtgcagcagaacattttaaacagctcttccctaattatgtcggagagcctaaagcaaaagatattctaaaagtacggttatatgaacagcagcaaggaaaatgtttatattctggaaaaatattagacataaaaagattgatggagcatgggtatgttgagattgatcatgcgttgccattttccagaacatgggatgatagctttaataataaagtacttgtcttagctaatgaaaaccaaaataaaggtaataaaacaccttatgaatggttcaatggtaaggataattcagactcttggaaacgttttttagcattagtcaataattcaggattttctgccgttaaaaaacaacatattttaatgaaagagatagatgaagaaggattcaaacagagaaatttaaatgatactagatatataacgcgtttcttgtgtaattgggttgaaaataatatccctttattggggaaaggcgttaaaagagtatttgcaccacaaggcaaaattacagcattacttcgtagtaattggggaattcgaaaggttagagaagataatgatcgtcatcacgctattgatgctattgttgttgcatgtacaacagtttctatacaacaacgaataacaaattatgtaaaaaattcagaaataaatagaaagattaaaagacaaaattatttaaaattccctgaaccgtggaaattttttagagaggatattagtatccgcgtatttagcaataatcctattgaggaattaaaacaacaattatcggatcgtccggaggcaaatcatcaatttgttacccctttatttgtatctcgtgctcctgtgaggaaaatgacaggtcaaggacatgaagatacgattagatcagccaaacgaatttctgaagggattagcgtattaagagtaccattaacaaaattaaatgataaaagtttagagctaatggttaatcgcgagcgtgagaaagagttatatgatgcattaaaacaacgtttattggaatttaaaaatgatcctgaaaaagcatttgcagaacctttttataaaaagggcggtcaacaagtgaagacagttcggatagagagagttcaaaaaaatggtgtattagtcaataataatacaggtattgcggataatggcaatattgtgagggtagatgtatttttaaagaaaaagaaatattttttagttccgatttatagttggcaagtagcaaaaggtattttgcctaataaagcaattgttgctcataaaaatgaatgcgattgggcagatatggatggaagcgcacaattcctattttctctttatacaaatgatttaattgaagtagtgctaaaagattctacaattttgggttatttttcttcaatagatagagctacagcagctcttattattaaagaacctgatatggagaaatcaaagggcaaggaaggtattcatagagtgggggttaaaacagcgagatcgttcattaaatacaatgtagatgtattaggaaaaaacattagtcgttgtagaaaagctaaaaggttacctgttcgttgatattatgaggttattaaagagattgtctttaataaccttttttctttctggagaatatatgagttggcgtagtattataattaataatagtggaaaattatctttagaaaataatcaaatgttgattcagcaaaagacaaatcattttacagttcctctagaagatattgctattattgttatagaaagtagagaagtagtaataactgttcctttattatctgcattagccaagaatagtattacattattaacttgtgatgaacaatatttaccttgtggacagtggctacctttttcacaatattatcggcagtataaaatattaaaattacaattagaactatcattaccattaaaaaaacagatatggaaaacaataattaagcaaaaaatatataatcaagcagaagttttatcattattggataataaaaatgatgctaaaagactttatgctatgtcggagaaggtgaaatctggtgataaagataatatggaagcacaggcagcagttttttattttcagcgtgtatttggcaaaaattttaagagatgggaggataatcatattaatgttcatcttaattatgcttatagtattttgcgttctgcaatagcaagagcgcttgtacaatatggttggttacctgcgttggggatttttcatcgtaatgagttaaatccgtttaatttagctgatgattttattgaaccatttcgacctttagctgatttaaaaatatatgatttattacaaaaaaatactttagataaaaccttaacatcaaaaaataaacagcatcttatctctttgctatatcatcaaattttaatggaaagtcaagtctttagtgtattatctgctatagatagatgtatctcttctttacaacaagttgttttagcaaaaaatcctaatatgttaaaactaccagttattctaccaataaaggaatatcattatgagtgagggaagatttatgcgtctaattgtttttttcgatttgccggtaacgacagtagctaaacgtagagcagctaatcaatttagaaaatttttgttaaaagatggttatcagatgttacaactatctgtttatagccgtattattaggggaagagatgctttagagaaacatcataaaagattatgtgcgaatttaccagaagagggttatattcgttgtttagaggtaacagaaaaacaatttgccgctatgaatattttgctaggtgaattgaacttacaggagaaaaaagtgaattcagatcagatgcttcttttctaaaaagataatttatgtgataaaaatagaacttttttcaataaattttttattgcagaacgaataaaaccccttgaatttcaaggggtttttcgttacctagtgtagcactgcgaaatgagaaagggaactacaactgcctgttgatagattaggatcagatttccagtgtagcactgcgaaatgagaaagggaactacaacccaaacagtcatatcgttcataaagtaaccagtgtagcactgcgaaatgagaaagggaactacaaccaacaacaagccaacgaagaatggaaaaagagtgtagcactgcgaaatgagaaagggaactacaaccggataaaagcgatattacgaacattaataagtgtagcactgcgaaatgagaaagggaactacaacaatcttcgacaatgaacaagaagaggttatagtgtagcactgcgaaatgagaaagggaactacaacagggaacggctacaggtaatcagtaaccaaagtgtagcactgcgaaatgagaaagggaactacaaccagttgttcaatcaagcaaccaaccagcacagtgtagcactgcgaaatgagaaagggaactacaactatctgttgcaatgtatagatagcattaatagtgtagcactgcgaaatgagaaagggaactacaacgaaattaagtaataaaaaattaaatgtaatagtgtagcactgcgaaatgagaaagggaactacaactactttggcaataaattgacgggttttatcagtgtagcact

SEQ ID NO: 3202 - DNA, 23723 bp, synthetic construct
  misc_feature 1..23723: note = Synthetic
  source 1..23723: mol_type = other DNA
cggacgcacggcggccgacatcctggaggtcgaccgcttccgcgaggccggctgggaggtgcgcgtggccacgcaggatggcagcctgggcgagcagggtctggtcaccgttcccctcgatgccgccctcgcagccgacccgaaggccgaactcttcgcctgcggacccgatggaatgctcaaggccgttggagagcgcgccatcgcccacaacatcaagggctggctctcgctcgataagcatatggcctgtggcgtgggcgcctgcctggcgtgcgtccagaagctccgcactcccgagggcgaaaagctcgcgcgcgtctgcgtcgatggccccgtcttcgaagcgcgcgacatcgtctggtaggaggctctatgaagcgccttgcccttgccctcctcgccggcctctgcgccctcgtagcctcggccacgcccctctccgatctctatcgcgaggccgccgcgctccccctcccggcctccccgcgtctggctgccgtcgatgccgccgccaccctcgccgccacgcctaactcctcggccgactgggccaccctgcagcaggccctcgaacaaggcgacctcccccccaatggcgcccttctggtcgaggccctcctcgccctcgatgccgccgccaataacgacctcgagcgctacaaggcccgtgccatcgccctcaaggccaagaccaccagcgccaccctgcgcaaggctgtcgacctcaccgacctgcttggcccctgccccgcgtgcggcggcaagatgacctgccccacctgccgcggctcgctcaagtgcgccacctgcaagggccgcggctccctcaccaagcgcaccgccagcggcaagaccatctccctcgactccccccaacgcatccgctgcgccgcctgctccggctcgggcaagtgctccgcctgccagggccgcccgatcacctgcacgcattgtagcggcagcggcaatgcccccgatgcaatccagcttcaggcccgtatcgcccagctcgccggccaactccaagcccacctcaccgcccagttcaaggaggacctcgccgcccgcgagcagagcaccctcctcgccgccgagctcaagcaagcccaaaacctctccgaccccgccgaggcccttgccctcctcactgccctgccgcccgagcgcgtggctgccgtccagtggtccagcgtcaccgccttgcgtgccgagctcgaggccatcgtctccaagacgcgcgagcgcgccgccgccgaggccaacgcccgcgccgaactgcgcagcgccatcgcccaggcccagcgcgccgaagatcccctccgggggatggtccaactcctcccgcgcttcgagcaattcgcccagagcgatgccctccccgaactcacctcggccttcgatggcctcctcgccgccgccaaggcccaacgccgcctccagcgcgaaggccttgaagagcgcgttggggctctcgcccgcctccaggcccagcccgcgctcttgctcgaccaagccaacgccctcctggccgactggccagaggccgatgcccccaaggccttgcgcgactacgcccagcgcgccaaccgccccgacctcaccgccttcctcaaggaacgccccttcgaggccgcgcgcgccaacctcgaacgcattcgccaaaagaccgaggagcgccttcaggccgaagccgccgccaagcccgcctggtggatctgggccggcgccggcctcggcggcctcttcgccctctaccttctctacgcggccatcactggcatcctcgcccggaaggccgagcgcgagcgccaggcccgccagcgcgccgccctcgaaagcgtccgcgccacgatggcccgccgccgccattgagcgatgagcgcacgcccccaccccgcccgtcgcctccacgcctggctcgagctgttgcgcctgcccaaccttttcaccgtcccgggcgatgtgctcgccggctgggccctcgccgggcagggcggcaaccccaccctcgccctcctcgcttccctcggcctctacgccgccggtctcctctggaacgacctcttcgacctgcgcatcgacgcgcgcgaacgcccgcgccgccccctcccctccggccgcgtcccctgccgccacgccctcttcgccgccctcgccctcagcgccctcgcccccctcctggtcctcaacgcctggcccgtagccgtcaccctcctcgccctcatcctcttctacgatgccctcgccaagcgcattgccggcctcggtgtggtgacaatgggggcttgccggggcgtgaacctcctcctcggcgtggccgtagcctgcccgggcggccccagcgtttggccgcccctagcctggctcgcggctgggctgatgacgctctacatcgtcggtgtctccattgtggcgcgcaacgaagccaacccccgggcgaaggtcggccgcgcctggcgcgccttccccgtggcgatgaccctcctctttgtgccgattggctggctacgcggcgcgccgatgctctgggcagcccccgtggcctgcctcccgctcctgccgctgctcctcatccgccgccccattccggcgctcgtcggcggcctcatccgccacctcattctcctgcaagcgctctggtgcctcctcgccaccggcgccctctggcccctcccggccctcctcctcgcttgcgccctcgccgccgccctcgccggccgcacctttgccggctcgtaaagcgcggcccacgcccgcccttgttcagcccagaccaggggcgactggctggcgcgtactctcctccccgctccggcttgcctttcgggaagaggtttgttatgttccggggcattctgctgaccttcaaggagtgagacgatgtgtaggttcaaatggctgaaaggcctgttgattgcggtgccgtcggtggtgctgctggccgcggtaagcggcgtggttgccttctatttccacatttggcgggtgcccgagcggcgacaagctgccgtgcaatggctgattgcggcggccgaagagccccccgccgaggagccgagcgcgcccgagaacccagcacccgaggccaccccaacgcccgaacccgccccccaagagccccaagtctcttctttctacctagcgagctggcagatcgagcggcgcggcacgaactttgccgtgcaactgcgcttcctgccggatgccgagttttcggagccgccgtcggccgaccgcttcgccgtaaccccgcaggtggccaacctcaagcccacggtgaactacgccgggcggctggacctggccggtgactggcagccggggcagacctatcaggtgacggtcaaggccgggctgcaggatcgccacgggcgcaccttgcccgacaccgtcacgcgctcggtcacaatgcccgaatgcgcgcccagcctccagttcctcaccactggcagctacctgccgctcagccgcccgcgcctgccctaccgcgccgtcaacctctcacccaacgcgcacatcaccctctttcgcggctacgagaacaacctcttgcccttcggcttcacctcctgggatgcgctcaacttgacgcaaaaaatcgctgaggtgcccttgaacgacccgccgatgccgcgcaatgtcgtcctcgaccgcttcttcgacctgggcgccgccatcgacaaccgccccggcgtctaccacttggtctcctccgagccctgccccacctggactggcgacgagcaccgcctcatcgtcaccgacctgggcatcgcctgggcctgcgacagcttcaccggcttcggtgtctccgtccgccgcctctcaaccgatgaacccgtccccggcgcaaccatcgaggtggccggcttgaagaaccagtccctcctgcgcggtaccaccgacgccgccggcctggccatgctctcgctcgtgcccggcgccctagagagcgatgacttcccggcgcgcaagatgattgtccgcgccgagggcggcgagtgcgtctacctcgaccttcccgagacggccttcggccgctactgcttcgtgaacggccagaccccgcagcccgccgccgcgctctggctcgaccgcggagccgtgcgccccggcgagagtgtccgcgccaccgccctcgtccgccaagccggcacctcccagccgctcgccaatcagcccttcgacttctccctctacgacgaacagggaagcctcatccagacggccaccgccaccaccgatgtcaccggccagctctcggccgacttcaccctcccgcgcacggccaacgacggcctctactccctccgcctcgccctcggcagcgagttgctggcctatcaacgcttctatgtggccgacttcgtccccgaccgcgtcaagctcgcgctcgagctcacccccacccagctcactgccaacgcgcagacctacttcggcgcccccgtcgccggcgcccaggcacatatcaatctgcgcggcaaactctccacctccctccccgccgcgtgggaaggttggcaggtgggccaaggcagcccgctccccgacaccgagggtggctccctcaccactggcgaagatggcaccctcacccattccactcagctcatcagcggccaccgctacagcgcgccggccatcctctgcgccaccgtgcacctgagcgagcccggcggccgcaccgtcaccgccaacgccgccaccgagacgctcttcaccgagccggcctacattggcctacgcgagggcggcgcctccggcgcggaggccaccctcctcgtccccgaaggctccacggagcgcgaggccgaggttgcaatctccctcgaagcgcgcacctggcgctacctcacccgccgtaccgacctcggcacctaccagcgcgagtgggtggaagagacccactccgtcaagccgccgcagaaccggatgatcctgcgccagggagtcgtctcgcccctcgacctcaccggcctcgagcccggcaactacatcgtcaccctcacgcgcgtcggcgacggggcgcaggtgcgcagctcgctcgacctttggctcggcgacgcgccggcctacgcctcgcgcgataagcgcctgaatgttctcaacctcgccttcgccccgaccccgcgtcgccccggcgagaccaccgaggtggccctcgacctccccggcccgggcaccctcctgctcgccgccggtgccgagcgcctccagcccctgcgcaccttcgccatcccccaggccgggcgctacaccttccccgttgaactcccggcggacctcgcctgccgcgacttccccatcgccgtcaccttcaccgccgccaacgccgactgcgacacccgcctcaccggccgcgccaacctccccgtcgaccaaagcgtccaggccctcgacctgcgcctcaaggcccccgccctcgcccgccccggcaccaccgtccccgtcaccctcgccctgcccccgaccaccgatgccacgccgcgccaggtcaccctctgggccgtggatgagggtgtcctcgccgtcagccgctacacgctgcccgacccgcttgccgacctcaccgagctccccggcaccctcgccagcggcgacctctacggcctcctcttccccgatctggccatctcgcccgaaggccgcatcggcggcggtgcggggggcgaccttgccgccttcgaggaccgccccctggcgcgcgtcctcttcgaccccatcgccgtcggccccgatggccacgtgcgcgtcgacctccccatcccggcgaacttccagggccagctgcgcctgatggccatcgccaccgatgccgccggccgcgtgggccgcgcccagcacgccctcacctgccgcgcgcccatcaccctcaccctctcggccccggaggccctctgccccggcgacgaagctgacctcaccctcaccgtcacgaacctcgacctgcccgagggccccttcaccctcaccgcctttggcggacaggagctcacgcgcggcaccctcgcccccggcaagccggtcaccttcacccatcgcttcaccatccccgagcgcctcagcgagatcgccgccaccgtgacgatgggcgaaacctccgtcacccaacgcgagcgcctccgtgtccgcccggccgttccgcgcattcgggccgtcacctacacccgcctcgcccccggcgcgcccctccccgaaggcgccgaaaaggtccgcctgaccgacttccgtgcccgcaccgatgcctggttcgccgactatcccttcgactgcaccgagcagctttccgccaaagcctggccctgccttctggcgcgcagcgacctcgaccgcgaagtcctgcgctcggtcgtcgcgaagttgcgctctcgccacgttcgcggcctcttccgcctctggccgcagggcgactgcaacctcccggcctcgctgatggccacccacgtcgtcctcaccgcgatgcgcacccgggccgtgccgaacgatagcgaactgcgcgagcgcctccacgagaccctccgcgatactgcccgtgcgaacgacacgcgcgccgaggccgccttcgcagcctgggtcctggcgcacgacaacgccttcggtgcggtcgagttcgcccagtgcgttaccctcctggcgatagaggcgcgcgatggtgcggccctcttcgccgccgccgccctcatccgcgccggctacgccagcgagggcatcgagcccttcaagcgcgcctacgccaccgcccaaacccccgccctgccttactacatcaatgcgaacgcctggcaggccgtcaaggtcgcccttgccctcgaatccggcctgccggtcagcgacgaggcctttgcggccctcttcgccgccgactggcgcaccacccaagccaacgcctggggcggctacgccttctcgctggccaccaccctccccgagagcctccgcctggccaagcaggtgcgcgaggtgccggccaccgagggcacccacgccatcgccctcacgcgcacgctcgtcaacgcccagggccagcccctcaccgagcttgcccacggcgacctcgccttcgtgcgtatcgacttcgtcctcccgcgcgaggccgccgacctcgcggtgcgcgacttcctccccggcggcctggtctacgaggacggcaacctcgccacccgcgagagcgtcaccctccccgactgggcccggcagttgcccctcctccaggtcgaccactcccgcaagcgccccggcgaagtcgccttcatcggccaggccggctccggcaaggtctcgctcgtctaccccgtgcgcgccaccacgcgcgggaccttctcctggggctcgtgcgtcatcgaagcgatgtacgcgcctgacctcaccggcgcggacgcccccaccggcaagctcaccgtgaagtgacgcgccgccttcgccgcctccgccgcctgggcgcccggctgctcgccttggtctgcggcggggcgctcctctttgcgctcgcctgggccctcgccccgcgctttgtcgaggatccgctcccggccctcgaagcgcgcgccccggcccggtgggtctacgaccgcaatggcaaggtcctggccgccttccgtggcgaagactacgcctggcgcttccccgtccccctcgccgccatctccccggaagtcctccgcgccacgctcatcgccgaggacgcgaacttctaccgccaccggggcgtcgactacggcgcggccctgcgcgccctctggcagaacgtgacgagcctgcgcatcgtctcgggtgcctccaccctctcgatgcaagtggccggcctcgccgccggacgccgccgcagcctttggggcaagttcctccaagccgcccgcgcccgcaagatggagcagtgccactccaaggacgaaatcctctccgcctacctcaaccacgccccctacggcggccaatacatcggcatcgaagccgccgcccaagcctacttcaacacctccgccgccaccctcaccttcggcgaagccaccctcctctgcggcctgccccagcgccccaatgccctgcgccccgaccgccacccccaagccgcgcgccagcgccagcgccgcctcctggacatgatggtccgccgcggcgccctcacccaagcccaggccgacgaagcctacgcctcggccattctccgcttccgcgaccccgccacccgcccccgcttcgagcgcctctcccagcccgacgaaaaccgccacgccctcctcgccggctaccccattgatggcgacctccaggccgatgccctcgcccttctccgccgacacctcgcccgcctccccggcgtcaccgacggcgcctgcgtcatcctccgcgccggctcggccgaccccgtcgtctacctcggcaccctccacttcgcctcccccgccgccggccaagtcgatgccgccatcgcccgccgccaagccggcagcaccctcaaacccttcttcttcgccgaagccatcgaaggcggcctcctcgcccccgccacccgcctcctcgacgcccccctccgctacggcgactacgcccccgccaactacgacggcaccttcctcggctccgtctccgccgccgaagcccttgcgcgctccctcaacacccccgtcatccgcctcctcgctgaactcggcgaagcccgctgcctccgcctcctcgccgccctcgacctcgcccccgccgaacaaagcggccttgccctcgccctcggcaccggcggcgtcaccctcctctccctcacccgcgcctaccacgccctcggcgcccacttctcccccgaaaccgccgaactcatcgcccacatgctccgccgccccctccccggctcctccctcgacatcgcctggaagaccggcaccgccaacaacaacaccgatgcctggtgcgtcggctggacccccgactggaccgttggcgtctggttcggcaacaagcgcggcggccgcgccgaagccctcgtcggcctcgaagccgccgcccccgccgtcggcgaactcttcacccgcctctaccaaaacgcccccccgccccgctggcccaacacctgccccctcgcccccctctgccccgacagcggcctcacccccggccccgggtgctgcgcacccagtcggcagtcgccagtcgacagtcaacaaggcgctcccttggccggcccttccacctccggcgacagccttcccgcctaccgcccagcaccaaccgaaaaatccacccgccccgagtccgaggcgaacccgccccaggtcgagggcgaacccggggcggatgcaaggtcaacccggggcgagtcgggggcgaacccggggcgggtcgagagtcaacccggggcggatgcaaggtcaacccggggcggatgcattttaggggtcgtccacccccgcattcccctgcgccgctgtcctctcccccacacccccacctcaaacgccaacccgccaccggaacgctgccaaatcctctccccccaacccggcacctaccgcctcggccgcgacgccctccccctccaagccaaacccgccggcggcacctggctctgcgacggccgccccctcccccccggcaccccctccgtgcgcctcgcccccggcctccacaccctccactacaccaccccctccgcctccgccaccacccgcctccaaatcctcccctaacgccccacttccgcccccgcgcgataccctcaaaaaggtagggcctacctcgactcgaggtaggccctagttcgaggcgagctaggccctagttcgctttgaggtaggcgcagggtgtttgtggggcggggaggggagggcggttattttcgttgccttgagagcaggtattgggtataatgaagatgtcaaaagaaaagccccgcaccagaagtgcgaggcaagtctttcgactacggcatatagccttgctgtaaaaagacggcgctcattgtagcggaaggctacggtggtgtcaacaggaggaggcgagagtaatgaagcgagtgggtcttgatttgggcacggcatcgttgggatgggcgctctatgatgatgaggcgtttgcggaggcggcgcttggggagacggcgacttcgtgtattgagagcggggtcttggtctttccggaggggatggatcgggatacggcggataatctgaagtcgtgggcggcgcttcggcgccagaagcgggcggcgcggcggttgattgctcggcgtaagttgcggaagtttttgatgttgcgggcacttattgaggcgcagatgtgcccgttgagcgaggcggggcttaggcgctggaagcaggaggggcgttatccgctggatgacgaggcgtttatggcgtggttgcgcgtgagcccggagcagaatccgtatgccgatcgggcggcggcagcacagcagcgggtggatcggctgacgctggggcgtgcgttgtatcatatggcccagcggcgggggttcaagagctcacggaaggagcgcttggcggaattggaggcggccgcgggggagaaggtggataccacctctgctgcggcgaaggagctttcggcgatgaaggctgagatcgccgagctaacaaaggcgcttgaggcgaagcagttgaccttggggcaatacctctatgcgctctatcagcaacaggtcgcgttcatccgccatccagagcagtttgccaaggagccagagccggttcgccgacggaagacggggcgcaaggagcactatcaagttgagtttgagcagatagcgtcggttcaggaactaccggcagatttgaaggaaaagttctcgcggattctcttcttccaacggcccttgcgcgtgcagcggcacacggtgggttggtgtacgcttgagaaggggcgaccgtattattcggcggaggggaagcagaagcaggggcatcgctatcgccggtgtctggaggggcaccccgcgtttgagcgcttccgcgccctggcgttgctcaacaacctgcgcgtgagcacggagccctttgatgccgcaggcaccaagcagccgccgcggttggccccaggcgagggacgcgcactcacgccggaagagcgagatcggctgattgcgaccctttgccacaagacgcagaagcgtttgcgtgaggccctgacggcggtctttggcaaaaagacgcccttgcgcttcaacttccgcgattcggacgatgccccgatgatgccgacgaccgcggggttccagaaattgaacatccccgaatcggagtggcagacggccctcaatgccttggtggacttcgatgacatcgatcggctcatcgcctgggcgcagaagcggtggaacttctcggagaaggaggccatcgcctttgtgcgcattgccccctccgtcgagcgcgtctcctacagtctgcacgccatccacaacatcttgccctacctggagcgcggcttcaacctcaagaaggccatcttctgcggaaacctgaggcaggtggttcccgcagaccacctggaggatgtgcttgccgggctggaggcgtgcgaggcgcagtatgcccaggagaagcaagcgaatgcccaggcgtgggcgagcaaagccggtcctaagccgcgacttcagccgctcaccgagcgctatcgggcctacctggccgagcgctggggtgtcgaccaggcgcacttcgagcagctctatgtcgatacgcaggcccccgacaccgaggatgccgtcctgccgcccgtcgacctaggcaccatccgcaatccgctggtgagccggtcactgacgatgctccggcgtctgcttaacaccctccgccgcgaggggaagattgatgcccagacgcatatctttatcgaacttgcgcgcacggtcaatgacgccaaccactgtcgcgccatcgagctattccagaaggcgcaggcagagaagcggcaacaggctgccgagaagttgaaggagatgggcaaaacgccaaccgatgacctcatcttgcgctaccttctgcgcgaagagcagggaggcttctgcgtctacaccgggcagcccatcgatgatgatgccctctgctcctacgacattgagcacaccattccccgctcacgcggcggaagcaatgagctctccaacctcaccctctgcaacgccacctacaaccgccacatcaaatgcaaccgtctcccctccgagtgccccaatgccaacgccgaatggtcgtcgcccgaactgcccaatccgtgcccgcagctcagcctcagcgcacccatccggaagtggcagcaagagctcgaggagctcaacaaggcgctcgccaaaaagccctcccgcggcgacaaccccgaaaagttcgccagccggcgccaggcctacctgctcaagcaactccggcgcgactacctgcgcgccaagctcaggggctttaccctcaccgccgaggaggtggagtgcagcggctttgccccgcgccagttggtcgacaccggcatcatcaccaaacgcgccgtggcctacctccggctgcgctatccttatgtctatagccgcaacggggccgtcaccgcctcggcgcgcaaggcctggggacttcaagcggaagaggcaaagaaggagcgcaccgcgcacatccaccacgccgtcgatgcctgcgttattgctgcgctcgataacaagacctttgcggagttctgcgcacgcctcaaggtcgccgaaaccacgcatagcgaggcccccatcccgccgcccttcgcgcacttcaaggagcacatcgagcgctccacccagagtctcctcgttcgccacctccccaccaactgccagctgcgccccttctacttccgcaccgcccggctcccacacgatgttcgcgtgcgcctccaggcggagggccgcccgcttccgaggctcaagaccctggccgtccgcggctccttacacaacgatacgctctacgggcgcatccagcagggcggagagatcgtcaccacctcacgcaaagacattcaagcccagcagacgaaggccgacctcgaaaagctcttcaagaccgccgccgacaaggcactgggcacccacttggcggcgcaactccagcactttgtggatgctggggtcccggccaaccagcttcccttccaaacctaccgccatcccaacggcctctccgtgcggcatctgcgcgtcatcgtctcgaagccaagcgaccccaagccgctgcgcccccagatagaagaccgcaaagggtgcgtctactgctcaggcagcgatgcgctttacctcgagctggtccccgatgccaaggggaaatacaaaccccaatacgtcacgctcctggccaaggccaaggcgggtgccatcacactcgaccaacccctccaggacggtgccttccgcatctacgtctcgcaaatggtgctgatctacgacaaaacgcccgaggagttgaagcaactccccaccaccgccttggccaagcgcctctatgtcgtccaacaggtggaagatcgcggctccatctatctgcgctatcaccaagaagcgcggggccggacgcaacttgcaaacgatctagccgccataggcttgcctaggagtggccttgccaccttcaatgtcaccgcagcagtccccctccttcacgtgagcccaggcaactacctctcgcactgctgcttcgagggcaaggacttcatcctaacgctcgatggccgtattgaatggctgacgcatgattaaacgcaccctctgcttcagctcccccgggcgcttacgccttcacctgcgccaactcatttggcaaggggaaggcgaaggcgcgcgagaagcctcaatccccattgaagatgtcgggctaatcatcatcgaatcccctctcatctcaatcagcgccgcgctcctccaatcgctggccgaagcgctcgtcgccgtcgtcctctgcgatcgacagtacctccccgccagcgtcctcctcccccaaaccgcccacacgcgcgtcggtaaactcctacgcttccaacaggccctcaccgaggcccaaaagcgaaaactctggcagctcatcattaccgccaagatccgcaaccaagcccacgtccttgccccctacgccccagaggccgctgaacacctccaatccctcgccaagcaagtcaaacgcggcgatgaccaaaaccgggaagcccaagctgcgcgcctctacttcgccgccttccccagtggacccaccttccaccgcgaacgctttggcgataaactcaatgccgccctcaactacggctacgccctcctgcgcgccaccgttgcccgtgccctcgtggcttcgggtctcctcccggccatcggcctccatcacacgaaccaatacaaccacttccccctggccgacgacctaatggagccctatcgccccttcgtcgatcaaatcgttctcgcccacctcgatgccttcacttcccccctcgatgccccctccctcacccccgaaaacaagcgcctcctcctccccttcctcacgcaagatgtctgctttggccaggccaagcgccccctctggaacgccctcctcctcacctccgcctcgcttgcgcgcgccatgcaaggccgcaccgaagaactcctcttccccacaccaaccacatgagcgaacactctgcccttaaccaatacgacatcatgtggttgttcgtcctcttcgacctccccactgaaaccaaacgccaacgaaaacacgccacgcaatttcggaaaggcctcctcctcgacggcttttcgatgttccaattctccgtctacctccgccactgcgcctcgcgcgaaaacgctgccgtccacatccaacgcgtccgaaaaatggtcccaccggaagggatggtctccatcctcgcaatcaccgacaaacaatttggccaaatcgtcatctgctatggcacccaagaaaaaccacctcctccacccccgctccaactcgaactcttctgatctgcgccacccaaaacgcacctcaaaacggcgcgcgtgggggctcattgtcaccaatgagcccccacgcgcttccctcccttcttgcttatccgattatcaataaagcacttaccgtgtctctattgtaccaaatcccaagaaggggtctttttacagcgcggctccttcacctccgcacaagacgaagattgtaccaaatcccaagaaggggtctttttacagcagaactccggcggctaaggcgctttataagattgtaccaaatcccaagaaggggtctttttacagcaagaagtcgccttattacagccggatttgattgtaccaaatcccaagaaggggtctttttacagcacgggggcacaacgattgtttgccgcaacgattgtaccaaatcccaagaaggggtctttttacagctcaacttgtcggcttttgctgaaaatgttattgtaccaaatcccaagaaggggtctttttacagcttgaaacttggccgcccgtcacgcgcgcggattgtaccaaatcccaagaaggggtctttttacagcccgcgccgcaaacgccaagcacggcgagcgattgtaccaaatcccaagaaggggtctttttacagcggcaacggcgaggcgagcgctaggaggtctattgtaccaaatcccaagaaggggtctttttacagcgggtaagttggcggcgttgccggctgcgctattgtaccaaatcccaagaaggggtctttttacagccggtcgacgaggtcgagcagctcgcggcttattgtaccaaatcccaagaaggggtctttttacagcgggagtgcgagagcttggatgatttgcgcgattgtaccaaatcccaagaaggggtctttttacagctcagcgtcgcctagtttgttaaggctcacaattgtaccaaatcccaagaaggggtctttttacagctggccgtccatcacgataaggcccggcgcgattgtaccaaatcccaagaaggggtctttttacagccgcagggcggccacggtcttgcggtggattattgtaccaaatcccaagaaggggtctttttacagcttaatgccgcgcactattatcgggggtggtattgtaccaaatcccaagaaggggtctttttacagcagtttggccgatcggcttgctgaggatggcattgtaccaaatcccaagaaggggtctttttacagcgggctaatgtgcgcgatgcgtcatcgttctgtgcactgagcgtaacactgacggcgaacggcgggatgaacccggggcgggtcgaaggtcaacctggggcggatgcgaggaaagagcgcagcagggggtggggttggggggttggagccaggcgctcgctgacgctcgctgcgcggcaaatatgccgcgccacagaaggccgaaggcgctatgccaactccgttgatggcaggaggagaactggatggaagataaggagaccccgagccgggcgaggcggaggccaggcgcggccattggagcgtccgggggggccagacgatcgcggaattcgaagaggcctttaaggttttgcagtggccggttctgccaggccacccgccccaggtccaaggtcaacccggggcggatgcaaggtcaacccggggcgagtcgggggcgaacccggggcggcaggaggtggggtgccaggcgctcgctgacgctcgccgcgcggtgtgcaagaggctcactacgctcgcgatgacagatgacagagagccaaagtgcccgcagggcgcttcggccggggtggagcgcaccgcgctcccgaggggcgtggggacgagtagcccccatagctaacggctaaaggctagcggctaaccgctgcaaccaggcaggtggcgcagtggactttggggttgtggcagaagtcggtgtagagctggaggagggcctgctggcggaggccctcggtggggagatggtcgagggagccggtgaggtggaaccaggcctcgcgcatgggcatcgagacggtctcgccggggaggtcgggcagacgctcgagggtgaggcggccgagggcgagacggtaggggacgaaaaggttggtgacgatggcgttggcgcgggcgcggccgatggggttctgggggatctggaggggctcgcagagggtttcggcggcctggcagagggcgtcggggagggccttgggggggaggtcggccagacagtcgaggctgtcgaggaggccgacgaggccggcgaggcggcggaaggggtggttctgggggcgcatcgcgcgcaggtcccaggcgtagggggcgaggggcggctggaggctgctctgccaccagaggtcccagagggcgcggttgtcctgggggaggaggccggcgtggccagcgaggatggcgaagcgctggaggggcgggaaggggaggaggcggcggagggggacctcgcgggcgagacggcagaaggtctcggcgttgcgaccgtagcccatcgcgcgcatcagcccggcgtagaggacctcgtggggcgggtcgacgcgcagggcatcggcgaggaggcgggccttgttctggagacggaagcggccggcctggaggaggagggcgtcgagcgcgccggggtttgaggcgagggcgaggcagcaggggcgcgcgtcgccgggcgcgtcggccttggcgtagcggtggcgggggaggagggagaagtcgaagccggcggcttggggcatccaggggcgcagggcgagggtgggcacgcccggggggaggtgcttggccgcggggccctcgaaccaggtgacgtgcaggatgaggttggcgtaggcgctgtcgccggcgtggccgtggaggtcccagtcggccgggcggaggtggagctcgatgtcgccgcggcggaggaggccgcccagggagatgagcgcgtcctggaagtcgggcccgggaccggcgttgtggcggccgggggcgatgacctccaccgcctcgcccgaggggagcgcgagggttttggggcggtagcgattgctctgccagagggcctggagggcggcttcgtcaggcggcgcgcccggctcggggctcgcctcggcacaggcaagcagcttggcgtaggagaagctgacagccgacagctgacagctgacagcgctggcgcttgaggtggctagcccgtccgaaccgtctgagccaggcacgagcgccgctgggttggtgtctatccgtcgcgtgagcggctgttcgctgtccgctgacggctgtcggctatccatcttatctccccttgcccccacggttcctcgcgggtcggcgttgcttagaagaactttcggcgggagaagaagatgacggtgatggccacgagcagaagggcgagggccaagacaatgcagaagcccagcggcccccattcgccgccggcttcgccactggcaaagggcagccacacgttcatcccgaagatggaggcgatgagggtgggtacggccaggacgatggtcatcgacgtgaggaacttcatcacattgttgaggttattgttgatgatggaagcgaaggcgtcgagggtgccggtgaggatgttgctgtggatggaggccatctccagggcctgctgatactcgatgcgcacgtcctcgaggacgtcgaggtcatcttcgtcgatggccagctggcgggaggtgcggatgcggccgaggaggatgtcgtcggccttcagcgaggtggtgaagtagacgagggacttctcgatgttcaagaggcgcatcaagccctcgttggagatggactcgtggaggtcttgctcgaccatgtcggcgcgctggcggatgtcgcgcaggtagcgcagatagaggatggccgcgtgccagaggaggtggaaggtgaagcggaacttctgctcaggcgggcagacgcgccggatctggtccaggaagctggcggcaatgggcgtggggcggttgcagacggtgatgacggcgttggaggtgtgcaccacgcccaggggcagggtgttgaaggggtggaggttctcgttgggctcgtggtagggcacgtggacgacgatgaggacggtgccgtcgtcgtcgatgtccatacgcggccgttcgtcgcggtcgagggggtcggagataaactcgcgcgagacaccggtgagggtctgcacgcggaggatttcctcggtggtcgggtcggctaagttgacccagcagggcccgtcgggggtgaccacttcgcgcaggctgccattgacccactggtagattgagagcattgcttatccctcctttaacgcgcgggctgctgaacgaccagcgcggcctcgaagtctttcatcttccgcttctgcaagaacgagtagcccttgagcatccagagcttgcgcaggcgcaggtgccccaggaagatgaccgtgcggttgtgcgggaagcccccgggcaccgacggaatctgcttggtacgggcgtcgtagtagtagtggaagtagtgcttgtagacagacgagaggtccgccaacatcagcagcttgcgcagccagcgcggctggaagcgatggagccccacgcccgattggaagtcgatcagcgccggcttgttccccggcatcaccaggacattcttggcgttgcgcgcgtccagatgcgtgaccccgcgccggtgcaaggcgcacatcagccgctccaggtcccggaagaagctcgccggcagataggttatctcgccctgcagcgtgccgcgcacaatcgaggtgttgcgctggttcagatcccccaatgtctcgcccggcaacagctccatcccaaaggcatacgcatcgctgcggaagaccccctgcggcacgccgcggaccccctccaggcgcttgagcagcgcatactcgtggctcaccatccaccgcccccaggtccaacgaatccaccacgggctcttgcgaaagtccttaatcaccacctcgtgcccctcccacgccaaggcatagacccgcgcattccccacgcggcccttgctcaagcaacgcgccgggccctgttcccaatcctgccgagtcggtatcttcgccattgtcgtgcctctctccttgatggttgcgcgctattctagcacaagtgcctccgccgcgcagacgcaaggcgcggcggctcgcgatgctcgccagcggtcagccgttaactgttagctgttagcgcgcgtgccgcgacggaggggctggagaagcgatggcgaggggcctccctccggccgccccgggtcaaaggcgaacccggggcgggtcgagggtcaacccggggctggtcggggatcaacccggggcgggtccacctcgaacccggggcgggtccacctcgaacccggggcgggtccacctcgaacccggggcgagcggcctggcggagcaggccgatgcactacgcttaccctcctcaacgcgcccgggcgctcctcgcgcgagcggagcgaactcctcacgcgccggaggcgcacttcgcgccccgttcacacgcgcggtgagcggggcgggcgacccctagtttgaccttccgtggcaaaagccgtataatacggcctcatcttttacgccttctctggaaagctagcgaggaaccttatgtcttccctgtttgatcgcatctttgaggaccctgcgaagttcacgtttctcaccgagacgctcggcgagtgcaaggtcgatacgcccatccgcaataccaactttgtggaagaggacgatatgtactcgctgttgagcgtgcgcgcggcgtatgtccacgagtttgttaagaagtatggatcggtgcccaaactcgagagcgccggcccgcaccgcaagattttccacgacccggtggccacccgcgcggccatcgtcaccgccggcggtctctgcccgggcttgaacaatgttatcaagggtctggtggaggtgctggccttcgactacggggtcaagaccatttacggcttccgctacggctatgccgggatggtgccggacttcggctacgagccgattctcctgacgccggataacgtcgataccatccacgaagatggcggcacgctgctgggctcctcgcgcgggcagcaggacacctcgcggatggtcgacactctcgagcgcatgggcatcaacatcctcttcgctatcggcggcgacggctcgctccgttgcgcacgcgatgtctccgacgagtgccgcaagcgcgggctcaagatttccgtcgtcggcatccccaagaccattgataacgacctgcacttcgtcggccgcactttcgggttcgagaccgccgtggccgcagccgtgccggccatccgctcggcccactccgaggcgctgggtgctttccacggcattggcctcgtgaagctgatggggcgcgactcgggcttcatcgccgcctacgccgccctggccaacccggtggtcaacttctgcctcatccccgaatcgcccttcaccgtcgatggcgagaacggcctgctgcgcgccatcgagcgccgctttgagtcgggcaagagccacgcggtgatcgtggtggccgagggcgccggccaggagctgatggagggcgaggtgcgcaaggacgcctcgggcaatatcctcaagaaggatatcggcgaatacctcaagacccgcatcctcgatcacttcaaggccaagggcgacaagagcgccacggtcaagtacatcgacccctcctacaccatccgtagctgcgcggccgacgcctccgacgctgtcctctgctaccgcctcgcccgcatggccgtccacgccgcgatggccgggcgcaccaactgcgtcgtcggccgcctgaacgacgactactccctggtacccatcccgctggccaccatcgagcggcgcaaggtggagctcacctccaacctctgggcctccgtcctcgacgccaccggccaggagttctatatgaaccccgagaagaacgcccgcggcgcgatttacacgccctaagggagcgggtagcggttagctgttagcgcgcgtgccgagacggattggttgagggggtacccattattcgtccggcatctgccctttcgtttgagaagcctcgcgcgaacgtcgcgcgaggcttcttgcgttagaggcggtggcaataacaaggttggccttggatctgcccatcgcgggacgcgggctaaccgctagccgcttacacctcaaagtccaggcaggcgcgctgggcggtgaaggggcggaccttgccatcggccacggccacgtgggccgggtgggtggcgtaggccttgagcgaggcagcgtcggcaaaggtggagtcgagcatcacatccatattggacgagggcaggccctcggtgtgaacggtgatgtccaagagccccgggatttgccccttgaggccttcgaggccggacttgatcccgagcttgacggcttgcaggtcggccaggtcagccttgagcttccagagaatgatgtgtttaaccatagtgtaactccttgttgggggcattatacacgctttgggttcgctgcgcttgcgtgcgtatcccctttgctttgtacggccagtgtgctatactgtcactgttatgcaggaggcgatgaagcgggtcttggtgatcggcgcgagctcggggatcgggcgcgcgttggtggagggcttgcgcgccaaggggtttgaggtggtggcgtgcgcgcggcgcggggagcttttggcggcgctggggggcgaaaccttcgtgctggatgtgaccgcacccggggccgtcgagcgcattgcgcaggtgcaggccgatacggtcatcttctgcgcgggcgtggggacgcggagccggcggccggcgtgggagctgaccgagccggcgttggcgctgaatgtcttggcctttgagcgggtggcgcagtgggcggccgagagcaaggtctgcaagcgctttgtggcgatttccagcattgccgggctgcgagggctggaggatacgaatggctactcgccctcgaaggcctatatgaatgccgcgatggagggctatcggcggcggtggcggcacgggcagcaggggtgcgagccggtgctcgtcctcccgggctttgtcgacacggccttggggcagggatcgaccttttggcgctgctcgccggaacgggcggctaagtgcattattcacggattggaacggcgccgggcggtgatttatgtgacaccgcgttggcgcttgattgccctcttgctgtggctgttgccgcgctcactttacgaaaggataccacgactatgagcatttggacgcatgtgaagaccgggctgctgtgtgcggttgtcggatggatgggggccgttggccgtgccgtgccgctggacttgacctggcagccgggcgagagcttgcctgtggccgtggcgcggcccttcgccgggaaggtgggcgaggtgctggtgctcgccggcggctccacttttgaggggggccagaaggcttacagcgcggccacgtggatctacgagaaggccccggcagccgagggcgagaagagccgttggcagtggcgccaggtgggggcgttgcccgaaggtctggccgaaggcggcgcggtggcggtcaatttgggctcggccctcaagccgcagtggagcctggtgtgcgtgggcggcgtgagcgcgcagggcgctaaggcggatgcctttgtgctggatgcctcggggaaggtcgagccgctgccgtcgtgcccggcggggacgctctcgatgacggccgcggtgccgtgggaggggg

SEQ ID NO: 3203 - DNA, 23189 bp, synthetic construct
  source 1..23189: mol_type = other DNA
  misc_feature 1..23189: note = Synthetic
cgctcgtgcaaccggcaccgcatggtgctgcaagagagaggatgtctcatgtttcccaccgcagaaagtggttttctggatcccgcagccacgctggcgggacgcgcatccgtcgctgccaagccccttgtccaggagaggcccgatccggccgaggtcccaattccggagcttgcgccccaatggaagaagctggatctggcggagatcctgaagaggcccgccgccttcctctcaatcagccagaccaattccctttataagccctggggctcacaggcggcggagaaacaatgggagcgtggcacgcttcccgccaccatcaaggtggtgaaggcggcgcgcagggcccccaatttcaagtccttcagctggattggctatccgcttttcagggagaaccacccgcagtcgatcttcgacaaggtccagtacgaaagctggatcgaggggctggatttcgacgaggcgaagaagaaggcggacaacgaactcgtggaggaactacgggccctggttcaacccggtgatctcgagttcgatgaatgcgcgcttcagactgccttcgtaggaaccccacttccgctggaactctcgcgcaagcgaattgaagtcatcgtcttgacgggcattcatctggactggtgcatcgagggcaacacccgctctgcgcgcgacctcggttaccttccgatcgtgatcggggatgcgaccgcgacaagaaggattgaccagcaggcagccgcctatgaacgcatcaacaacttcttcgcccctgtgatctcctcagacgacttcgtgcgactgctcggccaggggtcctgattggctgccggggtgcgcgtactctcgcaccccggtagtcccgcaactcgaggcaaggatagtagaggaagcgatctcccgtcttgcccagcagtattgggaaggcttcacagagaggcccattgccagcctaaaagcgcagcgatgccgagaccatcccgatcgtttcccttgcccccttcacgtgaccggcgtcgaggcggtgcagggcaccgaccgcggcttcgatgggccccatcagcttgaagccatagctggcctgcagggcgatctcccggccgctcggctgtggcgagaggcgcagcctgctgtagccaatcgagccgtccatgttccgctgggtgggaaccgagaggtcgatcttgccggcctccacccgcagcggctggctcaccgccagagagaatacatcctcctcctggaacaggctgtgccgtgccgcgcccacaccgaaggaggtggtcacgatgccttccccgctgcggataagtcccccctcttgcttgaaggagctctgccccaccgcggccgcgaaggtgagctgcgtgtccggcgcaacttcgagcgtcatgccaaggttggcgaaaagcgtgtcggacctcatgtcctcgccaaaggcgccccgagagatgctgccaagcagcgcgccttcctccgagaccgcacccacggcgccttggaaggtcatgccatcgccaatggtgatggtcagctgtccaacgcccccgaacatcgagggctgcttcacgaaggaaccttgctcctcagcctcgcccctgccggcgaaggccgcgatctgaaaggaggtcctttcagaaagggcgaaatcgagattggacgcgagcccgcttttcatcagggccaggtgcggctgatcgaagctgtcgggcgccatcaagggtgcgcgcccgaaacccacttcgcggaggccgaaggagcggcccagatccgggttcaacgaagcagagaccttcgtgtaggtgccggcaagttcgaacgtcatccgtgaatagggactttgccccaagcctggcccggtcgcgcgcaagcggctggctgtcgtgatggaaaagggaccggcctcataggtgtggatgctccgctcctcgatgccgccgaagagctgcaggcgatgcagggcatcacgccgctggtccggactcccggacgtaacgaagttccccaggtcgaactcgaaggcgcgcttgtacttgtcgagagcgatcaggcgatgtccctcgagcgcctggcctatgccatcgccgaaggctggcgagacattcaggctgctaccccgcaaggaaagcttcctgtcatcgacatctgctccgaggggcacggcaagggttcccaccggctggaatgcgcgctcgaggttcatcttgccgtggccataggtatcccgatcccccatgtcgtccgcggtctcgaagaggagggaggtgatttccggagctttcagatagggaaaggcttcccgcagcagtgcaatcccccctgcgaccattggcgtcgccatggaggtaccggaaaattcctggtagccgccgtcgggaacggtcgaattgatgctggagcctggggcgaaaaggcaccactccgcggcaatcccgcacttgtttgaatagctggcgatctgcccgtcgggatcgagggcaccgaccgcaacccaatatcccttccacttctcgttgtagacaggatcgtaagccggcgaggaaggtgtatccgaggactcgttgccggtggccgccaccatgatcacgtccttttcgacgacacggtcataggccttgatcaactccggaaagcttctttcgaagtcttccggagcaagcgtaaaactgccgtagctattgttgatgacggaggctccggagttgaccgcgtgcgtgatcgcccggccgaagttcaggcccccagggccaaggggtagccgcggtctcgaccagtcgttgggatcatctccatagtcggcaaccgaaatgggaatgatggtggcgctataggcaacaccgtgcatgcctttcccgttacgatttgcaccgatgatgccggccacatgtgtcccatggctgctgagatccttgacgtctccgaagccggtgccttcagtgatggcattgtagggcttgaggagcctgccctcgaactccggatgactagcatcgatgcccgtatcgatgacggcaaccgtcacgccctttccggtgaagcccatcgcataggcctgggaggctccgaccatggcgagaccatggttcgagcgatactcctccgtttcaaagtcacggggatcgagcggctgggggcgaggcggcggctcctccggggagatgtcctcaggctgcgacttgccgctgctgcctccaccacccgaggatcccccgagtgccagcgcaattgcaccaccgccaagggccagcgcgcctcctgcaagcagagcaccaccagaggctccgccgccagcacccgcacctccgctgccgtcaagagcggtcctggttgctcgggcgcgggcctcggcgacctccgcagaggttcgttcgatagcttcactcagttgcggccggagatggcgtgctctttcaagaagaagccgagtttgctccggtagctcggccaattcttcccgcaagagctccaggaagcgctcgtcgtcgtgagtgtcggaccgctcgaaagacaagaaggctggcgccggctccttgggtgcaagatccggcgatgcatgggccgaggaatatccgatcaccccgccaatacataggagggatatcgcgcttcgtactttttgatattcccgcctcatcagcgcaatgccgctcttagcttattctcgttattatgcacacaatctatctgtctagactttggcgaagtcagacacttactagaaagatagatttacaaacgcttggatggcgatttgctatggcgtagagcaaatgacattgttgccatgtgggcggctcaagtctcaaattctttggtatagaacgagagaaaattgaacatattaaagaaattggtagagttctttctttcacctaaatggccttgcgataaccttggaaaagcccttccctacccttcatcgatagaaaagctccaaatcactgcccttcaggctgacaaccataaatagtttgccgaagcgaatcgccgccaaagcgtgcactcctgcaggtgcatgcctcgaccctcacgcttctttttcacgggcctgccgcaggctgaaaggccacatcttcgatgggcttcttgttccttcctgctttggcctccagggagatgacaccccgctcttgacccggcgcccctgtcgcagtcctctccctgcagtgtccttgaggagtcagaggtggaccgcgggccgattcatgcctatcgccggaaggtgagcgccggcgagatcaagccggatgcggcgcaggagctggcagcggagaagctgcaggcgctgcatcatgccctgcgggactaccggccggcggggggccggaccagctggaaggagcgcctgggcctgggccggcgacggatcgagccgccccaggggctctacctctatggaccggttggccgcggcaaatcgatgctcctcgacctcttcttcgagacggccccggtcgagcgcaagcaacgtgtgcacttccacgccttcatggcggaggtgcaggagagactgcatcgctggcggaagcagacccgcggctcccgggccgatcccctgccagagctggcggccgagctggccgaggaggcttggctgctctgtttcgacgagttcgtcgtcatcgacatcgccgatgccatgatcctggcccgtctcttcgaaagcctcttcgacctcggggtcgtggtggtcgccacctccaacttcgagcctgaccgcctctatgaaggcggcttgcaacgggagcgcttcctgcccttcatcgagcttttgaagcagcgcctcgacctgctcgacctcggcagaggcacggattaccgcctcgatcgcctgaaacagcagccggtcttccactacccgctgggacccgaagccagccgcttcgccgaggcggccttcgcggccctgacggaaggtgcaggcgtggcgcccgcgagcctcaccgtcaagggccgtcggcttgacatcccggcggcggccgctggggtcgcccgcttcaccttcgcccagctctgcgagcaaccgctggggacaagcgactatctggcgctcgccacccacttccgcgccctggtgctggaggaggtgccggtcatgagcccggcgcagcgcaatgaggcccggcgcttcatgcacctcatcgacgcgctctacgagcaccgctgcaagctggtgataaccgcagccgcgccgccggaagagctctatccggaaggcgacggcagcttcgagttcacgcgcaccgtcagccgcctcgcggaaatgcaggccgccgattacctggagcgcccccacctcccctgaccgagtcctcgaccatcgagatgaaagccggcgactggctctatctcgaaggcggggacactcatcgggtgaaaggtctcgaggtttctgcgctgctgctcaccatcctcttcgacggcaagctgcactagatcaaatcgcgtttgatctgaaccactatgggggttcaggcaaacgcggttcaggaggcagccttcggaccgcgctccttcagcgccttcacctcggcttcgtcgaagcggaagtcgcaggcacaaaactcgcaggtcatggtgagcgccccctcgacggtcaggtgatccagctcctcggaggaaaggctggcgaggatgcccgccagacgctcgcgggtgcagcggcagccgaccgcgagcggccgggactcgaagacccgcaccccatcctcgtggaaaaggcggtagagcagcacttccggtgccagatccggatccagcagctcctcctcggtcaggctcgccatgaggatcagggcacggcgccaatcctcctggctgatctccgctgcctccccctgctcttctccgggaatgcgctcgatcagcaaggcccccgcgcgccagccaccggcaagccggcgggccgccaccatgatcccggcgttgatctgctgcgactggcggaagtagtagagcagactgtccgccagcctgggccccatcagctccacgagaccctggtagcgctcgctctgctctccctgatcgacggtgaaggccatgtgcccgctgccgaaccagggctcgacctccagggccgcgccctcggcctccgccgcagccgccgcctccgcatcgaagcccgcatagccccgcagatcgcccgccgaggtcatgtccgccaccatcgtccggatcggcccttcccccttgatctgcagggtgaagacgccctcgtacttcagggtggaggcaagcccgccgcccagggcgagcagttcgccgaggagctgcgccaccggctgcgggtagccgggccgcgtgaggatggtatcgaccacctgcccaaggcgaagcagccttcccctgatgcccgagctttcgatcagaaagggcaggaccaggtcgtcggtgggccttgaggtcttctcagctatgccagacaccagagcagtatcgccttctgtgcatgtaagcggttttccgcctcgtcccaaaccaccgattgcggcccgtcgatgacctccgccgtcacctcttcaccgcgatgggccggcaggcagtgcatgaagatggcatggggcttcgccccggccatcaattccggggtcacgcggaaggggctcagcagcctcctccggcgctccgtgtcgttcacgtcatcccccatggatacccaggcgtccgtcaccacacaatcagcatcggcgactgcctcctgcggatcatggaggaccttgaccttgccgccctcggcccttgcccactccagcacgtccgcagggggcgaaagatcttccggacaggccagccgcaattcaaaatcgaagcgcacggcggcatggatccaggaggtcgccatgttattgccatcccccgaccaggccaccacccgctgcgagatggggcccaggtgttcttccacggtcatgacatcggccatgagctggcaggggtgggtccggtcggtcaggccgttgatcaccggcacgctcgcgttttccgcgagctccagcaacttctcctccttcgtcgtacgcagcatgatggcgtcgacgtagcgtgaaaggacccgcgccgtgtcaccgaccgtctcgccacgaccgagctgcgttccctggggctccaggacgaccggctccgcgccaagctggcggatgccgacctcgaaggagacccgggtgcgggtcgagggcttctcgaagaccagggcgacggccttgccctcgagcggccggtcacggccagcggtgccggccttgcaagccttgcccagctccaggaggtgccgcagctcctgcggctgaaaacggtcgaggtcaaggaaatgctttggtgctgctgtcatgatgtctgttccgcggcggcgaaactgcccgcagtttcttccaggatgccgacggccgtgtcgacctcaccacggccgatgatcaggggcggcaagagccgcaccacgttttccgcggcaccgaccgtcaagaggccgcgctcctgtgccgccgatatcacgtcgcccgaaggcacccggcacttcagccccagcatcagtccggcgcctctgaccgcctcgaagacctgcgggtgccgctgcaccaggccttccagtttctgccagaggtaatcgccggtctgcttcacctgctcaagaaagccgggccgcaatagctcgtcgaggacggcatttccgcaggccatggccagctgattgccgccaaaagtcgttccatggctgcccgggccgaaggcccgcgccaccgcttccgtcgtcagcagcgccccaatgggaaagccgcccccaaggcccttcgccagcatcatgacgtccggttgcacgccggcccattcataggcgaagagctttccggtcctgcccatcccgcactggatctcgtcgaagaccagcaggagcccgaattcgtcgcagatccgcctcagctcgcgcaggaattccaggcgtgctgcccgaatgccgccctccccctggatgggctccaccaggatcgcagccgtctcgtcggtgatcgcattgcgcaattcgttggtattgccgaatgcgacctggtcgaagcccggtacattgggcgcaaagcccgccagatacttctcgttgcccgatgcggagatggccgccagcgagcgcccgtggaaggaaccgtggcaggcgatgatccggtagcgctcaggctgcccttgatcatcgaaatacttgcgcacgatcttggccgccgcttcgaaggcctcgacccccgagttgcagaagaagacccggtcggcgaaggagtgctcggccaggcgggccgccaggcgctctccttccggaatgcggtagagattggaggtgtgccagagcttcgccgcctgcttctgcagcgcctcgaccagatgcggatgggcatggcccagggcacagacggcaatgcccgccatgaaatcgagataccttcgaccgctggcgtcatagagccaggcgccctcgccccgctcaaaggccagatcggcgcgggcatagttgcccatcaaggcatcacgcatcggacttcctccaaagcagcagcggcggtcgctgcagccaacagcaccggaaaggcggcacgatgccgccgccgcagggggctgtcaacggcgggaagcctgcgccctccagctctttggcggaggaggatacacgctttagactagatgccctgcccaatctctcgcctcggcacgaaagggtgccagcgtggccccttcctccctgtccgcaggcggtcccgatagcctgatccggctcgctctacagcccggcaagcacggccgatgggcaggaaagaagcgcgctgccgcaacgctcccgcgcggcagctctcagatcgtgatgctgccctcgaggtagagcaccgcccggcccgaaaggaaaacccgcgcgccctcgaggcggcagaggagatccccacccctttgcgatacctggcgggcgcgcaaggggttgcgctgcaagcgctccacccagaagggggtcagcacgcagtgagccgatccggtcaccgcgtcttcatctatgccaaaggcaggggcgaagtagcgtgagacgaaatcctgctgctcgccccgcgcgctcacgatcaggccatctcccgggagggccgcgacctttgccagattgggcgcggcgcggcggaccgccgcctcgtccggcagcagcgccaggaacttctcctcccgccacacttcaagcgggatggatcccagggcggccgcgaccgccgccgcctcttcggccgaagccttgcggggcggctgggccggaaaatccatggtcaacagctcgccctcgcgcgtcaccgtcagcgggccgctgcggctgtggaagcggaccttcgaagcctcctgccgcagcctggaaaagactacctccgcgccggccagcgtcgcatggccgcagagatcgacctccaccttcggggtgaaccagcgcaggtcaaagtcgccatccggccgctccaccaggaaggcggtctccgccagattgttctcggcggcaatggcctgcaaagtctcgtcagccaaccagcgctccaggggacagacggccgcgggattgccgccgaagacccggtgcgtgaaggcgtcgatctggtagagcggcagcttcatcttcacccttcgctcccaaactttgtcggttacctgggcagaagccatcgggcgtatctgcaggcagatttccgccctctgtccctatcacgcagctgcgggacgcgctttgcaatcgaaaacgaggaatctccgcacacccactcccgacgagggtggagcgcagcacctcctctctcctcgacaggaagtgcctggcaacgctgaaggccaattgaaaatggtcccgcacatcactgtgcgggaccatctataggcgagctttcgctccagtttacgcttttggctttgttccatggatggaacagagccgaccgtgataggcctttttatgctaccataacgggtggagatcacaatagcctttttgagaaggcatatgaccggagccagagcaatggattgggttctaggcatagatgtagggaccaactcgatcgggtgggcagcattcgaggccggtgaacagacgaagccgatccgtttgctatccgggggagttcgccttttcgactggggacgcgaaagccagaacgcggtttccctgatgaaatcacggggagagaagcgccgtggccgccgtcgcctccgggccgctcgctggcgcagggaccgcttgtgccaggtgctcacgaggttgggcgcagcacccagcgatcctggaccgccggaagtttggcgcctgcgcgcacgagccgcgtccgaacccttgagcggcagcgatgtcgggcgcgtgctcctgcacatggcccggcaccgcggctttcgcgggtcgatactgcgccccattgaaccggcaagtgacgaagcgaatgaacagaaccgctggaacgatgccgaacgcgacctgcgttttgccatggcccagggcggccacctgacggtcggcgagctattggccaaaagggctctcgagggcaaggcggtgcgcgcgcgccgcggcgaaggggccgcccccacccgtgcgctcattgccgaagagttcgacaggatccgctcggtccagcaggctgcgctcgaatggaccgaagaagactgggcaaccatcagggacctgatccttgagcagcgccctttgcggcctccgatagctggccgctgctcggtctttccggaaagcgacgaaaggatgccgctgattcgaccgctggcacagcggttccgcatcctccagaccctttgcaatctgcgcctccgggaagagcccaacgcagcggcgcgcatgctgacaaccgaagagtttgaagtactcctcgacattctggacaagggcggcgcccattcctgggcaagtctccgccgcgccatcggcataaggacgcggggtgcgcacttcaccatcgagcgggaaagggcggtgggcgcgaaaaaggcggattcgcgtgaggtgaaggggtgcctggccgcctcccttttgggcccggtcattccatcctggcaggacctttcgctggaggagcgggaccgcctcgtggcacggctgcttcagcatcgtgcaaatcgaagggcactgctggaattcttgtctgcagaaccctggccggaagaagtccgggccgcaatcgccgacgcggtgcagttcgaactgacaaccgagcggctgagcctcggcgagaaggccgtgtccctgatcgtgccggaactgaaacctggggttccgtcacacgaagccttcgaacgtggcgtggggctccaccacagcgaccggcgcccgcgggaacttcttgatcgcctaccctactacggcaagctcctgcccggccgcgtgtcgggtggcaccggcaatccgaaggacgacgactgcaagcgctatggcacggtcaacaacgtcacggttcacatcgcgctcaacgaactgcgcaaggtcgtcaatgccctcctccaccgctatggccgcccccggcgcatcgtcatcgaaacggctcgcgagctgaaggccaacacgcggcgcctgcaggaaattgccgcggaacaggcacgcagggagcgagagaacaaggacattctcaaacaaattgcggagatgccccgcgaccggggctttcagatcagccgccgagagcgtcttctgcgcatgcgccttgcgcgacggcaggaatacatctgtccctacaccggcatcgtaatcggccagtccgacgtgctctctgcagcctaccagatcgatcacgtcatcccccgccgcagagggggaaccgacgccttcgacaatctcgtcctctgtgcggaaagcgccaatcgggaaaagggcaaccagaccccctacgaggcctggggtgaaacgccggcctggcacgccattgaacacttcctctcgcggatcgagaaacggcatcccggcctcgcctggcgttttgccccggatgccatggcgcgcatagagcgccaggcagatgacggagacggctggcttccgcggcagatgaccgataccagctacattgcccgcaccgcgatggagtatctcggacacgttgcgccagacgtcgttgcaacgcgcggccagcttaccggttacctgcgggctcattgggactttccgaaggaacgcctcgaccaccggcatcacttcgtggatgcggccatcatcgcggtaacggaccgctccatcatcaaccagcttagccgttatcaagcccgccgcggcggcttgccgcctcccagcgaggcagagatcgagatcccctatccgggcttcacggaagaggtggagcgctgctacgagagcatttggccatcgcgtcgaccggaccattcactgtccggaccatctgggcaactgcaccgcgaaaccccgcttgcgcaggtgcggcaggacgatggaaccatccgcctggccacccggattccggtgcgagatcttctaacctcgaacggtgccccccttgccgatgacaagcttctcgctgccctggacaggttccgcagtcagcgcttccgcagaagatttgaggcggaaatcgagaagctgcgtgccgccgagccaggcttgggcctcggcagagctgccctgaaggtcgcagaagatccgcagtggggcccgtccggcattcgggcgatctcctgctggttcaacgagaagcgctatgagccacaggcgatttacaccgtcccccgcagccagggatcaccggccgcgcaccgcgcagccatagatcccaatgccaatgcctgggccgagatccgccaggaccacaggggccgctggaaggtcagggtcgtgccaaaaattgaggcggcgcgcatcgctccacccgatccggcttcggattccgaccttgtcatgctgctgcggagcggcgacctcgttgcctgggaaacaccgggtggacgagaagtgggttacttaaaagtgatgaagagcaatggcgggctattcttctggccattgcgcctcgcagcaaacatgaaagcagctcctctttcgctgaatgtaccaatcaagcaacgggacggcatctacttctcgggagaagggcttcgaaaaagttgcgcccgcccggtcaccgtctccgttctggggcgtttgcgcgatcccggccccggctgggcggaggccttccaatgagcgtcgttgaggtccgctccaccggggcgagcgtcgccctgaacggccatcgccttgcggtgcgggtgcccgagcggcctccagcctatttccatgccgacgatctcgatctcttgatcgcagaggttcccgccgtccacttcacgggtgccgctctcggcaagcttgcagagagcgggattacggtcctgctttgcgatggacgccatcttccggtcggcttcgtcgtacctgcggcaaccggcggcgtcttcgacccccgacgggccagaaggcaggcttccttgcccgaacgcacccgcgaccgtctctggaagagcatcatccagtgcaagattctgcgccaggcggaacatctaaaaagggctggcctcgcctttgaccggctgcttcagctcgcccgcgaggttcaacccggcgatccggagaatcgggaggctactgccgcaagaatctattggcaaaggctctatggccgggacttcagaaggcgcggcgacgatccgcgcgtgagcgcattgaactggggatacgccgtgctgcgggccatggtttcacgctccctcgtagcttcggggcttcatcccgcgattggcttgaagcacatggcgccgaacaaccccttcaacctcgccgatgacctgatggaacccttccgccctctggtcgacgccgcggtaaggacgatagaaccggaagctggcgacccctcgctttggaaaagcgccctctcggaaattggcgaaagacccgttcttctaccagaaggggtctttcgtctccgctcggctatcacgaggatggcatcctcctttgcaccggtgatcgacgcgggcaaaggcaagatactacttccacaggctttccccggagaagaggatgccggacggctggagagcgatgtggttgatggtcctctatgacctgccggttgtggagaaggaggagcgtcggcaggccacgcggttccacaagttcctgctcgatcagggcttcacgatgctgcactactccgtttacctccgctattgcggcagcctggaaaaggcgctggcacaagaaaggcgcatcgagaaggccctgccatcgcgcggaagcattcacgtcatgcggatgacggatcggcagcttcagaccatgcgacactggtaccgtggccgctatgcaggcgcctcggcgtcaacacccgcccaataccagcttctttgagtgagtgacgatgtcagaaaaaagccctgccggcccttatttttcaggcacttggcagggcttctagcctatcacggtcggctctgtccgggccacaaaggctcatgatcgccgcctaaaaaagcggcccggcgcagggccgggccgagggggcgggagctttcgcccgtggaggaagggtcagaagacgcgggcgccctggccgaactcgggataggcctccaggcccagttccgcccggtcgaggcccagttcctccgcctcttcggacacccgcaggccgatcgtgattttgagcaggaaccagaggagcgaggagactgtgcccacgaagaggcccaccgcgaggatgccggtgagctgcaccagcaggtcaccctcgccgaagagggcgactgccagggtgccccagatgccggcgaagaggtggaccggcacggcgcccaccacgtcgtcgaccttcagccggtcgagcagcggcacgctgaccaccacgatgagcccgccgaccgcgccgatgaccactgcgagcagggggctggcgatgtccggcccggcggtgatggagaccagcccggcgagcgctccgttgagggtcatgctgagatccaccttgccgtagcacaggccggtgaggaccatggccgtcaccacccccgcagccgccgccaggttggtgttcgcgaagacctgggagatttcgaccagcaccgcggcgctgtccagggagagcgcggaggcgccattgaagccgaaccagcccatccagaggatgaaggtgccgagggtggcgaggggcaggttggcccccgggatcgggttgaccttgccgtcggggccatacttgccccggcgcgcgccgatgatgatcgcgccggtcagcgccgcccagccgccgacggaatgcacgatcgtggagccggcatagtccgaaaagcccatcgcatcgagccagcctccgccccagctccaggccccctgaatgggatagatcaccccggtcaagaggacgacgaagatgaggaagggcttgaggcgcaccctttcggcgacggtgccggagacgatggaggccgcggtcgcgacgaagaccatctggaagaaccagtcggaaaggcgcgtgtagccggtggccagcacgctttccagggcgtcctcgtcacctgcccgcagcgcaagttccgcttcgctcgcgccatggaagaaggtgagcgtgccgatccagccggaaacgtcgaggtacatgaggttgtagccgaccaggaagtacatgaggccggccactgcgtagatggccatgttcttgaggcagatggccgaggtgttcttgctgcggaccaggccggcctcgagcatcgagaaacccgccgccatccacatcacgagaaccccagcgaagagaaagaggaaagagttgaggatgaaggcggtttcggccgagaggccggaagcggcgggcgctggcccggcctcctgtgccaaggcagccgccgcgggggcgaacagaagcagcaggctgactgcccccaatgcaagagtgcgaagcatcgttctttcctttcaaggagaggtcagattgcctgggcgtccacttcgcccgtgcggatgcgcagcgccttcgccacctcgaggacgaagatcttgccgtcaccgatgcggccgctgccggccgcgtggcggatcgcttccaccgcaggctcgacaacctcgtcctgaaccgcgagctcgatcttcaccttgggcaggtaggtcaccgcatactcggcaccccggtagatctcgctctgtccgcgctggcgcccgtagcccttgacctcgctgaccgtcattccttcgatcccgctggcggcgagtgcctcccgcacctcctccagcttgaagggcttgatgatcgccatgatcaacttcatcagccgtctccctcttgccgatggcgggggcacctcgccctccgcccgcccgcagctcttccacgggccttcgcataaggagattcaagttccgtgccaaagggcgggccgccgccgccggagctaagggaaaagggtagccggaagctcctgcccaaagcttgagcagccagccttctctgcctgcagaatgggcagcggaagcaggcgtgggagctgctggacaagccgcctgctcaaggcgatgctgtcgcccatggtcactcccagcaatgcaggctccaagagcaggagctacgacgtcatcctctcgggcggaggcctggtcggcctcagcctggcaattgccctggcggatgccggcttggaggtcgcggtcgtcgaccggctggaccccgcgaccgtcgtcgacgaaccctttgacggcagggcctcggccatcgcccgcggttcccagcatgtcctggcggcgacgggcgtctggcagcacgtagggagcgaggccgcccccatcctcgacatccgggtcagcgacgggaaggtcggacgcccgccttcccgcctcttcgtccacttcgacgccgacgagttcggcgagggccccatgggctggatcgtcgagaaccggatcatgcggcgggcgctgcatgcgcgggcgagggagttgccgaatctgacgctcttcgcgcccgcgagtctggagagggccgaacgccgagaagaagccgcctttgcccttctgtccaatgggcaaagtctcaaggcaccgctgctgatcgcggccgagggtcgcaactcgccgctgcgccagagcgccgggattgccgtcacccgctgggactatccccaatcgggaatcgtctgcacgctctatcacgagtacgaccacgccggcaccgcccacgagcacttcctgcccgcgggccccttcgccgtgctgccgctcaccgacgacgaaagggggcgccaccgctcctccatcgtctggaccgagaagcgggagatggtcgaaaccttcatggcgctggacgacgtcgccttcgcggccgaggtgcagcgccgcttcggcgacgggctgggcaagatcacggtcgaaggctatcgctggagctatcccctctccctgatgcatgccgagcgctactacgcgcggcggctggccctggtgggcgataccgcccacggggtccatcccatcgccggccagggcttcaacctggggctgcgcgacgtggccgccctggccgagtgcatcgtcgaggcacgccgcctcggcctcgacatcggcagcgagccggtactggcgcgctatcagcgctggcgacgcttcgacaacgtcctcatgctgaccgcgacagacagcctcaatcgcctcttctccaacgacctgccgccgataaggctggcccgaaacctggggatggaggcggtgaaccgcatcggccccgcccggcgcttcttcatgcgccacgccatgggcctggtcggcgacctgccgcgcctggtgcggggggagcggctgtaggcagtgcgcggatagcgcttttggacggccgctgcgacgaagtcctgtcgaaggccgggggctcccgcaagcgggccggcagcccctttgccagtagtgcgagtccctttgccgccgggtctgccgctctgccgcggctacaagagaaaccgggtcgccaggcccaggaagacaaagaagccgagcacgtcggtcgttgtcgtcaggaaggggcctgccgccacggccgggtcgaaccccagacgatcgagtgaaatcgggatgagcgtccccgccagcccggcccaggccatgttgaagatcatcgccgccgccagcaccagggccagatccagcctgccgaaccagagcccggcgatggagcccatgatggcggcgaagacgaggccattggccaggccgaccagcatctccttgccgacgaccttcatggtattgcgcggcgtaagggccctggtcgccagagcgcgcaccgtcaccgtcacgacctgcatgcccgcattaccgcccatggcggcgacgatgggcatcaggatggccagcgccacgatttcctcgatcgtgccggcgaagcgggagatgacgaaggaggcgatgatcgtattgaagagggtgacgatcagccagcggatgcgccgcacggcggtggcgaaggcaccttcgctgatgtcggcatcggcgacgccccccagcttcaagaggtcttcctcggtctcctcctcgaccacgtccagaacgtcgtcgatggtgatcacgccgaccagccgccccgcgtcatccaccacgggtgcggagaggagcgagtagcgcttgaaaagccaggcaacctcctcctgatccgtggtgacggggatcgtccggaactcctcatccatcagggtgagaatgcggaccggccgggtgtggcgcatcacgcgagagagcggcagcttgccgatcggacgatagcgtggatcgacgacatagagatcatagaagtcgtagggcatctccttgcggtgagagcgcatgtagtcgatggtctcgccgacggtccagatggaggggaccaccaccatctcgcgctgcatcaaccggccggcggactcctccggataggtcagcccctcctgcagcaggcgccggatcgtgatcggcatccgcgccaagatctgggtccgcagctcctcgtccagatcctcgaagaaggccagcgcgtcgtcgctttccagcagctggaggatattggcgaccacctgggggcccagcaccgcggcgacctcgtcgcgcagaccttcatccaggtagctgagcgtctcgggctccaggctcttgccgatcagctccagaagctgccgccgctcccccggctcgagtgcttccagcaagtccgccgcatcggccgggtggaggttctccacgaccgcgttgatgcgctcgacgtcgcgctcggccagggcctcctcgatttcccgaaagaaggcctcgcccagagctggcagctcggcctcttcctgccgccgcgcctcggcaggcgtcattcggaggccgctcctgccttatcggtcagagggacgggggcgcggctctgcgcgtccaccgccgcgatggcacagagattgatcactccccgcgccgtgatggaaggcgtggcgatatgggccggacaggccgttcccagcaagagcggccccacggaaaggccctcggccatgaccttcagcaggttgaaggagatgttggcggcatcgagtgtcggcatgatcagcagattggccgcccccttgagtttggaattgggaaagatgcggttacggatctcttcggaaagcgccgcgtctgcatgcatctctccctccacttccaggtcgggatagttttcatgcagcaggcggaccgcctcgcgcatcttcagcgcggccgggtgcctgtggctaccgaagttcgagtgggagagcaaggcgatcttcggcgaaatgccgaagcgctgcaccgccgccgccgcatggacggtcatctcgaccacctcttcgacagaaggatcgtggttcacgtaggtatcggcgataaagaaggtgcccttggaggtgatcagcaggctcagtgccgaatagcctctcaccccctccgccttgccgatgatgtcgtcgatatggcgcaggtgatcgagataacgcccctccacgccgcagatcagggcatcggcatccccgcgccgcactgccagggcgccaatgaccgtcgagtcggtgcggatgaccgtgcgcgcctggtcgggcgacacgcccttgcgctccatgaggctgtggtagagccgccaatagtcgccatagcgcgggtcggagagcggattgacgacctcgaagtcctcttccatgcgcaggcgcaggcccaggcgcttgatcctgtcggagatcacctcgggccggccgcagacgattggcgtcgccagaccttcgtccaccaccacctgcaccgcgcgcaatacccgctcggcctcgccttccgcgaaaaagacacgcttgcggtcgttcttcgcctgctcgaagaccggcttcatcaccaggcccgagcggaagacgaactcgtggaggcgctggcggtaggccgcgagatcctcgatgggacgcgtggccaccccgctcttcatggccgcctcggcgacggcgggcgcaatctccaggatcaagcgcggatcgaagggccgcgggatgagatactcgcggccgaagggggcgctctctcccccataggcctggatcacgacttccgacacctcggtgcgcgccagccgcgccagcgcccgcacggccgcgatcttcatttcctcgttgatttcggtcgcgcccacatcgagcgctccgcggaagatgaagggaaaacagaggacgttgttcacctggttgggatagtcggaacgccccgttgcgatgattgcatccggacgcgcctcccgggccacctccggcatgatctccggctccggattggccagcgccaggatcacgggatcacgggccatgcgcttgaccatctcgggcttcagcacgttgggcgcggagacccctaggaagacgtcggcatcatcgatgacctcctccaaggagcgggcgctcgtcggctgcgcatagcgtgccttccaggggtccatcaggacctcgcggccttcgtagatcagcccctcgatatcggcgacatagatgttctcgcgcctcgcgccctgctctaccagcaggtccaggcaggcaatggccgccgcgccggcgccggagcagacgaccttcacctcggaaatctttttctcaacgagatagagcgcgttgtagatggcggcattgacgatgatcgcagtgccgtgctgatcgtcgtgaaacaccgggatcttcatgcgccgccgcagctcccgctcaatgacgaagcattccggcgccttgatgtcctccagattgatgccgccgaaggtcggctccagagcagcgatgatgtcgatcaacttctcggggtcctgctccgcgagctcgatgtcgaaaacgtcgattccggcaaacttcttgaagaggaccgcctttccctccatcaccggtttcgaggccaaggggccgatggcgccaaggcccagaaccgcggtgccattggtgaccaccgccacgagattggcacgcgccgtcagctccgacgcctgggagggatcctccgcgatcgcccgacaggcagccgcaacgcccggagtataagcaagcgcaaggtcgcgctggttccccagcggcttggtcgccaggacctccaccttgcctggtcgaggctggcggtgataggtgatagcggccgcaccgatagtttcatcgaccatggtatcctccccgggaaacgtgctgaggctgcccttcctctggccacgagatgcgtcaccagagggtctgaagaaaactagcggaaccgcttgactacacaagggcaccgcagcccgctgaacaagaggtcgtcgtggcggaatctctcgaccttccggagctttcaagggtagctcaaatggcgccagagtggcgaatcgaagaccggctgatcgactatcccgaggcgcttgccaccatggaagagcgcgcggccgccattcgcgcgggccaggcgccggaactcgtctggctgctggagcacccgccactctataccgctggaaccagcgcgcgcccggccgatctgctcgatgcccgctttcccgtcttcgccgccgggcgcggcgggcagtacacctaccacggaccgggacagcgggtggtctatctgcagctggatctcaaggcgcgcaagccggatctgcgtctttacgtgcgctgtcttgaagactgggtcatccgcgccctcgcccgtttccaggtgaggggagagcggcgcgaggggcgggtgggcatctgggtcgttcgcgagggcgggcgcgaagacaagatcgctgccatcggggtcagggtgcggcgctgggtcacgctacatggcatctcgatcaacctggagccggatctttcgcacttcgccggcatcgtgccctgcggcatccgcgagcatggcgtcacctctctggtcgatctcggcctgccggtgacgctcgccgacctcgatgtcgcacttcgcgagaccttcgaggaggtatttggtcccggcggccccatgggccctgcctaagcccgatcacatctgatccagagggctcgagggttcaaaactcatccagtgaaggctcttgctccgcctcctttagaagatcggcggccaggagcggcacgtccagcttcgtcacctgcggctgcagaaagcagcgcagcagccactcctgacactcctccgccatctgcccaagggcttcgctgggcgaacaccagaaggggcggtgaccttcttcctgcggcggccccagggcgctgcccaggccgacgaggaagtatgtacagcgcttgtcgtagtacttgtcatactccggctggttcagaaattgccgcagactgacgagtggtcggctgcaccggatcgcgtagcccgtctcttcgaggaactcgcgcttcagggcctccgcaggcgtctctcccgcctccaggccgccacccgggatctccaggccgtcgcgggtttccaccagcaacagctgccttgaagcagcgcgccatgccaggccgtaggagccaggccgcaagcgatagcgcttcccttcaagcttcttgccgaaggctctcatgcggtggggagctgccggaagcccggttccaggcgccctgtccagggctcgaccacgacctcggcgacaacagcatggggcgggccctcacgacaggcggcaagcatctcctccaccgcctcctcggatccgaagaagacggcttccacggta

SEQ ID NO: 3204 - DNA, 23243 bp, synthetic construct
  misc_feature 1..23243: note = Synthetic
  source 1..23243: mol_type = other DNA
gccccgggccgcaggtccagcggccgcggcggccgccccggccccgccggccgcgccggcagacggctcccggaccatcctgctggtcgaagacgaacctgccatcctcgccatgaccgcccaaatgctcatcagactcggttatgtcgtccgcgccgcccagacccccgccgaagccattcggctggccaaggagcattccgaccccatccacctgctcctgaccgacatcgtcatgcccggcctcaacggccgcgatctggcccggacgctccgcgagctgcagccagggctccgctgcctcttcatgtctggattcaccgccgacgtcatcagccgccaaggcatcctggatgaggaaatccatttcctccataagccgttcacccgccgcgaactggccgccaagctgcaccaagtcttcgatgcctgaacagccaccaccttctatgccgattccccgggcccacaggaggccatgcccgccttcctctgattccgcccggcggcagcccccaggagccttcgtatgaaaccgaaccgtgtgccgtccgcggaagaatccacacccggcgcccccaccggccagccggccgcagcagccttgcgggaaagccaggatatgttggccatgtttctgcgccattcccccatttacacgttcatcaaggaagtctcgcccacggagagccggactctggtggccagtgaaaactaccgcgacatgatcggcattcccggctcacagatgatcggcaaaaccatggcggagctctttccgccggaattcgccgcgaagatcaccgccgacgactgggctgtcgtgcagcagggcaaattcctgaaattggacgaagagctcaacggccgtcactacgaaacgatcaagtttccaattgtccgccacgaccggaccttgctggccggctacaccatcgatgtcaccgaccgctggcagaccgaagcggcgctgcgggaaagccgggaaacgctcatgctgttcctgcgccattcgcccatccatgcctatctcaaagaggtctcgcccaccgaaagccgcttcctggtggccagcgatgatttccacgaaatgctcggccggccggtctcggaaatggccggaaaaaccaccaccgaagtgttcccgccggaagacgccgccaagatcattgccgacgactgggacgtcgtccagcggggcaccatcctgaaacgggaagaagaactgagcggccgccactacgagaccgtcaagttcccgatcacccgcaacggccagactctgctggggggctattcgatcgacgtcacggaacgcaaacaggccgaggcccggctggcggaaaacggccggctcctgcgtatcgccggccgcaccgccaccatcggcggctggagcgtcgatttgagcgaagaccgcatggtctggtccgacgaggtggccgccatccacgaccgcccccccggttattcgccatccgttgcggagggcatttcctattatgcccctgaatggcgagcgcggatcgcgcaggtattccatgcctgcgccgttcagggcgtaccctacgacgaaaccatggaaatcatctccgctcagggacaccgccgctgggttcgcacccacggcgagcccgtccgggacccctccggcaagatcgtcaaggtggaaggggcgatccaggatatcacccgccacaagaccgccgacgccgaacgcgaacgcctgcaggcccaactggcccagttgcagaaaatcgaatccgtcggccggctcgctggcggcgtggctcacgacttcaacaacatgctgcaagtcattctggggcatgcggatttcgccctggaacgcctggcggccggcgaatccgtggaggatgatttgcaggaaatccgacgcgccgccactcgttccgccgacctcacccgccagctcctcgcatatgcccgcaagcaaaccatcgccccccgcatcctcaatctcaacgagacgatcgcgggcatgctgcaaatgctccggcgcctcatcggcgaacatatccgcctgatttggcagccgcatgtggatctggctcccatccgcatggatccctcccaactcgaccagatcctggccaacctgtgcgtcaacgcgcgcgacgccattaccggcgccggcacggttacgatccgtacccggcacgccgttatcggaccggcggaaatcgcccgccatcccgagcaacatcccggcgattacatctgcctgtccgtcacggatgacggcgcgggcatggagcctgaagtcgtcgcccagctctttgagccctttttcaccaccaaaaacgtcggccgcggcatcggcctcggcctcgccaccatctatggcatcgttcggcaaaatggcggattcatcgacgtgaacagccagcccggtcaaggcagttgcttccggattttcctgccaaagcacaaaatcgcggacctcgcgcccccgatgctgccccagccggccaccccccccggccaggaaaccatcctgctggtggaagacgacccgggtatcctgaccatctgcaagtccatgatagaatgcctgggatatcgtgtcctcgcagccgccaggccgaatgaagccatccagcgggccgagtccacccccggtgatatccagttgttaataaccgacgttgtcctgccggaaatgaacggccgggctctcgcccaaatccttttggcccggcagccccatctgaagatcctcttcatgtccggctacaccgcggatgtgattgcccatcacggcgttctggaagacggcatccgcctcttatgtaagccattcaccctgaacaagctcggaaatacaatccgcgaagtgctcgattcatgactcccggagccccctcccttgcgaaataggggtcaaaataggggtcaggcctataattgaatgttttgggggccgcaagtccgccaaggcaacgccctggccgaccgcagccattcgctacattcgaagttgctggcccgtcagcgccgctcttttttcgtgtattccgtatgcagcagtccgtggaccttgtggctgttggggcggccgagaaattctttatacagatcctggatcgccggattgtcgtgcgacttgcgcagcttcttggactcatcctcggcatagatggccgagatgcgtttcaggcgcacggcgtcgtcagtcaagcgcggctggccgccgccaccgatgcagccgccgggacacgtcatcacttccacgaaatgatagtgaacctcgcccgtgcggatcttttccagcaggcgccgcgtgttgcccaagccgtgcgaaacagccaccttcagctccaccccttcgaggaacgaccacgagggctgcgtccgctcaatcttgaccgacgcttccttgatgccttcgaggccttcgattggcttcacgtgcaggttttccgccggcagttcgcggccggtcacaatttcataggccgtgcgcaatgccgcttccatcaccccgccggtgttcgcaaagatgtccgccgcgccggtggacagccccagcggggcgtccatctcgccgtccggcagctctgcgaacgcgaggttggcctgccggatcatccgcgccagctcgcgcgtggtcaggacgtagtccacgtcgcgcacgccgctggagttcatctcgggacgttgggcctcgaacttcttcgccgtgcagggcatcacggacaccaccacgaggtcttccggcttcaccccgatcttctgcgcatagaaggtcttcgccaccgcgccgaacatctgctgcggcgacttgcacgtcgagaggtggtcgaggaagttcgggtagtagtattccgcatattggatccagcccggcgagcaacttgtgaacatcggcaaggccgccgtcttgtctttgtccaccagcgcccgtttcaggcgcgtcagcaactcggtgccttcctccatgatggtcaaatcggccgcaaaattcgtgtcaaataccgcgttgaagcccatctgacgcagggccgacaccatcttgcccgtcacgcgcgtgcccggcggatatccgaattcctcgcccagcgccgcccggatggccggcgcggtctgcacgatcacggttttggccggatcgtccagcgtcgcccacacgtcgtcgatggcgctgcgctcggtgatggcccccacggggcacaccgcggcgcactggccgcattgcacgcaggtcacgccatcaaggttgcccgcgaacgcgggcccgatcaccgtggaaaagccgcggccctgcgggaacagcgcgccgatgccctgcacctggttgcaaaccgtcacgcagcggcggcacttgatgcacttggcattatcgcgcaccagccccggcgtgctggcgtcgcgcttgggcgccgcgcgcgcgccgccgaaggtcaccgtgcggatgcccatgtcgctggccagcttccgcagctcgcagtcctcgttgcgctcacagatctgacagtcgccgtcgtgttcggagagcagcagttcgaccacctgcttgcgcgcggcgcgggccttggggctgttgacatgcaccacctgcccttccgtgcagggcgtggagcacgccgccacgagcgtccgcgccccttcgacctccaccaggcatacccggcacgcaccgagcggctcgcgcttctccagaaagcacagcgtcgggatctggatgcccgccgatttcgccgcctgcaggatggtggacccttcggcgatttcaatcgccttgccgttgatcgtgacgtggatcatgtcgccgctcccctcaccttgccggtcttgccgtagtcgcaccgcaggcaccgccgcgcctgccgccgagccgtggcctcgttccacggctgctccacttcgtcgaagttgtttttccgccggtccagcgcgatgaggttgaggtcctcgcgcgggtacggcaccggatcggcgtcggggtcgtagtccgtcggcacgtccggatagccgcgccagaaggcgtggtccgcgcccgtcagcatccggtcgatgcccaccgccgcgcgctcgcccgcggcgatggcctcgaccaccgacgacggccccgtcaccgcatcgccgcccgcgaagagccatggcaccgcggtctggcccgtgacggggtcggcctggatccagccgccggccacggccgcgccggtcttgccgagcacggccttcgcgtccagccgctggccaatcgccagaatggcatggtcgcagggaattgtttccagggcatcatcagcttccgccaacgccttgcgccgcccgctgcgatcaaagtcgccgagcgtcatccgccggcaaaccaagccggcgatctggccgttttcgacctcgaaccgttccggcgcacacagggtgcgcagcttcacgccttcctgctgcgcctcttcgatctcctccgcgtaggccggcatctgctcgcgcgtgcggcggtagaccaccgtcacccgctccgcgcccagccgcagcgccgtccgcgccgcgtcaatcgccgcgttgccgccgccgatcaccacaacgtccttgccgaccggcgccgacccgcggatgttgtactgccgcagaaagtccatcgaatccacgacgcctttggcatcgctgccggacatttccagcccgagcccgtcgggcgcgcccacggccaaaaaaaccgcctcggcgccgtcgtcgcgcagtttctgcagcgagaaatcctttcccaaccgctggagagtcttgatctcgacgcccagcgattcgatcatgcggatttcgcgcgcgagggtttcgcgcggcagccggtaggccgggatcgcctgcaccagcatcccgccgggccgcggctcggcttcgtacaccgtcggcttgtagcccagccgcgccaggaaatacgcgcaggtcaggcccgcggggcccgcgccgacgatcgccaccttccgcgccgcattggccgcgttctcgcgcgcctccggcttcacgatcgtcacttcctggtccaccatgaagcgcttgatgccgcggatggccacggcctcgccgtccagccccgtccgccggcaatggtcttcgcaggtgtggaagcacacccgcgcgcagatggccgcgaacggattgcgctcgcggtgcagcttgagggcctcggcgtagcggccttccgccgttagcgcaacgaagcccggcacctgcacgccggccgggcacgcgctcaggcacggcgccagcaccagcgccgggcacacgcccgccgcgcaatgcttgtcgcggatgtgctgcacgtattcctcgcggaaatgccggatcgtcgacaacaccggattcggcgctgtctgccccagcccgcacagcgacgcttccttgatgaatgcccccagcttttcgaggcgctcgatgtccgccagttcgccctcgccgtcgcagatgcgttgcaagatctcgcccatgcgcttcgtgcccacgcggcacggcacgcacttgccgcaggattcctcctgcacgaattcgatgaagaaccgggccacgtccaccatgcacgtgtcctcgtccatcacgatcaggccgccggagcccatgatggcgcccagctcctgcaaactctcgtagtccagcggcacgttgaggttctgcttcgggatgcagccgcccgagggcccgccgatctgcgcggccttgtaggccttgccgccgcggacccccccgccgatgtcgtagatcagttcgcccaacgacgtgcccacgggcacttccaccaggcccgtgttgttcacgcagccggccaaggcgaacaccttcgtgcccttgctcttcggcgtgccccgttgcgcgtaccacgccgcgccgttcagcaaaatcgccggcacgttggcgtaggtctccacgttgttgagcaccgttggcttgccccacagccccttttgcgccggaaacggcggccgcggccgcggctcgccccgctggccttcgatggacgcgatcaacgccgtttcctcgccgcacacgaaggcgccggaccccatgcggatgtccagatcgaacgaaaacgccgtgcccaagatcttcttgcccaaaaacccgcaggcgtgggcctgcgcaatggccttcttcagccgcgccacggccagcggatattccgcccgcacgtagacgtagccctgcgccgccccgatcgtgtaggccgcgatcgccatgccctcgatcacgctgtgcggatcgccttccagcacgctgcggtccatgtacgcacccggatcgccttcgtccgcgttgcacagcacgtatttcaggtcgcccggcgcgcgccgggtgaattcccacttcatgaacgtcgggaagcccgccccgccgcggccgcgcaggccggagaccttcatttcctcgacgacctgctccggcgacagctcacccagcaccttcgccagcgccgcgtagccgtcgcgcgcgatgtattcttcgattcgctccggatcgatcttcccgcaattgcgcagcacgatctgagtctgcttcgtaaagaacggaatgtcctggtcctgcgcctgcggcttgccgctggcctcgtcgtgagcgatcagccggtccaccgtgcgccccccgaccagatgctcgcggacgatttccgcgacgtcttcgggcttcacgccctgataaaacgtgccggcgccgaggcgcagcacgggtccgcgcacgcacggccccatgcaacccgccgcgcgcaccggcaccgtttccgccagccccgccgccgccagttctttcttgaacgcggccgcgatttccggcgcgcccgaggccaggcaactcccgcccatgcaaatccgcacttcctgcgcggccttttccgacttccgcaactggtcccgccacgccgccagcgctgcgcccgtttcgatcttcttgagatgcttcgtcacggccgggcctcctgcgcgggcgccgccggcgcgcggtatttttcaagcaattcgccgatcttcgccggcttcacgcgctggtgcaggtcgtcgttgaccatcagtaccggagccatgccgcacgccccgaagcagcggcccacctccagcgagaacagccggtccggcgtcgtgccgcccacgtcgatccccagcttttccttcatcgcccgcagcacctcgttgccgccgcgcacgtagcacgccgtgcccaggcacacccgcaccaggtatttcccgcgcggcaccgtcgagaaaaacgaatagaacgagaccacccccgccacctcgctgtacgacttgtcgaaggcttgcgccacgcgccgcatcgccgcttccggcaaatagccaaagatggcctgtgccgtctgcagcgcgggaatcagcccgcccggcttgtctttttgttcggccaggacctcctccagccgccccatcagctctttttcgtccggcccggcttccgcgcaggcgcacgtacaggttgtcgtcatcgttccgttctccaattgtcccccagcccccgtaccgcgaattccgcttagaacgtccccgtgatgtatttttccaggctgttaatcgtcgcctgctgggcgtcgagcaggtacttgacgacatcgccgatggatacgaggcccacgagcttgccgttttcgagcacgggcaggtggcggtgcctccggcccgtgatcaacgccatgcactcctccaccgtctgcgtcggcgtcaccgtgcgcatctgccggagcggagtcatcgcctccttcaccgggtgggttttcggggaaatcccctccgcaatgattttccacaagacatcgcgttcggacaggatgcccgaaagcttgccggctttggtcaccaccgccaggcagccaatgtgcttggcgctcatgcggcggatggcctcaatcagcggctccgccgccgtgatggtctccaccttgttccccttgatccgcagcagatcgctgactgtcgtgctcatgctcgttcttcctccgggttatggtgccgctgaatgcgctaatcgggacggcactttagcccccgccccgcgttttcgtcaacggcgtttccagcgccaggaaatgccgccaccgatccggcaggccgaacattccccacaccacacgccgcatcccgcgccgacgaaacatcaattcataggactgaccccttatgctgtaaccccaaatctgaaaagggattatgggttttgctgctttagttatacattttcccgttggctttgacccagccatccggatgccggccgatcggatcgtggtgggtccaatgcaccaccccgcccaagtcgttccattcgaattcgcccgagaattccacgccatcgccgacccgcagcggctccacgcgccggccgacgtccacattgtgcgccaccagcaccgcttccccacccgccagccgcaccaggaaccgttggtgacggctgccttcgttgtcgtccgccagcaatttcaccacctgcccgccacccgtcacgcagacgtcgcttcgccgtttcgcaatcgcttcctccagcgccccgcctgtgcccgcgcatcgcggccgccgtcccggccgcccactccgccgcaacgcccgcgtcagttccgccaacacggcattcaacaatatcaaaatccacttcttcatcgcccctctgtccatacggcctatccaaacgccgaccgacaataggcgcccggcccctccattcaagcgtattttcaggcagttccatcagaaaacgccggtgcaccagccgaaaaagcacaagttcacccaaacgcgtttaaatggaacagccccccctccagattactgaattacgggatcggccctttgtactaataaagaaaagacgaactcgtgagttcgtctttataaaaggctttctatcctgacgtacaaagtagaggtccgaactgccttaattaactttgtcttgattccaattaagacgatgcgcataattcaccacgtcatttcgggtgtcaagctgaaaacataataagcggaagctttttctcatgaaacagggccaaatcgctttttccttcgatataggacacagctccattggatgggctgcctttcaggtttcggacgccccaggcacattccattctttgctcggcacaggcgtggttctctttcccaaggatgcctgcctagcttccgcccggcgcggcttccgccgctctcgccgaaacatcgccgcccggcgctcgcggattgaccgcctgaaaaactacctggccgggctcggcgtcttgtcccgggaccagctcgatgccaactccaacagttatccttggctgctggccgcccgaattctggcttccgatggaaaaaagacgctgacgtgggaggaattgtggtcggtcctccgctggtatgcccacaaccgcggctatgacggaaatgccttgtgggcgggcgatgacgcagatgcaggcgataaagaggacaccgataaggtgaaaaactccatcgctctcatggaaaaacacaaaaccgccaccatggccgaaaccgtctgcaaggcactcggtctggacccgatgggcgaagtcaaggcctcccgcatctatttcaagggaaacaatgccgccttcccgcgcggagtcgtcaccgaagaagtccgccgcattctcgccgcccatgccggcaaactgcccaaggtggatgatgccctcagcgatattctgttaagaaatgccgccacctccggccttgagctgccagcccggtttaaaggcggcctgctgttcggccaatacgtaccgcgttttgacaaccgcatcattcccgcctgccgcatcacaggaaagaacaccccgctgaaaagatgccccgagtatctgctctaccgctggggccgcctgctgaacaacctgaccgttttcggcgcggacggacagatccgcaccctgctgcccgccgagcgccaagctcttcactcccgaatggaggccgacggatttttcaccaaacgcaccctgaatgccgcactgaaagacgtcactggttgtacgccggccaataccgaaagcttctttctgacagaagaaatggaagaggctcttgtcctggaccctgtcaaaaaactcctggcaaccaaccagatcatgaaggatctctggcctcaactgtccgccgaaagccgcgaaaaggcccaatcatcactgtctgccggaaagaagatccggcttggcgatattctcgccgaaatggaaacggccggacaggacacgaccgccgccagcgacgccctggcctcccaccagaaaaaagcaaagaaaaaaaacgccgatctcgccacccgccgcctctcggctgattatcccaaaggacgtgccgcctactgccgtgaaatccttgccaagaccttcgacgaaagcatctcgggcaaagactccacgaaggaagggggctgcctctacgaaaccgaggaaatccgcaaccggcttttacgggaaccgcttgttcagcagaccaataaccacttggtccggcatcggctcctggttttcgaacgcctcttggctcacatggtggaggagtttgccggcggcgacgaaaaacgcattgccgcaaccgtcgtcgaagtcgttcgcgaactgcaggaattctccgggctgaactcgaaagaaatcacgcataaattgaatgaaaaactgggcaatttccggtccgttgtcaaaaacctggaagaagcgattgccaactcggaggaaagggtcgccattaccggcagcctgatccgcaaagcccgcatcctggaggaccagggctttgtctgcccttatacgggtacgcatctgagctacaaccatctgctggctgaccgcttggaaatcgagcacatcattccccgctccctgcgtccctccgacgccctgtcttcctgcgtcatgaccttccggtcggtcaatgacatgaagggccagcgcaccgccatgcaattcatctgcgaagagcaggggcgcgaggttcccggccacgaaaacatccaaatcactacaaaaaaggcatacgtggattatgtcgccaagcacaagaaacaatacccccaaaaatcggacgatcgccggcgctgcgaacggcgagctgaactgatgctaatggagcgctatgaccagcgaaacgccgacttcaccgagcgcgacctgacccaaacctcccacctgaacaaaatggccatccgcctcgtcaaacagcgcatcggcatcgacgccaaacaccttcccggcaacgtcaccgctttcatccgccaaaaactccatattgacgaatgcctcttcaatgctgttccacggctgcaaacagccgccaagggccaacctaagtcgtcaaaacgaaagaagaaagcggaggaagcccccgtcgagcccatccaagacgacatgccgccccgcaagctcaccaaggccgacatccgcgagctgacctacctgcatcacgccatggatgccgtcacccaagggctcgccctgctgctcttcgcccccgaagactggcctctgctggtcaaacgcaacctccccgatagtgaacaacgccaccttaaagcgcgttatcctttcctggacttcagcgctgataagcacatcagcatccaagacttgcccgaggacaccctccacacgatctctgagcgcctggccgaatgccgggtcgtccgccacattcccgccaaaatgcacgggatcatcgtggaccagaccacatggggaaccgtcgccgcaggcgccatcacaacgctccgtcagaaaacaacggagaaaaacgcccgttgcgatgaaaacggcaagcgtttcatcaagaccaccgaaaagaaacgctcccttcttctcggcggccccgacgccccggacgggaagctcgccaaaattaaaggcgcaatcctggtaacggaaaactggggctgcgccctcgacccctctcccaccgtcatccctcatttcaaggtttatccccagttgcgcgccctgcgcgagaaaaacggcggccgccccatccgtatcttgcgcaaaggttccctgattcaggtcaaggctggaacatatcaaggcatatggtccgtggcctccatcaaggataatgccgatggcatttgcttggatatcaatgctgcggacaaggtaaaattggagaatagaagcgatgattcaaaaatcaatgtgcgactggactccttgagaaaatccggtctgaagattctgaaaccgaagctgactggggcatgtcctaccacgtcgtcaccatagagagcactaaagccgaacttaattgtgtagacggacaactggtctgcaccacggcggaagggcggcggcaactgcccttggacgacatcgccgctatcgtggtctgttgtttttccgccaaaatcgaaatgctgctgctaacggaagccgccgaacgcggcattggcgtggtgctgtgcaagacattcaaaccggcgtgcatcatgctccccgcccagcgcaacaccgacacggaactgacccgcgtatgggagcgtgtcccccgcgatttcctcgacgccgcctggcagaagaccatcgatgccaaatgccgcaatcaggaatgccttgcctgtgcctggtgcccggaaagtcccgccatcgcaaaaatccaggaatgggctcgggaatgccgccccgacaaagaagccgccgtcagccgcctttattggagcgtgtttcgcgaatacctgggcgatgtggactttctccgcctccgcaacgaaggcgtatccaactgcgccttggactatggttatgccgtcctgcttgcccgcgtcctccagagctgcttcgcctgcggccttgaccccacttttgacatcggccatgccaccgctgaacgttccacccccctcgcctatgacctgatggagcccttccggcccctcgtggatgcccgcgtaatgagttggctgcataatacccgccccctccccatggaactcgacacagccttcaagcaccatcttgtccccttcctgcaggatagcatcacctacaaggtacgtccccgtcaggtccagactgtcatcgaactctccatacgctcttttcgaaagtgcctgctggaacagaacctggaaacctatgtgccatggacggctatcaattcaaaatgggctggctgctagtcgtcttcgatctgcccgtcatgtcgcgcgaacaacgcaagcgcgccaccgatttccgtaagtacctgctggacgaagggttcatcatggtccagtggtcggtctacacccgtgctctggtcagccataaccgtatgaacacccaaatgcgccggctaaaactcaacatccctcccgaaggccacgtccgggccctgtacgtcacccaggcccaatgggaacgaatgtttatcatgcacgggcctcccgaaacagtaattgccccggaaaaacttccggagcaattgctgttttggtagcccgctcaagcacttacacggttttaactccgtcttacccaccctttgctattgtgcaaagagcagatttggaatcaaggcaaagcacgctgaacgacagcacgatttcctacaacattgtgcaaagagcagatttggaatcaaggcaaagctaccaatcccacgcggccagcttgacgccattgtgcaaagagcagatttggaatcaaggcaaagccgccgacaccaaggcgctgatgctgggcaattgtgcaaagagcagatttggaatcaaggcaaagctgtgcgctagctattggaactcatggcggaattgtgcaaagagcagatttggaatcaaggcaaagccacctgcacggcatggcctgccgaaacgtcattgtgcaaagagcagatttggaatcaaggcaaagctgatgctggcggcgagcgcggcgggggcggattgtgcaaagagcagatttggaatcaaggcaaagccggttcccaggtggccaaggcgtggtcctgattgtgcaaagagcagatttggaatcaaggcaaagccacgctcacaatcaacctgaccgccaccaattgtgcaaagagcagatttggaatcaaggcaaagccaaaggatcatcggacccgttccccgtcaattgtgcaaagagcagatttggaatcaaggcaaagctggctttggcttatattgtttggtatccgattgtgcaaagagcagatttggaatcaaggcaaagctccgaaccaaccccggcaattcgacatcctaaaaaaaggggtcagtcctatgatttgatgttttgacggcagggtctgcgggtgaggcaggatttcgggtgggggatatggagtggccaacagtccgggtggtcatctttcgtgcaattcgagtgattcgtagtttgccttccggctgttcgctggcgtcttttgcgcttcttgcgttaacggaacggatcccgccaggtcagcgccctggcctacagctactcatccttgttcatccgtccaagatatcgaactttccaaacggacaacgacggcgtgccatccctaccgttgggaggagatttcatggcgcaaccatacctgcaggtattcccgcgcggcggacagatgggacaatgccgcggcggatggcggttcgttgggttcccacgaaaaaccgcggatggtgaggatccaggcggggggcttcgcgtcgtacagctcaacggccagcgccagcacgctttccggcgccatggcgtgggtcgagaacgaaatctccttctgcggtttcagggggtgaaactcgaacggcggctttccttccttggaagcatcgatgaacacgaccgcgcggctttccgccacggccagcgcgtcctcggcgttgagctggtagttggaatcgaatgccatgccggaaatcttctccgcctttgcccaagcctcaaggtgttcgacgagcaccggcccgagtccgtcgtcctgccggcccggattgccgtagccgtagaccaggatcgggcgggatggaatctcaacgtccaaaattcaacatccgatccatttcaccacagagtgcacagagagcactgaggaagatcaggagggaaaacccaagcgggccggagaaaaaggcaggtttcctgcgtttttctccggcccattttcttttcgatttctggattcccctctgtgattctctgtgccctcggtggtaaatgttttcctcccatcctgtccatccggttcatccggtcaaaaccggctgttcttccggcgttgggagaggaggcggccgctggaatcgaagagcgagacctcgaggggcatctggccgtaggcgtgggtggcgcagctcaggcagggatcgtaggcacggatggcgacttcgatggcgttgagcatgccctcggtgatttccttcgtcttggccagcattttgcgggcgacgcagccgacggcgcggttcatgggctcgttgttgtgggtggtggagacgatcaggttggccatctggatcaggtcgtcctcgcccacccggaagtggtggatcagcgtgccgcgcggggcttcgatgatgccgacgccctcggcctgccgcttgccctttacgatcaggcggctgcccgtgatgtcgggatcctgcaacaggtcgcgcatcatttccgcggcatggaggatttcgatcagccgcgcccagtgggtgtgcatgcacatgtcgttgggctggccgccggtggcggccttgaacgcctcgaattccctctgggccagcggagtcgggatgaaatccgcgacgttcagccgcgcgagcggcccgacccggtaccagccgttttcctgcccgaccgccagcaggaacgggaatttcatgtagctccaggatttcacttcctcgcccagatactggaggtagtcctgcgggtccgcgtcgtcgaggatgcgccggccttcggaatccacggcgcgcagcacgccgtggtagaggtcaagaccgccgtccttgcgcacaagactcaggtgattcgacgaaaagcgagagaagttgtcgatgaagtctttgtttttccggtagtagtccttgaagaactcgagcgctccctgcgaccaggcaaccatctggtcggcgttgagcggggcgggtccctgaagcagggcgtcgcgctctgcggttgagaggctcttgttgacgccgccgggaatggcgccggtgccgtgaatcttcttgccggcggtagccgcgatgacttcctgaccgtatttgcgcatcatcacggcctgcgtcgccagttcgcggttcgccagggccacgccgatgacgttgcgcgtttccggagcggagtcgtagccgaaaagcaggtccggcgaggccagatggaagaaatgcagcgagtgcgactggaaaacctgaccgtagtgcatcaggcgccggattttctcggcggtggcggtcagaccgtcgcccgtgcccgcgccgaccaccacgtccatcgccttggctccggccagatggtggctgacgggacagatgccgcacaggcgctgaaccagcaccggtgcctcccagtacggccgtccctgcacgaaccgttcgaagccgcggaattccacgatgtgaaagcggctctgcaacacttccccctcgtcgtccagatggatggtgaccttgccatgtccttcgactcgggtgacaggatcgatgacgattttacgggtcatggctgtctcagtcgaatttgaacgtccggtactgcggttccagttcctggccggtcacgagggcgaccagggcatcccagatcaggtccgcgctgggcgggcagcccggcaggaagtagtcgatcttgacgacctcgtggcagggatagacgcggttgaggatcttcgggatatcaggatcgctgggaatgaggccctggggattgcggccggccacggtcggcccgtgcaaataggcctcctcgaggcattcccgcagcgggatggtgttgcgcagggccgggaggccgcccatcagcgcgcattccccaaaggcgaccagcgtcttgcagtgcttgcggaattcggtcagcacgtgcacgttttcgtcgttgcagcagccgccttcgaccaggccgatgtcgcactcccgggtgaaggtcttgatgtcgtcaaacggcgacttgttgaactccaccagctcgatcaggtcgaacaggcgctcgtcgatgtcgagcagcgacatgtggcagccgaagcagccggccagggatgtcgtcgcgatgattttcctggtcttggcagctttggggctcatgcctgcacctcgctgccgatgggctggtgatcgtacttgcgccggccgatgggtgtatcgaagcccttgcccttgcgcaagatcgcgccgacggggcagatatccatcgcacgctgcgccagttcatcgctgatgttcttcgaggtttcggggtcgatgttgatgacgaccttgtcgccgcgcttgccgaaggcgaagatggccttgccctcggcgttgtggatgccgcggatgcagcgtttgcactggatgcagcggttgtggtccttgacgagcttggggtgccaggcctcaacgtcgcgcttcgggaagagataggggaaatgcggcacggtcacccggtagcggtaggccagagcctgcagctcgcagtttccgctgcgttcgcacgagggacataggtggttgccttccgcgaataaaatctcgaccaccgccttgcgaaactcctccagctcgggggtcctggtgaccacggccatgtcctcgaccaccttcgtcgtacaggcggtttgcggaatgccgttgaccaggaccgtgcagatgcggcaggcacccttgggcgggatgcccgggtagttgcacagcgtcggaatgtagaccccgcattccttggcggcggccactagttgcgccccctcttccgccaggcaggcgcggccatccagagtgaatctgacaaaactggccatgggtgcccgctccctatccgttcgccacggccgcttcgtaatcccgcaccgccgcgggcagatcgaacgacggcacgaagcgcggatccccccggctcagccgcgcctcgtagagcgggcggaagttcctgatcgtggtgacgatcgggttcagggccgtctgcccgagcccgcagcggttgttccgcatgattttctgccacgcctgcagacgcgccacatcctccgccgttccctggccggcaatgatccgctccagcacgacctgggccatgccggtcagcgcgcggcacggcacgcaggagccgcaggattcttcgcggaagaaccgggcgaaattcagcaccacatcccgcaggatgtcccggtgccggccgatgatgatgaacgagccgcccgtcgccaggtcttcgtaagccagcacccggccgaattcatccggaccgatgcacgcacccgacggccctcccacctgcaccgcctgcacgtcgcgcgctttggccatggccaggatgtcattgacggcaaaaccccactccacctcgtagatgcctggctggtcgcagtcaccgctcacgcagagcaccttggtccccttcgactgttcggtgcccatccggttgtaccactccgcccccttcagcaccacctgcaccgccgaacacagcgtttccacgttgttgaccacagtcggccgctgcaggtagcccttttccaccggaaacggcgggcggtcgcgcggctcaccccgtttgccttccgcggattcgatcagggcggattcctcgccgcagacataggccccggcgccgaattggatgctgatgtcgaaatcaaacccggcctggccgccgatccgttcgccgagcagattctgcgcgcgcagaaccgccagcacctgctccagatacgcccgcagatagcgatattcgttgcggacatacaggatgccatgatcggccccgaccgcgtaggctgcaatcgccatgccctcgaacaccatctgcgggcgttccgtcaggatcacgcgatccttgaaggtccccggctcgccttcatcggcgttgcagaagatgtatttcacgtcacccggcgcccggcgggcaaactcccatttcatgccggtcgggaagccggccccgccacgcccgcgcacgctggcggacttgaccgccgcaatgacttccgccgaggtcatggctgtcaccttggccagcgcgatgccgggcgtgtagtcgctgaacacggtcggcccgcgctggcggatgtggttcttgaccagggcgcggacgagcgggtgcgagttctgcccgtcgccgtatttgtcccccttgagctcctcgatggtttttcccgcgcgcatgccggccaccagcgcgcgcgctttgtcgggcgtcagcctgggaaacacctggccgttgatcagcgccgccggctcctggtcgctcattccaatgcaggccgtgtggaacaggcccaggaggccatcggcggacacttcgccgaaccggcagccggcggcgatctcgaaagccgcggcgacttcggcccggccgtagaaattcgccaccacgctgtcgttgagatagaccgcaaaccgtccgcgcggctcgcgggcaaagaagtgatagaacgacacagtctgttcgacatccacctggggaatgccgagcacccccgcgatccgggccacggttgccggcgtcaggcagcccagttcgtcctggatgtcgatcaggatgtccatcagccgcgtggcatcgccgcggtattttgccgtgatggcctcgatgtttttttccatgcgggggctccgtccgccctcggcgcctagagggatcccgtgatgtatttttccaggctttggatcgtggcctccctggcgtcaatcgcgaacttgacgatgtcgccgatggacaccaagccggccagcttgccgtccaccagcacgggcaggtgccggtgccgccggccggtcatcagctccatgcattcatcgaccaaaatcgccggcgtcaccgtgcgcatcttctggaccggcgtcatgacctccttgaccagcttcgtgcgcggggaacgcccggcggcgatcaccttccagagacaatcccgttcggagacgatgccgaccagcctgccggtgcggttggtgacggccaggcagccgatatgcttgtcggccatgcgccggatggcctccagaattgtcgccccgggcgcaatcgtttccaccttcgggcccttgacccgtaacagatcacccacggttgtgctcatgacggttcctcctcagatcaagtctgcaaccatgcttctgcctgttttagagtctaggagtccctcccggcctcgtcaatgccgtgaatcgccgtcaacgcattttgtgcgccggcgcattgttttcccttcccctggccccgtccggcccgctaagcttgttttcacctgaggaagtggttatggagcccgattcagccgataccggacacgacggcgcattggctccggacagcccgcaagtcaacccgcatgtcaccatccggaatccagcgcccggcggcttgatctacgacatcgatcccgaccagttgcccacggaaacggttttccacggcgggcgccggatcttcattgacggcaccggggacggcgcgaccccgggcccggaacccgaacaaccccattacgaggtgatcgacaagatcagcgaaggcggaatgggcatcgtctaccgcgtcacggaaaacaccttgaagcgggaagtggccctcaagatctgccgcgccgggctcccgccggattcccgccgcccgcaggaagccagcgaattcgcgaatgaagcctacatgaccgcccacctcgatcatcccggcgtggtgcctatctatgccctggccaaggatgccgacggccggccctttttcgccatgaaaaaagtctccggcaccagctggaaggacctgctgcatccggaaggcgtcaccgaccctgcccgccgcgccgctctcgaggtgcgcgcccgccacctgtcctggaaggatcacctccagatcctgctgaaggtctgcgacgccgtggccttcgcccacagcaaggccatcctgcaccgcgacctgaaagtcgagaacatcatgctcggggacttcggcgaggtctatgtcatggactggggcctggccatgtatttcgatgagcgcaatgagtacaagcgctttccggcactcaaacctcagttggccggcaccccttcctacatcgcccccgaaatggtgcgcggcgaaatgactcggctctgcccggccagcgacgtctatctgctgggcggcatgctgcatgaaatcatgaccggccggccgccgcacgacggcaccaccgtcatggatgtgctcaagaatgccgcgactggccaggtgcccccgccgcaagccgagcgcgactctcccctccttacgccggccctgatcgacattctcatgaaggcgttggccccgcacattgcggaccggtatcccgccgtggcggatttccagcaggatctgcgcaactatctcgcccacgccgaatccatggctgtctgccgccgagccaccgaacagctggcggccctgcggacccaactgctgaccgattccaccaggcaggaattcaccctgaaaatggtggacaaggacacggccgccatctgctacggacaactctctgaatgcatcggcggctttcggcaggccgtcgaactgtggaccggcaaccgggaagcccggcgcgggctgtacgccgccctggccctgcaaatcgaactggcgatccggcaggatgatctgacgctcgcccgcgcccaagtccgcctcctcgaggccatgccggcgggcgcgaccgacgaccccaccctcgcgcaacagatggaagcgcgggcccgggacctggcgacgaagattacccgccggcaggcgcaactggaccgcgccactcggcaggcgcgccgctgggaaacagccaccatcgccctgggcctgctgctgctggccggtctggcggccatcgtgatccggagctggcacggacgggcgctcgccatccggaacgaaaaaaacatgttcgccgaatccaccgttgggcgcggccagatgctggaacagttcttcttcggcattgaacagattgccacgctgtaccgccagtccgccgtggaactgatctccgccccggccgaacggctggcatggagcgaaaccacggcggccgggcgcgatggatattatttcgacgaagatttctaccagcccgccactcgcccgcccaacatggtctttaatccgcgttaccagg

SEQ ID NO: 3205 - DNA, 13935 bp, synthetic construct
  source 1..13935: mol_type = other DNA
  misc_feature 1..13935: note = Synthetic
tcggccaagaccggcctcgtcaagaacgccaacaccgtcgcgctcaacggccgcccgctggatcgggatctcggccgcgccctcgcccgcgaggtgcgctgcctgaacgacgccaattgcctcgccctctccgaggccgtcgatggcgccggcgccggccggcgcgtcgttttcgcggccatcctcggcaccggttgcggcgcggggatcgccctcgatggccggccgtgggccggcgccaatctcgtcgccggcgaatggggccacaatccgctcccgtggccaacccccgacgaattccccggcccggcctgctggtgcggcaaaacgtcgtgcatcgaaaagtggatttccggcaccggcttcgccgacgactacgcccgcgccgtgggcatccggctcaagggcgagcagatcgtcgcccgcgcgcgccagggcgaagtcgccgcgcgcgcggccatagaccgatatgccaaccgcctcgcccgcgccctcgcccacgtcgtcaacctgctggatcccgacgtgatcgtcctcggcggcggcatgagcaacgtggacgagttgtacgaaatggtgcccccgcaactggcgcggcacgtcttcggtggcgaagcggacacccccgtcgttcggaacaagcacggcgactccagcggcgtccgcggcgccgcgtggctttggaactaggcgcccctacggcactgggacgacgcgatagaatcggccgacggcgtttgtctcgtcccgatcctcgaagatgttgattccggaagtcagcgtattcgtcgcaacgggaatccaattcgagcctgccacgtccgcgcaggcctccaccacgaccgtcttgcccggcacccagtccatccggaacccgaatatgcccgcatgcatgccgacggttcgcggagcgatttgcagcgcccacaataccgccggctggcccccgagcgtttcgccccaccccgtcgtgcccggaaggtaataaacgatggcattggtcgatccatcgaaaatatcgggttccacgtccggagcatcgccccagaacacgacctgctctaaaccgtcgcaagaggcaaaagcatcgttcccaacgttggtgacgctgcccatgaccatcacggattccaggccgaaacagaaccggaacagcccgctgctgatgcgcgtaatccccgtgccgagcgtggcggtctccaaggcgtagcaatgatggaacaatcccatgccgatatcggtcaccgagtcgggaaaaacgatattggtcaagctggagcacacgtaaaaggcatggtcgtcaatttgggtcacgctgggcggaatttcgatggacgtcagcgcattgcaaccccagaacgccgactcgccgatgcgcgcgacgccggtgcccagaacgagattggtaaggcccccgcattcagtaaaggccccggcgccaatattggtgaccccgttgccgatcgtcacgctttgcagggcgtggcaaccggagaacgcactgtcgggaatttcatgaaagccgtcgccgatcgtcacgcggctcagcgccggccagctccggaaatcgaagcttcccagatcggtcaaccccgcgccgatcacgaggctggccaagcccgcgcaattgtcgaacacgcgcgacccgagcgacgtcacgctgtccggaatgaccgcattggtcaggcccgtgcaccacgaaaacgcgtggtcgccgatcgagaccacccctgggccgatcgccgcgttcagcagattcgtgcactggtagaaggccgaattcccgacgttcgtcacgcccgttcccatcgccacggacaccagaccgtcgcaggaaccgaacgcgctgccgccgatgttccgcacgccgtcgggaatcgtcaattcgacgaggctgcggcacatctcaaaggccatgtccccgatgacggccacgttcggcccgaagaccacgctcgccaggttctcgcaatccgaaaacgcggcgtatccaatctccgtcaccccgttgccgatcaccacgctcgccagattggggcattgccgaaaggcctggtcttcgatccggacaaccccgtcgccgatctccacgctggataggcctgtcagcgaatggaaaccgacgttgtccaggtcggtcagaccgtcgccgatcgcgaggctggccaagcccgagcaattgtcgaacacgcgcgatccgagcgacgtcacgctgtccggaatgaccgcattggtcaggcccgtgcaccacgaaaacgcgtaatcgccgatcgagaccactccgggaccgatcgccgcgttcagcaggttcgtgcactggtagaaggccgaattcccgatgttcgtcacgcccattcccatcgccacggacaccagactgtcgcagaaactgaacgcgctgccgccgatgttccgcacgccgtcgggaatcgtcaattcgacaaggccgcggcacatctcaaaggccatgtccccgatggcggccacattcggccccaacaccacgcgagccagcttctcgcaatccgaaaatgcggcgtatccaatctccgtcacaccgctgccgatcaccacgtttgccagattgcggcactggctgaaggtctggtcctcgatcagggaaaccccgtcgccgatctccacgctgcgcagcgcaggcaggtctcggaaattgatcccgccgaaatcggccattccatccccgatcacgagactcgccaaggcgttgcagttgccgaacaggtgcgtcccgatcgacgtcacgctgtcgggaatcaccgcgttggtcatgccgatgcaccatgagaacgcgccgtccccgatcgacgccaccccttcgccgatcgccgcgttcagcaggttcgtgcatcccgcaaacgccgtagatccaatgttcgttacgcccgcgcccatcgccacgttcaccagcccgaggcagtcgtggaacgcgtagctgccgatgctcatgacgctgtcgggaatcgtcagctcgacgagactgtggcactcattaaaggcatcgtctccgatcaccgtcaccgtccggttggagatcacgcccgggatcgtcaccgcgccgccggttccggcatacccgacgatgcggatcgtccggtcgtcgttgagctcccacagaaaatcgacgggcacgaccggctcccacgtggcggtcggccgcccgccgaacgtctcgccccagcccgtcgtgcccggccggtaatagacgacggcgatttcattgccgtcgaacagataatcttcgtcgatggccggggcattcccccagccatacacgctcgccaaagcgtagcacccaccaaatgcttcgaggcccatcgacgtcacgctgtccgggatcaccgcattggtcatgccgtagcaactttggaatgcatactccccgatcgccaccacgtctgccccgatgggcgcgttcagcaggttcgtgcattggtagaaggccgaattcccgatgttcgtgacccccgcgcccatcgttacgttcgtcaaaccctcgcaccgatcgaacgcattgtccgcgacgttgcgaactccggcgggaatcgccagttcgaccagattcgtgcagtgcgcaaacgcgccgctcccgatatgggtgaccccttttccgatcgtcacgctttgcaaagcggagcagtcgtagaacgcttcgttgggaatttcccgaatgccatcgccgagcaccacgctgcgcagaaccggatattcgcggaaatacatgccgtcgatgtcggatattccatccccgaacgcgacggaggccagattctcgcagcccgcgaacgccatgcaaccgagcgacttcacgctgtccggaatcaccgcattggtcatggcccggcaattttggaacgcatcatacccgatcgcctccaccccagccccgatgggcgcatccagcaggttcgtgcaatccgcgaacgcggaatcgccgatgttctcaacccccgcacccatcgccacgcgcgtcaggctgccacacccttcgaacgcactgtccgcgacgttgcagacgccattggggagcgtcagctcgaccagattcgtgcacagcatgaacgcgttccactcgatgttcgtcaaggtgcccggcagcgaaatcccgctcagggatccgcagtaaaaggctccgtcgccgatgacggtgaccggttttccatccacggcggcgggaacggacacgaacgactccccgcccgaataacccgcgaccgtgatcgtgtcgtcggcgttggtgacgaagataaaatcgtccgcccaggccggcgtggcccacagcaacagccccgccgccagccaaatccgccacttgcccatcgaaacatcgccgttcatgccgatagaatggcaaaatattgccgcttcggcaagcccagccggcgggcgcggaccctggcggcgccaaaccgcgaaatccgtcctacggcgtcggttcggagcccggcgcggcgggcggcgggctcggcggcgcggcgggacgccggtgcggttcgcggcgcggcagatgatcgggccgcggggggtgttcgtgccggcgcggatgctcggcgggcggcgcggcttcttcgcgcgcgggggccagccaacgggcgagcagctccttgcgggcgggatcgacgccgccggcgaacttgaggtagatcagcgcttcctggaaaccgttgcggccgcgcaggcgcgcggcgtacttgctctggccggaggatttccgcatctgcacctggatgcccaggatgcgttcgacgtcgaaaaccacggccttgggaatctgcgtcaggttggtcttgtcgcgcaggacggcgttgacggcctgcagggtggcctcgaactcgggcaggccttcgacggcgaacgcgccggccatgccttcgatgtacggtccgaacagcagcgcgtgctgcagcgccggcatcggcttgaggccggcctgcttccacacgtcgaattgccgcagggcctttttcacccagttcagggcctcgtgcttgtcggggccttgcagccagttggaaaatgcggggtagatcgtctggaagagccccttgcgccaggagcgctcgaagaccttcagcgcgcagccgcagttgagaatcttcagcatttcctcgtgcaggcgctcgcgggaggagttcaccagctcgccgcactgctgcatgatggcttcgcgcgcgtgccgctcgatctcgaaatcgagctgcgaagcgatgcgcaccgcgcgcaccatccggacggggtcttcgcggaagcgcacggcgggatcgccgatcacgcgcagcacgcggtcttgcaggtccttcagtcccccgacgtagtcgatgatgctgccgtcggcgatgtcgtagaacaggccgttgatggtgaaatcgcggcgccgggcgtcttcctcgggcgtgccgtagacgttgtcgcgcacgatcacgccgccgcgggtggcgaaggtcggatcgggcacgtcggtgcggcgccgcgacggcaggggcacgtcctcggcctccgccggcggcgcgtccagcaaggcgcggaaggtggcggtttcgatgatgacgtcgcggaagaacacgtgcgccagcttgaagcggcggccgatgatccggcagttgcggaagatcttcttcacttcttcggggcgcgcgtcggtggcgatgtcgaaatccttgggcgtgcggcccagcagcagatcgcgcacgccgccgccgcacagataggccttgtagccggcttcgtcgaggcgggtcagcacgcgcagggcttcccaggcgatctggtcgcgcttcaggccgtgctcgcccgctttcaagatgacgggagcatccatggtcacaggtctttcccgcagcatttcttgtatttcttgccgctgccgcaggggcacggatcgttgcggcccgtcttgggctcgtcgcgcacgacgggtttggaatgcgcggcggagagcgcggcgttcatggcggcctcggcaccggcgtcggcgttcccgccgccgccctgcgcggcctgccggggcgccgccccgccgcccgcgcggccaccgacgagcggcgccgcggtcggatgctgggcctgcgcgagccggtgcaggtcgcccaggaaggtctggtaggcgcgcggcgaggtcgtcgcgcggaagatgcggccggcgatctcggtcttgatgcggtccatcaggtccgcgaacagcgtgaaggcttcgttcttgtattcgacgagcgggtcgcgctggccgtaggcgcgcaggcccacgccctgccgcagggtgtccatgttgcgcagatattcctgccactgcacgtccaccgcgttgagcatgatgaaccgttccatggaattgagctgcgccggatcttccagcgtgcacttgtcggcgtaggccttgcccacgcggccgaacacggcctgggccgtcgcttcggcgtccaccgcggcgcggccgcgcttgccttccttgcggacgacctggtccggatggaacccgatcggaaactggctgttgacccacgtggcgaaggcggcgatcgtctcgtcgtcgccgtcgaggtcctcggcgcgggcgaagatcacgtcctgcacgacgtccagcagctggtcgcgcacctggtcggcggcgacgatctggctgcggaaaccgtagatgatctcgcgctgcttgttcatcacgtcgtcgtattccagcgtgcgcttgcggatggcgaagttctgctgctcgacgcgccgctgggcggtttcgatggaccggttcagccagcggtgctcgagcacctcgccttcctggatgcccagcttctccatgatgccggaaatgcggtcggagccgaacaggcgcatcagatcgtcttccagcgagacgaagaagcgcgacatgcccggatcgccctggcgcgcgcagcgcccgcgcagctggcggtcgatgcgccgcgactcgtgccgttcgctgccgatgacgtagagcccgcaggggcgctcttcgatcagctcccgcaggctcttcttgccctcgaccttgtcggagagccgcgtcttgccgacgatgaggtcgcgctccatccagatgacgccggggccgagcttgatgtcggtgccgcggccggccatgttggtggcgatggtgatggcgccgggctggccggcgttgaggacgatttcggcttcgcgctggtggttcttggcgttcagcacgttgtgcggcacgttcgcgcgccgcagcatgcggctgaggatttccgacatgtccaccgagatcgtgccgacgagcaccggctgcttgcgctggtagcaggccgtgatctcgtcgatgatggcgttgaacttttcgcgctgggtcttgtagatgtggtcgttgccgtccacgcgccgcacggggcggttcgtgggaatcacgatgacgtccatcttgtagatggactggaattcgtcggcttcggtttcggccgtgccggtcatgccggagagcttcttgtagaggcggaaatagttctggatggtgatggtggccaaggtctgcgtctcgcgctggatgcgcacgccttccttggcctcgatggcctggtgcaggccgtcgctccagcgccggccgggcatcaggcgaccggtgaattcgtcgacgatgatcacctcgtcgtcctggatcacgtactggacgtcgcgctcgtagacgctgtaggcgcggatgagctggtccacggcgtggatgcgctcgctcttgtcggcgaactggttctgcagttcctggcgcttcgcgaacttttcctggtcggtcagcgtcgcgtcgccgtcgagctcggccagcgcggacaccaggtcgggcacgacgtagtagtccggatcggccggattcatggcgttgcagcccttgtccgtcaggctcgcgtcgttgctcttttcgtcgatgacgaagaagagttcctcgcgcagggcgcgggcctgttccttgttcatgtccacgagcatcatgctctggaccttttcgagcaggcggcgggcggacggctcttccagcaggtgcaggagctgcttgttcttgggcatgccctggttgacctggtagagcttgaacatcgcggcttcttcgtcgcccttgtcgatcgccgccttggcctcggccatgaggttcgaacacaggtcgcgctgcttgcgcaccatgcgctccaccgacgggcgcacggcctggtactgctcggtcgaatacggcgccgggccggaaatgatcagcggcgtgcgcgcttcgtcgatcagaatcgagtccacttcgtcgacgatggcgtagttccagccgcgctgcaccatttcctgcgggctgtaggccatgcccatgtcgcgcaggtagtcgaagccgaattcggcgttggtgccgtaggtgatgtcgcacgcgtactgcgcgcggcgctcctcggggcgcatctggttctggatgcagccgaccgtcaggccgagatagcggtacacggtgcccatccacgtcgcgtcgcggcgcgccaggtagtcgttcaccgtcaccacgtgcacgcccttgcccgtcagcgcgttcagataggtcggcaacgtcgccaccagcgtcttgccttcgcccgtcgccatttcggcgatcttgccgtgatgcagcgcgatgccgccgatgagctgcgtgtcgaacggcaccatgtcccacgtctgcggatgcccgcacacgtccaccaccgtgccgcacaggcgacggcacgcgttcttcacgaccgcgaacgcctcgaccatcaggtcgtcaagcgtttcccccttcgccgcgcgctcgcggaattcctgcgtcttcgccttgagcgcgtcgtcggacagcgcctgcaactccttttcccgctcgttgatgcgccccacgtacgggcgcagcttcttcaagtcgcgctcgttcttcgtgcccaggatcgccttcaacagccattgcatagaaattctcgattcggaaatgtcggtgcttcaaaaaataaacccggcgactttactccccgccgccccctcctgacaagcccggaagcccttctcccaccctcagcggcattttttagtcggcaagcagggtttttgccccatttgcatccataatagccacaagcggcgccttgtggccgtgtaaaacaggatttttgccccacctagactaaatatcagtcggttttcaggaatttttcgatgatttccttgtcccccggcgaaaagcagcagaaaacaacggtttccaatgcggttaggcgccgcagggcctcccggacggtgcggacggcgatttcggcggcggcggccttgggatagccgtagacgccggtgctgatgcagggaaacgcgatgctgcgcgcgccgcgttcggcggcgagttccagcgaacggcgatagcagcccgcaagcaattccggttcgccgtgcaagccatcgcgccagacgggtccgggggtgtggacgacccatttcgccggcaggcgatagccgcgggtgatcttggcgtcgccggtggcgcaaccgcccagcgtccggcattccgccagcagttcggggcccgccgcgcggtggatcgcgccgtccacgcccccgccgcccagcaacgacgtgttcgccgcgttcacgaccgcgtccaccggcagcgtcgtgatgtcgaccacgacgactttcaagatcggtctcatgcctgttttctatcatttcgcggcggctgaatcaatcgcccgcccctccctcctccggtcatgtcgagcgcagtcgagacatctcggcttcatccacgcgtccgaaccaaatccggtacacctcggatcgttggaaatttccagcccatctgttgtcatggccgagaaaaaagacgacctccgaagaggtcgtctttattaaaggctttctatcctgacgtacaacgtagaggtccgaactgccttaattaactttgtcttgattccaattaagacaatgcacactattacgattagcggtacacccgtcaagcggaaatcaaaatattgggagcggcatgaaacaggaccaaatcgctttttctttcgatgtcgggcacagttcgattgggtgggccgtctttcagattgccgacacgccagaatccttccattctctgctcggcacgggcgtggttctgtttcccaaggattcctgcctggcttccgcccggcgcggctttcgccgggcccgcagaaacatcgccgcccgccgttcgcgcatcgaccgcctgaaaaactttctggcggggctcggggttctatcccgtcaacaactcgatgcgaaccccaacagccatccatggcttctggccgcccgcgttctggcctccggaggccaaaagacgctcacgtgggaggaattgtggacggtccttcgttggtacgcccacaaccgcggctacgacggcaacgccctttgggcgggcgatgaagcagactccgacgagacagatgacacggagaaggttaaaaatgccaacgccctcatggaaaggcacgagacccgcaccatggccgaaaccttttgcaaggcactcggcctcgacccgttgggcgacgtcaaagcctcctgcatttatttcaagggcaacaatgccgccttcccgcgcgacgccgtcaccgaggaagtccgccgcatcctcgccgcccatgccggaaaactgcccaaggtggatgacgtcctcagcgacgttctgctgaagaacgccgcggccgccgatctggagcttccggcgcggttcaaaggcggcttgctgtttggccaatatgtaccgcgtttcgacaaccggatcatccccgcctgtcgaatcacgggaaaaaacaccccgctgaagcggtgccccgagtatctgctttaccgctggggtcgcctgctgaacaacctgaccgttttcggtgccgccggccaaatccgcacgctgctccccgctgagcgcaaagcgctgcacgcccgaatggaggccgaaggttacttcaccaagcgcaccctgaatgccgccttgaaagacgccacgggttgcgcccccgccaataccgaaagtttctttttgacggaagaaatggaagacgcccttgtccttgaccctgtcaaaaaattcctggcaaccaaccaggtcttgcgggaagtttggccccacctctccgccgaatgccgcaagcaagcccagaccgcgttgtattccggcaagataatccggatggacgaactccttgccgccatggaaactgccgggcaggacacggccgccgctagagaagcgctggctgtcctccaaaagaaggccaaggcaaaagacgccgacctcgccacccaccgtttctcagcgaaatatcccaatggccgcgctgcgtactgccgtgaatttctcgccaagaccttcgccgagagcatggccggcaaagactccgcgaaggagggcggctgcctttacgaaaccgaggaaatccgcaaccggcttttgcgggaaccgctcgttaagcaaaccaacaaccatttggtccggcatcgcctcctgattttcgagcggcttttggatcaaatggtggcggagtttgccggcggcgacaaaaagcgcattgccgcgaccgtcgtcgaagtcgtgcgcgaactccaggaattctccggcctgaatgcaaaagaaatcgcgcaaaaactcaacgataaactgggcaacttccggtctgtcgtcaagagtctggaagaagcgattgcacactcggatgagaaagtcgccatcacgggcagcctgatccgcaaagcccgcatcctggaagaccagggcttcatttgcccctataccggcgcctcgttggggtatccggatcttctgaacgaccgcctggaaatcgaacacgtcatcccccgctccctccgcccctccgactccctgtcttcctgtctcatgaccttccggtccgtcaacgacatgaagggccagcgcaccgccatgcaattcatctgcgaagagcaggggcgcgaggttcccggacatggcaacctccagatcactacgaaaaaggcctacgaagcctttgtcgccaagcacaagaagcagtaccgatacgggaccgacgaccggcggcgctgcgagcggcgcgccgaactgatgctgatggaacgctatgaccagcggaacgccgacttcaccgaacgcgatttgacccaaacctcctacctgaacaaaatggccatccgcctcgtcaagcagcgcatcggcatcgacgccaagcacctccccggaagcgtcaccgccttcatccggcaaaagctccatattgatgaatgcctattcaacgccgtcccgcggctgcaaaaggccgccaagggcgaaggcaagcaaccccaacgcaaaaagggtgctgccgagccccccgccgaacctgtaaatgacgacctgccgccccggaagctcaccaaaaccgacatccgcgagctgacccatctccaccacgccatggatgccgtcacccaaggcctcgccctgctgctcttcgcccccgaagattggccgctgcttgtcaaacgccacctgtccgatagcgaaaaacgcctgctgaaagcgcgctatccatttctgcttttcaatggcgacaacgacttcagcatccaggacttgcccgaggccgccctcaagacgatctccgaccgactggccgagtgccgagttgtccggcatattcccgccaagatgcacgggatcgtcgtggatcaaaccacgtggggaatcgtggcggcgggcgccatcacgaagctgcgccaaaagaccacggagaagaatgctcgttatgatgaaaacggccggcgtttcgttaagaccgccgaggaaaaacgctccctccttctgggcggtcccaatgccccggacggcaagctcgcgaagatcaaaggcgcaatcctgataacggaaaactggggctgcgcccttgacccggccccgcccgccgtcatccctcatttcaaggtctatccccagttgcgcgccctgcgcgagaaaaacggcggccgccccgtccgcatcttgcgcaaaggatcattagtccagatcaaggatggacgttatcaggggatatggatcgtgaccggcattaaggacgccgcaaaaggcatccatttggatttgctggcaccggacagggtaaaagaggaaagcggatgcgatgattcaaaaagagaggttgatttagaaaccctaagaaactccggcctgaagattctgaaaccaaagctgaccggcacatgtcctaccacattgtcaccatagagagcaccaaagctgaattgaattgcgtcgatgggcaactggtctgcacgacggcggaagggcgtcggcaactacccttggacgatattgcggccatcgtggtttgttgcttttccgcgaagattgaaatgctgttgctgaccgaagccgccgagcgcggcattggcgtggtgctgtgcaagacgttcaaacccgcgtgcatcatgctcccggccctgcgcaataccgataccgccctgacccgcgtgtgggaacgcgtcccgcaagactttctcgccgccgcatggcagaagaccatcgacgccaaatgccgcaatcaggaatgtcttgcccgggtctggtgcccggacagccctgccatcgccaagatccaggaatggacctccgacggtcggctcgaaaaggaagccgccgtcagccgactctattggggcgtgttccgcgaatatctgggcgacgtcgattttcttcgtctccggaacgagggcgtttccaactgcgccttggattatggctatgccgtcttgctcgcccggatcctccaagcttgctttgcctgcggtcttgaccccactttcggcatcggccatgccacggccgaacgctccacccccctcgcctatgacctgatggagcccttccgccccctcgtggatgcccgcgtcatgagctggctgaaaaacacgcgc

SEQ ID NO: 3206 - DNA, 10016 bp, synthetic construct
  misc_feature 1..10016: note = Synthetic
  source 1..10016: mol_type = other DNA
gaaaagaaattttaaataagcttttggaagatttggacggattgtgcaaagtcgattctgcccctaagatggaaggcaagcagatgtttatgattgtgtctccggcataattctttccaaaaacacagcttgctttataaaagcaagcctcttgcacaaatcaaagagccgttttaaaaacggctctttttttactgttctttggctgttgttatcaataattaggcaacatatctttttgccataactgacaacggaaccggcttaattttatcggcatttcccgcagcgccaaaggcaacataacggtcgatgcagactttcttcatttcttcgattgccggcttcagatatttgcgcgggtcaaattccgccggcttctgcgtgaagacctggcgaacggccgccgtcatcgcgagacgcccgtcggagtcgatgttgatcttgtcgacgccgagcgacgccgccttgcggagctggtcttcgggaatgccgaccgccgcgacgagcttgccgccgttttcgttgatgatcttgacgtattcctgcggcacggaagacgagccgtggagcacgatcgggaagcccggaatgcgcttttcgacttcttcgagaatgtcgaagcgcagcggcggcggaacgagaatgccgtcggcgttcttcgtgcactgttccggcttgaacttgtacgcgccgtgcgaggtgccgatggaaatcgcgagagaatcgacgcccgtggacttgacgaatttttcgacgtcttccggatccgtgtagttggagtgctcgtgggcgacttcgtcttcgatgccggcgagaacgccgagttcgccttcgaccgtcacgtcgtacttgtgcgcgtaatcaacgaccttcgcggcgagctcgatgttcttttcgaacggaagcgccgagccgtcgatcatgacggaagaaaagccgtagtcgacgcaggacttgcagagctcgaacgaatcgccgtggtcgaggtgaagcacgacgggaacggcgaaaccgagttccttcgcgtattcgcaggcgccctgcgccatgtagcggagcagcgtctggttcgcgtatttgcgcgcgccgctcgagacttgcagaatcaccggagacttggtttcgacgcaagcctggatgatcgcctgcatctgttccatgttgttgaagttaaacgcaggaatcgcgtaatggcccgcgtgagccttcttgaacagttccttcgtgttaaccaaaccgaggtctttgtaggatacttgcataggatttgctttcttgtggtgttgtaaaaactgacttcgcatattcaagcccgcgccgcgcgggaacgcaattcaaaacggcggcgggaacgcgcaccgcacgcgccgaaaaaaaaaaagaaccgcccttgcggacggctcttttctaaagctttcaggattcaaatgtgccgccatgggcggcagagaattgaactgctttaactaactttgtcttgattccttaagacgatgaaaataatgcttcaaaatttcgccggcgcaagctattttttcccgcgtcggaaaacttctctttttcgatacccccttaaaaacaacccttcaaaaacgaatatcggaaaaagcaaaactatggatcctgcaaatctcgcgctttccttcgacatcggctacgcatccctcggatgggccgttttcctgctgaaagatccgttcccgtcactgctcggctccggcagcgtcctttttcagaaggattcctgcctcgcttcgagccgccgcgcttttcgtcgcgcccgccgcaacatcgcagcgcggcgttcccgcgtcgcccgtctcaaaaaatacctggcctcgctcggcgtcctcgagcgggaacagctcgacgaaaacgcctgcgcgtacccgtggctgctcgccgcgcgcgttcttgcctccgacggaaaggaaaagctttcctggcaggaactttggcacgtgctgcgctggtacgcgcacagccgcggctatgacgggaacgcgctttgggccggcgacgcgctcgacgaaacaggcgccgacgacgaagacacgcagaaggtgaaagccgcccgcgcactgatggaaaaatacgggaaaaccacgatggcggaaacggtctgcgccgatctccaattggaacccttcggcgaaaagcgcgcctcccgccgctatttcaaaggcaacaatgcggcgttcccgcgcgaaaccgtccgcgacgaagtccgccgcatcctgctggcgcacgccggcgttttgcccaaggtcgacgacgcgctcgccgcaacgctgctgaacgatgtccctgaaaatctctgcgccgccctgcgtctgcccgcgcgcttttccgcgaaaggcggcctgcttttcggacaatacgtgccgcgcttcgacaaccgcatcatcgggcactgccgcatcacaggcaaaaacgttccgctgaaaaactgccgggaatatcttctttaccgttggggacggctgctgaacaacctgacggtcttcgcgcgggacggaagcatccgcacgctcagcgcggacaagccgaacggccgcccgagcgagcgcgaaaaactggacgcggaaatgcgttcccgcggcttcttcgacaaaaaaaagctcaacgacctgctcaaagaaatcacgggctgcgagccggcgaacactgaaagctacttcctcattcccgagatggaggacgcgctcattctcgatcccgtgcgaaagctcatcgcaacgaaaaaactcgtgaaggacttttgggggtacttttccgaacgcggaaaaaagattttcgccgcggaactcgcgaaaggaaaaacgctgaagctgtccgactgcatcaagcgcatggacggctggggcggctggaaaacgaagccgctgttcgccgccgcgctcgaaaaactgaaggcggcggaaatgaagaaaaagccggaaaagcgccgcaacctgctcaacctcagaatcaaggcggagttcccgaccgggcgcgcaagctactgccgagaaattctgaagaaaacctacgaagaagcgctggcgggaaaagactcgacgcagcccggcggctgcctttacgaaacgccggagatacgggaacggcttctgcgcgggaacgccgtcggagacgacgcgggaaccgtcgccacggaacaatggctcgcagggcagacaaacaaccacatggtgcggcaccgcatgctcattttttcccggctgctccgcgacatcatccgagaatacgcggaaggcgacgcggcgcgcgtcaaagacgtcgtcgtcgaagtcgttcgggaactgaaggaattctcaggcttgagcgcgcaggaaatcgcgacgaagctgaacgaaaaattcgcgaacttcaacagcgtcgctgaaaaaatcgaagcggccgcgcaggagaaaggcgtcagcgtatccgcttcgctgatacgaaaagcgcgcctgcttgaagaccagggattcgcttgcccctatacggggaaaaacatttcctacaacgagcttttctccggagcgctggaaatcgaacacatcattccgcgatcgctgcgcccgtccgacgcgctcagctcctgcgtcatgacgttccgcgccgtgaacgacatgaaaggccaacgcacggcgatgcagttcatgaaggaatgtgccggcaaagacgttcccgggacgaaccttcaaatccagccgcttgccaatttcaaagaatgggttgaagcgcaccgcagccagaagctccgccgcggattttcgaaagaggaccaagcgcgctgcaaacgccgcgcagagctgctgctcgtcgaacgctacgaagaacgtaacgcggatttcacggaacgggacctgacgcagacttctcatctgaacaaactcgcgatccgtctcgtcaaacgggaactcggcatcgatgcgcgccacctcgcgggcgccgttacggggttcgttcgaaaaaacctctccatcgacgaatgtttggtggccgcagtcccgcgcatgcagcgcgcccaacgcgtcagcgaacacgattcgcgaaaactgctgaaatcccaaatgcgggaactctcgcacctgcatcacgcgatggacgcgattacgcaggggttgaccggcattcttttccgcgtcgaagattggaagctgctcgtcaaacgccatctgaccgaacgggaacgcgccgtgcttgccgcaaaatatccgacgctgctccgcttctccgccaacggagaaattgcgttgaagccgctgccggacagtctcttgtccgaaatcacggcgcggctgaaggaatgccgcgtcgtgcagcacgttcccgcgaagatgcacggactggccgtcgagcagacgacgtggagcatcgtttcccaggacgaggcaacgcgcaaggtctcgcttgagcagcataccacggatttgaaaaaaggcagatataaagatgacggaacgcgctttgttaaaaattgcgaggaaaaaccggcgctgctgctcggcttcggcgttcccgaggaacagaaaagcaaactgcaggcgattaagggcgtcgttaaaatctgcgaaaactggggatgcgcgctcgacccggaaccggtcgtgattccgtatttcaaggtgttcccgcgccttcgcgagctgcgggaacgcaacggggggaagcccgtgcgagtcctgcgccgcggccagcagattgaagttctctccggaaaattcaaaggcgtgtggacgattgtttcgataaaagacgcaacccgtgacgggattcttctcgatatctgcgcgccggataaagtcagacaaacagaacacggaacaacagattccaaggtcggagtcctcttaaaatcgttgctccgcgccggactgaaaatcctcaaaccgccgctcacgggattcgcgtgtcctaccacatcatcacaatagaaagcccgacggcggagctgaactgcgcccgcgggcaattcctctgtacgacgccggcgggaacgcagtcgctcccgctggacgacgtcggtgccgtcatcgtctgctgcttctctgcaaaaattgaaatgcgccttctgacggaagccgctaagcgcggaatcggcgtcattttctgcgaagctttcaagccggtttgcatcgcgctcccggcgacccgcagcacggacacgctgcttacgcgaacatgggaaaaggcgaatccgaaatttctgaaagagctttggcaaaaaacgctcgacgcgaaatgccacaaccaaggcatgctggcgtccgtttgggaaccgcgttcgcccgtcgccgccgcgatagaatcccagaaatttctgcgctttcgcgcgcgggaaggcacggtcagccggctcttttggagcgtgttcagaaaacatctgaaccgcgatgattttctgcgttcccgcggacaaggcatcgtcaacgcctttttggactacggctactccgttctgcttgcgcggattctgcagttttgcttcgcctgcggtctggatcccaccttcggcatcggacacgcgaccgcggagcgttccgcgccgctggcttatgacctcatggaaccattccgccctctcgtagacgcccgagtgatgagctggctgaaacagcatgaaacgccgccggaggaactggataaagcctacaaacggcatcttctcccgtttctgcaggagcgcgtcgtttacgcgggaacgcagcagcaggcgcagaccgtgatgggaaaatgcatccgttcattcagaaaaagccttttggaaaatgatctctccgcttacgaaccatggatggcgatcgattcaaaatgggctggatgttagttgtgtttgatctgcccgtttcttcgccgagccagcaaaaacgggccgcaggtttccgcaagttccttttggatcaaggctacctgatgattcagtattccgtctacgcgcgggcgtgcgtcagttacaacaggatgcagacgcaaatgcgccgtttgaaaatgaacataccagcggaaggtcatgttcgcgcgctttacgtcacgcaagcgcaatgggaacgcatgtacgtcgtgcacggccctccgccgaaagaagaacctccggaagcgttcccggagcagctccttttttggtagagaagtcctttcggcaaaatagcctctccggaaaccaagaatttatgcggtatccgaagttgctattttgccgaaagaacaattggaatcaaggcaaagcttcggaccgtattcaccgcaggcaaaataattttgccgaaagaacaattggaatcaaggcaaagccatacttgtcttcatgaccgaggacgagctattttgccgaaagaacaattggaatcaaggcaaagctgaggatggtgataatgatgtctttggctaattttgccgaaagaacaattggaatcaaggcaaagcagcgcctttatgaacgtgacgctcgtggcgattttgccgaaagaacaattggaatcaaggcaaagcacggtgcagcgcgcgcattcctcgacctccattttgccgaaagaacaattggaatcaaggcaaagccggggctgggcatgatgctcgccgaacagcattttgccgaaagaacaattggaatcaaggcaaagccttccgatcgcgcagaacggcagcgcgccgattttgccgaaagaacaattggaatcaaggcaaagccgcgagggcgagcggaagacgaagctgcggaattttgccgaaagaacaattggaatcaaggcaaagcaggacctttctgaggccacggaagagaagaattttgccgaaagaacaattggaatcaaggcaaagcgcggaaaaacatctgtcatgccaaatttatattttgccgaaagaacaattggaatcaaggcaaagctaccgattcttagcgttctcacgggcgaacattttgccgaaagaacaattggaatcaaggcaaagcaggcacatgaacgttggaaaaaggaaactaattttgccgaaagaacaattggaatcaaggcaaagcaacggcgccgtcgtgcagacggcgttcgtgattttgccgaaagaacaattggaatcaaggcaaagcgtcgttcgcgattgggcttgcgcagaataattttgccgaaagaacaattggaatcaaggcaaagcacgcggtaattttcggcgaaggttttaaagattttgccgaaagaacaattggaatcaaggcaaagcatgttcgtgtccggcgcgagctcgcctccgattttgccgaaagaacaattggaatcaaggcaaagcatagcttcgtttaagtcaagttataaatttattttgccgaaagaacaattggaatcaaggcaaagctgagcgtcgacgtaaaggaaacaaaaacatattttgccgaaagaacaattggaatcaaggcaaagcggcgttcctgctctgctggaggaggcgggcattttgccgaaagaacaattggaatcaaggcaaagcagcgtcaagcgcgtcgatgtcgtattctaaattttgccgaaagaacaattggaatcaaggcaaagcgatgccgaagccgattttcagcttgcgcgtattttgccgaaagaacaattggaatcaaggcaaagcaacgccgagctgagcgagatcgaccgcctgattttgccgaaagaacaattggaatcaaggcaaagcatgaacgggattttgtcggcgagcttgacgattttgccgaaagaacaattggaatcaaggcaaagcaacaccaagagccagccgccgacgctggcgattttgccgaaagaacaattggaatcaaggcaaagcgacgacgaaccttttgcgctcgatttcgcgattttgccgaaagaacaattggaatcaaggcaaagcaagacatctcctgcgccggaaaggggggggattttgccgaaagaacaattggaatcaaggcaaagcttcggtctcgcgtttgaaatccccgaaggaattttgccgaaagaacaattggaatcaaggcaaagcaatcaagacgcatactttgtcaacactgttattttgccgaaagaacaattggaatcaaggcaaagcgtcggcgcgagcgtcgtccaggtgctgcacattttgccgaaagaacaattggaatcaaggcaaagcttggcgtccgtctctcccttcttgtaatcgattttgccgaaagaacaattggaatcaaggcaaagcgtcgtagaaggctaagtcgaagttcgcgcgcaaacacagatactttcaacatatttgcaaaacagaatgcaaaattctgcgttgtgagttgctttcaaaacacagatactttcaactgccgcgtatcgcacacaatgctcttcccacttgcggctcccttcctcaaggcgcaaaaaaaaaaaagctcccgcacaaaccttgcgggagctttttttttgcgtttcgcggaacgaaacgctctgaaaacagcgacgttctcagcggcggcgacgcgcgaacttgctctggaacttgtcgacgcggcctgccgtatcgacgaagcgcttttcccccgtgtacgccgggtgcgagtccgccgtgacgtcgcgcggaatcacgcagtattcgatcccgtcgatgacttctttttccttggaagaaagcgtggatttcgtgaggaacttgcgtcccgtcgaaacgtcgcggaagcagacgaaattaacggaaggatgaatgtcttttttcatgagcttgcaactcctgtttgcgaaaattttcagccgcgcgggaagaaaatcatccctggcgcgccttgtagcgcggatgcgtcttgttgatcacgtagatgcgaccgcggcgccgaacgacctggcagttcgggtggcggctcttgagcgacttgagcgaagatgaaactttcatgtgtctttccctgtaaagttaaatgagtagcagataaaaccgtttcgccgcgcgtctgtcaacgcctttttctgaaatgcgcgcgaaagccgcgttcccgccgctccgttcagcagctcagacagcgtacggcgagctcgcgcatcaccgcctcgtcctcgcccgggcgggcaatcagcgcctcgaacgcgcgcacgaactccagctgtcggtcgatgaggcgcttcagcgtcacggatttgtcccgcaacgtcgctcccgcgactttttctccgacgtaccacgcgttctgcgaaaaaaggttcagcgaagatttttcgtcgttcccgccgaaaagatgcccgtaacgggactccgccgcctcgatcgcgctcttcgaaatgccgccgcgggaactcagcgccgcatcgcccgcatcgacgagcgcccgcagctgaatcagcagccgattccggttctgcagcgccgcaagcagcggacgcgcggacacgttgttgaaaaagaaccgccgcagcgactccagcgttcccgcaagatctccggcgaaaaaatattccgccggctcgaaaaaatctcccgcgccgaacacgggaacgagccgcatcaccgttttctcgtcaatcgttccgccggggccgacgctgcaggcgagcttttccaattcggaaaaagtcatgcgcgcgtgcccgttgactttccccacgagcagcctcgccgcgtcttcgccgatcgacacgccgcgttcctgcgccgcgcgctccacagcgaaaaccatgtcgtccgggtcgctcatcgacgcgacgggaacgagcttgccgaccttcagcagcttcttcgcgggcgtgcgccgcttgtccggccgcacgacggaaatgaccacgcagagcgcggcgggatcgctcgacgcgcattcctccgcgaccttgtcggcgaaatcctcgaaaatgtccttcttcgccgcgctcttggagccgcgcccttttttcgcgggagcggcggcggccttttcctccgcgggcttcacgcgaatcacgccgtcggcgaaccagttcagattgcgcagccagacgtatttttttccgccgaaaagcgaaaccgtgcgcgtcgccgcgagaaacgcggaaacgacgcccatggcc

SEQ ID NO: 3207 - DNA, 8647 bp, synthetic construct
  source 1..8647: mol_type = other DNA
  misc_feature 1..8647: note = Synthetic
cggcgaaagcgaatgcgcgatgggctttccgagcacggcgaagctcggctcggagcgcgtccatgcgcgcaggtcggcgagcgtgaagactttttcggcggcgttcatcgtgcggaaaagactaaggcggggcggcacgagccgcaaattgataattgaagacgggcggaaactccgggggagaatcgccgccgcctgcgcgttcccgcgggagaaaattcctttgtcattcccggcgggaagtgttagcttcgcggacgtattcaacgcctatgccgaatattctcgaacagaccgcgacgattcccgggaacgcctcccgcgaggatgtgctgacgtcgctttttgaaattttcgaaaaacatgccgacctcgacgcgttggcggcggtgaagaaggccgcgctcgagcgcgaaagcacgtcgtccactttcctgggccgagggctcgcgctcccgcacgggcgcgcagacgggctcgaaagcatcaccatcgcggtcggcgtctccgagtcgggcgtcgcctggccggacgcctccggcaaggcgtatctggtgctgttgctcggcgttcccgcggcgatgatccgcgactatcttctgctgacgcagaaaattctgcgctggcataaagacaccaaaacgctcgacgccgacgggcgcgtcctcgacgcggccgcgctcatggcggagctgaaaagcgtcgtcgcctgacgcgcctccgcgccgagatgtccgccgattccgcagccgaagccgcgtacgccgggaagaatttctcgcgtcggatcctgctcgggctggaactgcgcgaaaagctccgcctcggcgacacgcagatcatctacgtctgggcgctgtgcgcgggcttcatcggcgcgctgacggcgctgacgttcgggttctgcgtgacgtgcgtgcaggatctgctcacgggaacgcgcgggctgacgcaggtcgccgcgttcgcctctctggaaaaatggcactgcgtgctcgttcccgcgatcggcgggctgttcgcgggcgggactctgcttttcatgcacaagttcgttcccgtgcgcgcgacggaatacatggaggcgatcgcgctcggcgacggctacgtgccgcctaggccgagcctgctgcgaagcctttccgccgtgttcaccatcggctcgggcgcggcgatcgggcgcgaaggtccgctgatccagacgtcggcggtcgcggcgtcgtggctgggctcgaagttcgggctgcctccgccccggcttcgcctcgtggtggcgtgcgcggcggcttcggcgatggcggcgacgtttcacacgccgctttcgggagggcttttcgtgggcgaaatcgtgctgggcgcgctgacgctggattttctcgcgccgctgctggtggcgagctgcgcgggctacctgacgctgagcctgctcggcgcggtcgacccgatttatcacgtttcgggcgaggtcgggctcggctcgaatcatctcgtcatcgcgctgagctgcatcgctctgggcgtcatcgcctcgctcgcggcgaacggctggctctggctgctgaaaaaagcgcggcggctgctcaacggcaggcacgcgtggctgcccgtgcggctcgcgctcgcgggagcgctgtgcggcgtcgcggcgatatttttccctgaaatcacgggcaacggctacaacatgattcgcgggatcgtggcctcgcagttttctccggaacaggcggggctcctgctcgtgctgaagatcggcatcgtcgcgtgcgtgttcggcgtgggcacggtcggcggggcgctgacgccgagcctgacgatcggcacgttcatcggatttctcttttccgcgctgatgacgcggctgggcgttcccggggaccacgcgatcgcgtattcgctcgtgggcatggcggcgttcttcaccacggcggcgaacgctccgatgacgtcgctgctgctcgtggtggagttcacgctcgcgggaacgctgatgttcccgctgatcatcggcgtcgtcgtctcgcacggcatcgcgcgttttctgcacacggagtcgatgtatcacgacgcgctcgcctcggggccgcgcagcatcttctccaagccgctcggcggcgtccggctcatcgaaatcgcgcggaagaatccgccgacggtgcgcccggacgacaatttcggcgcggtggcgaacgtgctcatccgccacccgtcgcagacgattttcatcacgggaaaagacggcgggtatcgcggcgcgatcgtgtcgtcggacattctgcagttcgcgcagacgaaggagctcgcggaggcgatcatcgcgatcgacgtctcgcgcgacaatctgcccgtccttctgccggagatgaagctgcccgacgcgctgaaggtcttcgcgtcccgcaagcacgaggattcgctcgcgctcgtggaagacgaggaatccaagcggctgctcggcgtggtgaaccgttccgacctctacctcgcgatcggcgaaatcatgcgccgggaaaaggtgaggtgaggcgcgccctcctcgggatttttttttcagacaaaacaaagagacacgacaatgcattcctccagaaaacgtcgcgcgctgcgtcgcgcgaaggcgcgggcacggctcgctttcggcgaaaaaggcgcgagcgccctgcacgggattctgctcgtcgcgctgttttcatgctcggctttttatctcgcggacactccgttcctgaaaggcttgtcgttcagcccgctgatcgtcggcatcattctcggaatgctctacgcgaacagtttgcgcaaccgccttccggacacgtggacgcccggaatccgcttctgctcgaagcagattctgcgcacgggcatcgtgctttacggatttcgcctgacgctcgcggacgtcgccgccgtgggcgttcccgcgattgtgatcgacgcgctgatcgtcgcgggaacgctgctgctcggcgtctggctcgggcggctgatgaggctcgacggggacacggcgctgatgacggcgaccggcagctcgatctgcggcgcggcggcggtgctcggcgcggagcccgtcgtgaagtgcgaaagccacaagacggcgatcgccgtttcgaccgtcgtgattttcgggacgctgtcgatgttcctttatcccgtgctttaccgggcgggaacgctcgacgggcttggcgacgcgggcgtcgcgatctacacgggcgcgacgctgcacgaggtcgcccacgtcgcgggcgcgggcaacgcgatggacccgagcggcgcgctcggcatcgcgggaacggcgacgatcacgaagatgatccgcgtgatgatgctcgctccggtgctcgtcgcgatgagcttcgcgctcgcgcgcttcggcggccggcgggcggaccgcgttcccgcggccggcgcgggcgggaagcggggaatcacgattccgtggttcgccttcggcttcatcggaatcatctgcgtgaactctctgctgcagctgctgagcggcgcggagacggtgaaggcgattccgctcaacggcgcgatcgagtacgtcgacacgtttctgctgacgatggcgatgacggcgctcggcgcggaaacgagcgtggacaagttccggaaagccggatccaagcccttcctgctcgccgccgcgctctacgtctggctcgttttcggcggctactggatcacgaagatcctcgttcccgttctcggctgagcgggcgcggaacgcggcctccccgcccgcgcgttcagaggatgacgtccgcgtcggggcaaagaaattgtgtaatctcgaaagaaaaaaaagaccgcccgtacgggcggtcttttaataaaggctttcggaattcaaatgtgtcgtcatgaacgacagaaaattgaactgccttaactaactttgtcttgattcctaaagacggaaaaaataatgcttcaaaaaatgccgtttgcaagctattttcgctttggttgagaaattctcttcaactcctcgttcataaattcgaaaaatctccataaatcccatgagtctcgcagatatcgctctttcgttcgacatcggacacgcctccatcggttggtccgttttccaaatcgcggatccgttcccgcttcctctcggcgccggcgtcatgcttttccctgcggattcctgtctcgcgtcaagtcgtcgcggatttcgccgttcccgccgcaacatcgccgctcgtcgttcccgcgttgcccgcttgaaaaagtttctgctcggtctgggcgtgctggacaaagaagctctcgacgagaactccgtctcctggccgtggctgctcgccgcacgcgttctcgcatccgacggtgcggagactctctcctggcaggagctttggagcgttctgcgttggtatgcgcacaatcgcggttacgacggcaacgccctttgggcgggagacgcaatcgatgcggaggagaccggcgacaacgaggattcgcaaaaagtcgaagccgcccgcgaactgatggcgcgttatggaaaaaacacgatggcggaaactttctgcgccgccctcggcctggatccgttcggagaaaaacgcgcttcacggatttatttcaaaggcaacaatgccgcgttcccgcgggagaccgtcgaaaatgaaattcgaaaaatcctgagggctcacgtcgggcgtcttcccggagtggacgacgccttcatcgacgttctgctgaaaaacgttccggaagaaatacgcgtttcgcaaaaacttccggcaagattttcttcccgaggcggtctgctcttggggcaatacgtcccgcgcttcgacaaccgcatcatcggcaagtgcaggatgaccgggaaaaacgtcccgctgaaaaactgcagggaataccttttctaccgttggggacggctgctgaacaatctgacggttttcgatgcctccggaaacattcggactctctccgccgaagagcggaaagcgttggacgccgagatgcgctccaagggatttctggacaaacggtctttgaatcttctgttgaagcaaatcacatgctgcgagcccgcgaacacggaaagcttctttctcattcccgaaatggaagaagcgctggttcttgatcccgtgaaaaagctggtctccaagaaaaactacctgaaagacttgtggccctgtttttcccgtcgcgggaaaaagattttcgcctcacggctggcccgcggcgaagttctgacgctcggagattgtatcgggaaaatggacgcgtggggagaatggcccgagaaatcgcgattcgacgccgttttcgagacgctgaagctcgcggaaaacaaaaagaagcccgaaaaacgaagaaatcttctcaaactgagaatcgccgccgaatttccgtccggacgcgcgagctactgcaaagaaattctccaaaaaacgtatgaggaagcgcttgaggcgaaggattcgacgcaaccgggcggttgtctctacgaaaccgaagaaatccgagaacggcttttgcgcggaagcgtttccgagacagagtcttccgggaacgaggaacgttggatcgcgtcgcagaccaacaaccacatggtcagacatcgcctgctgatattctctcgcctgttgcgggacatcgtcgccgaatacgcggacggagacattcgccgcgtgggcgacgtcgtggtcgaagtcgtcaaggaactgaaggaattttccggcatgagcgcccaagaaatcgcgacgaagctgaacgaaaaattcgcgaacttcaattccgtctccagaaagctcgaagcggccgcggaagaggcgggcgttcccgtgacgggatctctcatccgcaaggcgcgtctgctcgaagatcagaatttcacatgcccttacacgggaaagcagatttcctacaacgagcttttgagcggcgtgttggacatcgaacacatcattccgcgttcgttgcgcccgtccgacgcgctcagctcctgcgtgatgacgtttcgcgccgtcaacgacatgaaggggcagcgcacggccatgcagtttgtgaaggagttcgcagggaaagacgtgcccggaacaaaccttcagattctgccgatcaaggatttcgaagcctggacggaggcgcacaaaaggcaaaagctgcgcaaaggattttcgaaagaagaccagaaccgctgcagacgccgtgcagaacttttgctcttggaaaagtatgaggagcgcaacgccgatttcacggagcgggatctgacgcagacctctcacctgaacaagctcgcgattcgcctcgtgaagcgggagctcggcataaacgcccgccatcttgcgggagcgattacaggtttcgtcagaaaaaatctctgcatcgacgaatgtctcgtcgcggcggttccgcgtatgcagcgcgcggcgagagtcggcgagcacgatccacgaaagctgctgaaatccgaaatgcgggatttgtcgcatcttcatcacgcgatggacgccattacgcagggactgacgggggttcttttcaggacggaagactggaagctgcttgtgaaacgcagactgagcgagcgagaacggcgtttgctttcgacgaaatatccggacttgctgcgattttcctccgaaggcgaaatcgggatgaagccgttgccggatttgctgatgaaagccgtcgaggcacgtctcgccgaatgtcgcgtggtccggcacgttcccgcgaaaatgcatgggatgtccgtcgagcagacgacgtggagcatcgtgtcgccgtccgcggagaacggaaaagtggctctcgcgcagcatacgaccgacatgaagcaaggtcgctatgacgcgtccggaaaacgcttcgtgaaatgcgcgagcgaaaagccgtcgctgcttctcggattcgaaacgccggaaggaaaaccaggcaaactgaaaagtatcaagggcgtcgtgaagatttccgaaaactggggttgctcgcttgatccggagccgacagtgattccgcatttcaaagtgttcccgcgcctgcgggagctacggcgactcaacgcaggaaaaccgttgaggattctccgccgcggtcaactgatcgaagtgcttgccggaaaattcaagggcatctggatggttgtttccattaaagacaatcagggcggaatcgctctggatctgaatgttccggacaaaatcagagtcgaaaacaaaacgtctgactcaaaaatcaacgttcggctgaactcgttgattcgttccggattgaagattctcaaaccgcgcctcacgggagtcaagtgtcctatcatataatcacgatagaaagcccgacggcggaacttgattgtgttcacggacagttcgtctgcgtttcgccgacggggacgcgatcacttccgctcgacgacgtcggcgccgtcgtcgtctgctgtttttccgcgaaaatcgaaatgcggcttctgacggaagcggcgaggcgcggcatcggaatcatactttgtgaaacgttcaaacccgcgtgcatcgtgcttcccgcgattcgcagtaccgatacgttgcttacgcgcacttgggaaaaggcgaatccgaaattcttgaaggatctttggcaaaaaacgctcgacgccaaatgccataatcaatggcttttggcttccgtgtgggaaccccgttcatcggccgtcgccgcgatggaaattcaaaagttccaaagatttcgcgctcgagaaggaagcgtgagccgcctcttctggagcgtttttcggaaacatctgggagacgacgcctttttgcgttcccgcggaaagggcgagatcaactcgctgctggattacggttattccgtcctgcttgcccgagttctgcagctgtgctatgcctgcgggcttgaccccacgttcggaatcggacatgtcgtcgccgaacgatccacgcctctggcgtatgacctgatggagccgtttcgtccgctcgtggacgcacgagtgatgtcttggctgaaaagcgacgcgacgcaatttgaagtcggcaaggcctataaggcgcacctgctgcagtttcttcaggaaaggatttcctacgcgggaacactccaacaggcgcagaccgtcatggaaataagcatacattcgtttcggaaaagcctgttggagaaagacgcgtccttttatgagccatggattgccgtagattcaaaatgggctggatgctagtcatctttgatcttccggtaacgacgcctccacaaagaaagcgagccacggacttccgaaaatttcttttggaacagggatatctgatggttcaatattccgtctatgcgcgcgcgtgcgtaagctataatcgaatgcagacccagatgcgccgtctgaagctcagtgttcctccggagggacatgttcgggcgatttatgtgacgcaggctcaatgggaacgaatgtacatcgcccacggtcctccggatcgggaagagtctccggaggcctttcctgaacagctgcttttctggtgaaatattctttcggcaaaacagcgcgcccggaagccaagtatttatgcgggatccgagcttgctattttgccgaaagaactttgggaatcaaggcaaagcaacacgcgcatcacggcgttcgggacttcattttgccgaaagaactttg

SEQ ID NO: 3208 - DNA, 6660 bp, synthetic construct
  misc_feature 1..6660: note = Synthetic
  source 1..6660: mol_type = other DNA
gccaacgccgtcaacgcctatgccaaggcgggcgaaggcaacgccgccaaggtcgacaaactcatcaagaccgccctccagtactgcgacggcaacgaagacgccgccgccgtcgtcgccagccgcatcgacaccatcctcgtcaccaacaccgcgaccctccgcaccatcgaccaggtccgcgaacgcgtccaggccctcgccgccaactacgccgaactcaagaccctcgccaaggacgaccccgccctctacgaggccggcaagcgcatgatggccaccatgggcggcaagaccctgccccccggcatgatcggcaagctcgtcgtcgccgccgccaacgccaagatcgacgccatccgcaagctcggcccccgctccacgggcgccgacatccaccgcgccgtcacccagctgcgcgacaacctcgtgtcggccatggacgcgtccggcgccgagcaggaggcgggcggccccgacgaaaaaggcgcctgccgcaacttcctcgccgccgtcatgatgaaccgctgcggcagcgccctgcggaacatgcaaggcgccttcgggggcgaaaccgcctccaagctgatggcactctacctgtccatctcgaacggcgaacagaacgacgaagacctctcccaccaggcccggatcgaactcgagaaccagggcggctcgcacatgacgcacctgggcatcctgaaggatgccatcgacatggcggtcgacggccagcgcggcgcctccatcgacccctaccgggacgacttcgacgccgacaccatcgacggcccccaaatcctcgacaacctcatcaacctcgccacccgctgagcgggtgcaggggcggggtgcccgccatgacgagttggggggacggcggcggccgcggtggcggccgtgaccgtccccctctccatcttcccctcccccgaacgccgccgcattgccgtcgactgcgccacctccgctcccgtcgccccccgcccccgcccatggaagtcactcggcggccacgggctggagacggatgaaaccggccgggctgtctgggaaggggaaggtgatggcgtcggtgccgccggtgccgttgaccggtgcggagacctgagtccaaagcacaggcaatgcgaccaggttcgtgcagacggcgtaggcccaccggttggagagaatggaggcgtcgagggcgatttcaccgtcggacacggagacgttgccggggacgagccgcggcgggacctggaggggcgggacgggttggctttcatgggtgccgcagttcccgcactgccggacgcggaggccggggtgggccgcatccggggcgacgacggtctgccattcgccataggcgtggctgacgcctccggcctggctgagggcctcgccgagaagcaggcgcgcccgcactggccgtccccctcgcgaacgtgctggacgagcgcgccatcatggacttcccctgcgggcggcccattgcggaaaagcggctgcccactgggggcgcgggcgtcccgcccgcgtggtgcctggagagcggaaacaatcgaaaaagccaatgttttccgtaatctcacgccacatcccccctgggaggtgcggctttccagccgcgccctggcggatgaagaacgatcgggatgagggcggagagaatcgacatgaatctctcgaatgccgcttcgcggacacgaaaggcttggaaggaggaagaaatcaacattgagaaccatgaaacccgcttcgcggacagggaggcccggagagcggatggaaggccatcccggagcgcgcgcggaaagaaaaaagcgccctcaaggaggacgctggtaaaaggcttttctatctgacgtgacgctgacgcgcaggggtcaaatctgccttaattaactttgtcttgattccaattaagacggtgcctttttatcttgtttccaagcgcccgtcaagggtatgttttccgccgaaggaccgaacccccgttcaacccaaggaatcccgatgaaccccacggacacaaccgcgagacgcgacctcgttttcgccttcgacatcggccacagctccatcggctgggccgtcctccgggaaggcgcgaaatacgacctgggcgcgctccgggtcgtcgcggccgggacggtcctcttccagaaggattcctgcctggcctcccagcgccgcgcgaaccgccgcacgcgccgcaccatcgccgcccgccgcgcccgcgtggccaacctctcggcccatctcgaaaagctcggcgtcctcacctccgcccagctccgcgccaacaccacctccgccccctggctcctcgccgcccgcgtgctcgcctccggcggcgcccgcaagctcgcctggccggaactctgggccgtcctccgctggtacgcccacaaccgcggctacgacggcaacgccctctgggcgggcgacgaagccgcccccgccgacgaccccgaagcggcggaggacaccgaaaaggtcgaaaacgcccgcaagctcctcgaacagtacggcaaatcctccatggcggaaaccatgtgcgccttcctcggcctcgaccccctcgggcgcaagcaggcctcgacgcgctacttcaaggggcagaaggccgccttcccgcgcgacgtcgtcgtcgcggaagtccgccgcatcctcgaagcccacaagggcgtcctccccaaagtggacgacgcgctcgtcctcgccctcctcgaagccgcacccgaccccaagcgcaccttccgcggcggactcctcttcggccagaaggttccccgcttcgacaaccgcctcatcccccactgccgcatcacgggcaagaacacccccaacaaatcctcccgcgccttcctcctctaccgctggggccgcctcctgaacaacctcgtcgtgtacgacggatccacccgcgccgcccgcacgctgaccccggacgaacgccgcgccctccacgaaaaaatgctcgccgagggcttcttcgacaagcgctccctgaaccgcgccctccgcgaagtcaccggttgcgagccctacaacaccgaatcctatttcctcaccgaggaaatggaagaagccctcgtcctcgaccccgtcaagaaactcgtcgccacgaaccaaatcctcaaggccatctggccggtcctcccggaccatgccaaaacatgggcggaaaaccgcctccgcaagcggcgccccctcacggcggaagcgatcttcgacgagatgcgggcgcacggcgacgaccccgcgcccgcccgcgcggcccttgccgcgatccggggacgcggccgttcccgctcccgcgccgccgtcgcgcccgaaaagaaacaccttgccgcctccttcccctccggccgcgccgcctacgcctcgcccatcctcctcaaggccttcgggcaatgcctcgacggcatcgaccccgcgtcccccgaaggctgcctctacgagacccccgaaatccgcgggcgcctcctcgccgaagccggcaacatcgaccatcttaccaacaaccacctcgtccgccaccgcctgcgcatcttccgccgtctcctcggccagatgctcgacgaattcgccggcggcgacaagaccagcgtcggcagcgtcgtcgtcgaagtcgtccgcgaactccagaccttctccggcctcgacagcgtagccatggcgaagaaactcaaacaacaactcggaaacttccgatcggtcgccaaggaactggaaaaggaagccgccgccgcaggcgtcctcgtcaccggttcacttctccgcaaggcccgcatccttgtcgaccaaggcttccgctgtccctacacgggcgtgaaacttgagtgggaccatctcttcaccggccaactcgaaatcgaacacatcatcccccgctccctccgcccctccgacgccctttcctcctgcgtcctcaccttccggtcggtcaacgacatgaagggtcaacgcaccgccgcccaattcatcaaggagtgccaaggtcaatccatccccgacatcgaccggcccgaactccgcgtcctcgcacaggaacgctacaggaaaaacgtggatgccatcaaaaagcccgcgaaaaaatacagcccgtccaaggatgacttcaagcgctgccgccgccgcgccgaactcctcctcctcgaaagctacgaccagcggaacgccgacttcaccgaccgcgacctcacccaaacctcccacctcaacaaactcgccatccgcctcgtccggcacgacctcggcatcgacgccatccacgtacccggctccgtcaccggattcctccgccccaagttctccctcgactcctgcctctccgccgccgtgccccgcatccaggcggagcagaagaagcgccgcgcccaggccgccgaacgcctcggcatccgcctcggcgaaggcgaactccccgaagacgctgaagaacgcctcacctccgcctcccgcctcgtcaaacaggaaatccgcgacctcacccacctccaccacgccatggatgccgtcacccaggccctttcctacctcctcttcgaccccgccgactggaaaatcctcctcaagcgccacatccccgaacgcgaccgcctgcgcctccaggccaaataccccatcctcgccttctcccgggacggcgacttgtccatcccggccatcccgcccgccctcctccaatccgccgtccaggcgttggaacaaaagcgcgtcgtccagcacgttccctcccgcatgcacggcatctctgtcgagcaaaccacctggcgcatcctcgacgcctcgaacccggatcaaatcaaactcgaccagcagaggcgagatgaacggaccggccttcctacgcggaaaaaagctgaagaaaaagcctctcgcctcctcggcggacctttcgctcccgacaattccaagctcaaggccatcaagggtgcagttacaatcaaaaacaactggggccttgctctcgacccggttccaaccatcatccccttcttcaaagtcttttcccgcatccgtgaactccgccgtcaaaaccagaatcgccccatccgcatcattcgaagaggtactcttttgcgcatagaacgtggaaattatgctgggacatggagagtgttgtctccaaaatcgacgcaagattatggattgtgccttgatcttgtgaacacggacaatcccaaagatagcaatgcgcgtttcccggattttcgtggaaatgccaagatagaaaaattgttgcaaggaggcttgaccattctcaagcccaccctgacgggttcatgtcctaccacgtagtcaccatcgacagccctaccgcgcacctcaactgcgtcaacgggcagttcgtgtgtaccaccgacgaggggcagaagtccctgcccctcgaagacatcgcggccatcatcgtctgctgtttctccgaataacatgcgccgcctcaagggcgtcattcccccggaaggccatgtccgcgccctctacgtcacccaagcccagtgggaccacatgttcgtcgtccacggcccgccggaaaaggagcggcccggggaaaaaatccccggacaactcctcttctggtagcccgcggccacggccgtcaagccgcttttgctattttgccatgcgcataattggaatcaaggcaaagcactaccacgaaaagcaaaacgccatttcggattttgccatgcgcataattggaatcaaggcaaagctaccagcggcccggcctggcgtgcccgctattttgccatgcgcataattggaatcaaggcaaagcccccgcgggggcttccttgggcgctgccggattttgccatgcgcataattggaatcaaggcaaagctcgaccccaggcgctacgtcgccccgacaattttgccatgcgcataattggaatcaaggcaaagcaggaaaacgaaatgaccacaaccgtctacgattttgccatgcgcataattggaatcaaggcaaagcgtccacgatctgctgcatgtgcgccttctattttgccatgcgcataattggaatcaaggcaaagccttgcggatcacgtccggctgctcttcgcattttgccatgcgcataattggaatcaaggcaaagcgcgcaaggtatccgcttggaaatacccgcattttgccatgcgcataattggaatcaaagcaaagccagacgcacactccaagccgcagaaatcgtgccccttgtctgcccatactccgcggcatcgcgcgacacctttccaatccttttcggacgttgcggactttgcgtgagccattcacccgctctccatccgccatggcgcggcaggatgccgcacccccggaagtggagtccatggctggcgcgagattacagaaagcattggaattttcgcttgttttccgctttccagacgccccgcgggcgggacgcccgcgccccgactgtccagtcgctcccctccctctttccatgtccgcgaagcggttttcatgcttttcaatgttggcattcctcccgctctccaactgccccttttgtttcctttttgtccttttgtgcaaaattctccccctccaagccctccgcgcctccgcgcctccgcgtgagttctaccctcccgctctccatccgctgtggcgcagtgaccagtgaatagtgacaagt

SEQ ID NO: 3209 - DNA, 23471 bp, synthetic construct
  source 1..23471: mol_type = other DNA
  misc_feature 1..23471: note = Synthetic
catacttgtgtcttatagataaaaaagggcgaatcgggatagtccgatttcgcccaagagtgattataaactgattattttgcaattaccgacatcacgaaaccgccaccaggagcctcaaccatcttgattttgtcgccttgtttcacggttttctttgtgatgacgtatgccttcggattggtttcgtagtgagcgtccttggcatcggcgtagatagtacattcatatttacggcctttttcaaggaagtcgaagttcacggtcaccttgtggccgttttcgttgcacttgccacccacaaaccagttgtcggtgccttttgccttacgagccacggtgatgtatgcgcccggctctgcatcgatgtagcgagaatcgtcccagtcgatggccatgtcgcggataaactgcatagcgtcgtcgaacttggcgtagttctctgggaggtcggcagccatttgcagtggtccccacatcaccatatacactgcgagctgacccacgagtgtggtgtgaaccttgtgggtattctggctccatgtgctgaggtcggtctcgaagataccaggggtgtagtccattgggccaccttgcaggcgtgtgaatggcaataccacggtgtggtcgggcttgctgccgctgaatgcctcatattcggtaccgcgtgcgctttcgttgcccacgaggttaggataggtgcgagccaagccggtagggcgtgtggcttcgtgtgcattcaccatgatgcggtgcttggcagcctcggtcacgcagcgcaagtagtggttgttcatatattgaccgtagtggtgctcgccacgtggaatgatgtcgcccacatagccgctcttcactgcatcgtagccatatttgttcatcaatgagtaagcgtcttccatgtagcgctcgtagttggtgaccgatgaactggtttcgtggtgcatcatcagtcgcacgcccttgctgtgcgcatattcgttgagtgccttgatgtcgaagtcggggtaaggggtctggaagtcgaacacgtcgtatttccaacggtttgcccagtcttcccaaccaatattccatccttccaccagcacctcgtcgaggttgttggctgcggcgaagtcgatgtaacgcatcacgtctttggtgtttgccaagtggcgaccgttaggtttgcacttggagaagtcggtttcgcccaagcgcactgatggcagctcgtcggtgtagttccaactgctacggcccacaatcatttcccaccacacgccattgtacttggtggggtgaatccatgaggtgtcttcaatcttgcatggctcgttgaggttatagatgaggtacgatgagagcatagtgcgcgcgtcgtcgctcaccatcacggtacgccaaggggtgttgcatggggtttgcatatagcacatgttgccgacagcgtcgggagtgagccatgattcaaacaccatgttcttgtcgtcaagattgaggtgcatggtagcgtagttgatacatgctgcctcgtggatattgatgtagagtccgtcgtcggtcttcatctggagcgaggtctgaacgccagtttccgagaatacggatgttgacgagttgccggtcacagcatcgagcattccattgctcttcacgcctttggggcggttgaggcacttgctcatggtgccgcgaatttctgaaaggcgggtggtttgaccgggattctcctgggtgtcgtagtcgcccgcaatccaccatgccatgtggtcgcccgtcatggcaaactggctgttttcttgcttgatgatgaagtagttgagttttttttgctgtggaaattcgtagcggaagcccataccttcatcatacacacggaatcgaatcaccattttgcgattcatcttggtctggtcgagtgtaaccgccatttcgttgtagtggttacgcacgttcttgtattgtccccaaactggtgtccaagtttcgtcgaaagtggaggtttgggtgtcggcaatggtgaagccgtcgagcaggtcttgctctttcttgccattgctcgcatgcttgtcttttgccaatgtgaggcccaagtgactgggcttacacactgtcttgcccttgtaggtgagggtgtaggtgggtttgctgttgtcgaggtaaaacttcaccaccacattgccgtcaggcgacttcacttcctgagccacagcaccgaatggagccagtgccacagccagcagaagcattaatgatgcaatttttttcattttcgtccgctattagtaattaatttggtcattttctcgttgaattccttgcatgccatgagttggttaatggtcatgtgcatacggtagcgccagtagtggcgtggattagcaggaatgttgatgcgctcggcatcagggtcggccaagcgtatggtctcgtcgatggagagccagtcttggagcgagagcatgcacagcatagatgggctgttgaggtggttcaccaccacttgctctgccacgtcgctgggcagcgggtgtggagcgggtccttgcttccagagcacggcgttgtagtattcctgcgtgaggtcgcggtcttcgtcccaccattggcgaagggtgggcatgtcgtgggtgaatatggtgcttacggagcgatatgggttcttggcaagcacgccaaacttcacgttcacatctttaggcatcgtctggatttcgaggctgagaatgcggagttggttgataacccatggcacacaatcgggcaccatgccgaggtcttcggcacacacgagcatacgggtggcttccacaaggcgtggaagtttcttcattgcctcaccataccagaagtcgttgttgcgacgatagaagtagtcgttgtagaggcggttaaaggcttccttatctgattgccagagggcttcgtaaatgaagtcgtgctgcacggagatgcgtgggtggaacttgttggcgtctttgcggtcgcgcaggaagagcacatcgctcaccagcgacatcagtgcctctgccacgttcttgccgtcttggtcggcatctttaaatgccgcctcaatcttgcgttgggtgtcgtattcgggtttgaggcgatacatgtcgtcgtgggtggggagcaggtatttctcgcggatttccgatgcgcgctcaccgaatgtgcgttcaagcacccagtcggtgatgaaaggttcgagcatatagtcttggaaattgaagccgtagcctgcaatttcctcgcgtgtcataccaagggctggcgagaactggccgagtatgccatacacggcatcaatcggaatttcccaaatgcggaagaagcccaacacgtggtcgatgcggtaggcgtcgaaatactgcgccatcttgctgaagcgcttttcccaccacaagcagccgtcggccatcatttcttcccagttgtaggtggggaatccccagttctgaccgttggcggagaacgcatcgggtggtgcgccagcctggccgttgaggttgaaatagcgtggctctacccatgcctccacaccgtcgcggctgacgccgattggaatgtcgcctttgaggattacgcctttcttgcgtgcatattcgtgcgcgcctcgcatttgctggtcgaggataaactgcacgaagtaccagaacgccactttcttgtattcgcttgtgcggctgtttgccatcgcctcacgctcgctttcatcgaaggtgtggtggtcgggccagtcgccgaatgtggctgtgccgtaaaggtcgcggtagtggcagaatgccgcataaggcacgagccagtctttattgttgtcgaagaatgtcttaaacgccttggtgcgcatcatctttgcgccgtcttgctcaaagagctcacgcagatagcctcgcttggcggcattcactcgctcatagtcgatttgagggagcgcgttgagttcgtgttggagtgcggcgtaatagcgcgcgcgctctttgtcctcaagttgtggaagctggcgaatatcgacgaacattgggtgcagcgcatagatgctgatgctcttgtagggataggagtccaaccatgtgttggtgatggttgtatcattaatcgggagcacttgaagcgcacgctgaccggtggaaaccacccagtcgaccatctctttgaggtcgccgaagtcgcccacaccgaaactgccttcgctgcggagcgagaaaacaggtatcacggtgccagccacacgccagtcgggcaggtcgaatttcgcttcgttgagctcgtaaaccactgcgtcgcccttcttcagctcaggcaacaccacggtgcggttgttgccttcttcccacaccactttggtggtgtcggacttatctactgccacaaacttaaactccagcacgcgtgaactgagcatggcggcatcgattgaagccacccactcgttgtgggcgtgttccaccatcgcggtggctttgttcactgcccagttgccgagcgcatcgccattgcccaccacggcaagcctttggttggaaccgagttggggcgcacgcaccttcagcatcacggtgtagccgtaggtggtggcaggagccacaaggaactcacggtgcgcacaacattctgtgaacgccgaactgtagagataactgttttcgggattgtcgatccagtggtcgaaagtggtgattttagccgacttagtggcagagaggtcgaggcggtgtgcctgtacgagccactcacaacgcaccacatcgccagcacgctccacgctgtagtagtagtcgagcgcattagccgaatcggcggcggtagtgatttcgcaactccagttacgaccatctacggtgcccatggaatatcgcttcgcagtgccgtcggagagcacattgagcacgatttcttcaccaaaaatcgtttgatattcaattacgaatgtcaatttcattttatatgaggttttttatttgattttcaagtatcttacaagtattgttaatatcttacaagtattgttaagccctgtgtatttaagcttttttctctgcgtaaaattactaaatcaaacttttatcaccacctccccacattaaatatagcaaatttatttatgcaatcgtttgcatcccccttcccacaacccccacaccaatcccccaccccacaaaaatcacgcactacattttataccacgccccacaaaaagggcgcaactatcgcctatacccacgccctttctaccaaaaaaaacacagaaagggcgcaactatcgcttatacctacgccctttctaccaaaaaaaccacagaaagggcgcaactatcgcctatacctacgccctttctgccaaaaaaaccacagaaagggcgcaactatcggaacatggaacaataattcgtgaaaatttgtgctaattcgtggctaaaaacaacgaacacggacagcacgaatcacgcagattttttgttgaatccatgtaataatttcaatcacaaattagcacaaataattcttcgtcgaatcctttgaaaatacgataatatttgtgtaactttgctatggcataaaatatgcagcataaattatgctacacaatttatgctataacgaaatttgtatgattatgaaacacgaaaactatccgtataacccttttctgctgtcgggctatgtgtcgcctgaatatttctgcgaccgtgtggaagaaacccaaaaactcatttccgccctgagaaatgggcgaaatgtgacgcttatcagccctcgccgtatgggaaaaacggggcttctgcgccatgctttccacgaaatccaaagcgcaaaggctggcaactgctactatgtggacctgtaccaaaccgatagtctgccgtcgctggtgaagaagttgggcgaggccgtgctcggcactttagacacttcggaaacaaaggtggtgaagcaaatcagcgaattttttgcatcgctacgccccgtattcagtttcgacgctatcagtggcgagcccaacattatgcttgatgtgcaaccagtgaacgctgaaaaatcgctctccgaaattttcgcctatatggaagattcggggaagcagtgctatgtggcgttcgatgagtttcaggtggtggacggctatgccgacaagcaggtggaggcattgcttcgcgcccacattcagcacctgaacaatgtgcggttcgtgttctctggaagccaacgccatgtgcttgaaaatatgtttgtctctgccaaccgcccatttttccaaagcacgcaaatcatgaatcttggatgcatcaacgaagcggcatactacgaatttgcccacaaaaaactggagcagaatggtcaaatcctaaacagcaccgccttcaatcatctttacagttctttgtttggccacacctggtatgtgcagatgattctcaaccgcttatttgaaacctcacaaaaggaaatcaccgaagagtttgtcgatgccactattgcaaatgtgattgccgaaaacgaggctacatatcaaactttcgtccgcctcatcacgccagcccaacgcaaactgctccgtgcagtggcaagcgaaggcacggccagagaaatcacagggaaaaactttgtggcgaaatatcaacttggggccatcagcaccatacgcctcagcacaaaaaccctcgtagagaaagaactcctactggaccaaaacaaccactacgaagtttacgaccgcttcttcggcatctggctaaaataatcgcctatacccacgccctttctacctaaaaatccacagaaagggcgcaactatcggaacatggaaaaataattcgtgataatttgtgctaatttgtggatgattgaaaaccacgaatcccacgaatttcacgaatcatttttttcctgaatccgtgcgaatattcttgttgaatcggttgaatcggtgtgagccccaaaaacacccacaaaagcgaaatccgtgtgagcctaaaatgcccaccaacctccgtgagatttcccaccctcaaaagcaaaacctgtgagatcatctgtgggagccgtgtgagcccaaatcccacccacaaaagcgagatccgtgtgagccaagccgcccacgcccacaaaagcgggattcgtgtgaagaaaaaggctccgaaggtggggtgggtaccacttccttcggagcctttccttgaaaaaaactattgctatctcttatggtttctttgttttgatgataaacacaaaggcagcggctatcacaaggtaaacacctgccaaagtgagcatattaggctgtgaactgcccacaaggtgcatcacgaaaccaccggtggcggctgccgcaatctgtggcaaacagatggtgcagttaaacaagccaagcacggtgcccatgcgtgaactgccctcaaatgcgttggtcacgaaggtgaacggcatggcgagcatcgctgcccatgcgcaaccaatcaggaagtaaggcacaaacagcatatactggttggtgcagtatggcacaagggcgaagcccacagcgccaatcaccaaactgagcgcgtaagccagttttgggctcttgaacataggaagcaccactgcccaaatcacgctgcccactgcctgaacggcgaaaatcacgcccacccagttgccagctgcctgataggcgtggcttgcggtgtcgctggtctgccatacggtttcggcgatggagccgttggtgtaggtccacatatagaggaacgctgcccagcagaagaattgcaccacgcccacttggaagaacaccttccatgcgccttctggctctttcttcgaagccttgccatcggaggcttcctcgttcttaatctgatattgcgcaaattcttcgggtggcatttctcgcacattcatcatagtgtaaaccacacatagaataaggattgcggcaccaatatagaacgaccaaatcaccgatggtggcacttgcccctttggagcaatatttgaaataccgatggcggtaaacagcagcgggaacacatagcccacgatagaaccggcgttgcacaaaaacgactgaatgctatacgccttggttttctgcttttcgttcacgaggtcgcccaccatcatcttgaagggctgcatcgccatgttgatgctggtgtcgaggaacatgagggctatcaagccaaacaccatcgctccactcactgccaatccaaacgatccggcgttggggagcaaacacatcacgagcactgccacaaacgcacccacaaacaggtaaggaatgcggcggccgaagcggcaccatgttttatcactgaaatagcccacgagaggctgaacgagcatacccatgagtggtggaagaatccagaagaaactcaaatcgtgtgggtcggctccgagggtggcgaagatgcggctgatgttggcactctgaagtgcatacgcaatctgcaccccgaaaaatccgaaactgatgttaaacagtttcgcaaaactcaaatcaggttttgttttaagcatatatctttatggttttgaagttacttagttgagaatctgaacacaatgatttgggcatactgctcacccttgtcgagcacttggctggggaagttggcgtggttgggcgcgtcgggcataccctggcactcgattgccacaccgtcgtagtcaaggtaggtgcggttgccgctcttggtggctgggcaaccattcagccagttgccggtgtagatttgcaccgctggctgtgtggtgagcacttcaagcgtgcggccgctcacctcgtcggtcagcacggcggcaagcgccatctcgccctttttgtagccgtcaatcacatagcagttgtcatagcccttgccgaaagccagcgcggcaaacggcttgcgaatatcctcgcccaaggttttcgccttggtgaagtccatcggtgtgccagccacaggagccatttcgccagtgggcgtaaggttttcgtcggtcaccagatatttcgagcagttgagttgcagttgctcatcaagcaccgagcccgacgcctcgccacggaggttgaaataagtgtgattggtgaggttgattacggtcttacggtcggtggtggcactgatgcacaggcgaagctcacaatcgtcgctccaagtgtattcagccctcaccgtaagcgtgccgggataaccagcgtcgccgtcggggctcaccagcgtaaacaccacgccttgcgccgtagcctcactgttccaaatcttattgtagaagccctcgctaccgccgtgcagcgcgttagggccattgttgatttcaagttgatattccacgccatcgagagtgaacttaccgccagcaatgcggttggcgtagcgaccggggattttgcccatgcaagggccatcgctgatatattgcgcggcatcggcataacccagagccacatcagccatattcccctcgcggtcaggcaccacgatagagagaatgccagcgccgagagccgatagtttcaccgaagccccagcagcgttggtaagtgtatagatggcgatttcgcccctttccgaggcagccacacattgagtaatcttcatgcgtttatgtagttttagaagctaatttactgaccacaaatatacaaacaaatccccaccgcctccaacactccctccccccctaccccaaaaaaatcaatgcaaacgattgcaccccccaccccctaccctcaccctcacacagattcaaccgattcaacaaaaaatccgtgcaaatccgtgcaatccgtgttcgctccccctcttccaacaaattatcacaaagcatattattatacatatataaaaaaaagcgagaacgaataatcgctcccactttaaatgttttcacaacggaataatccttattgtgaatcgcttcagattttgtattggcaaatttatggtattttttaatgaaaaacaaaaaaacatgaacaaatgtgctattattagttttttttcggtaaatttgggaaaaatatcaaaaaaccacaattatgaattactttttaggacttgatttgggctctggtagcattggctgggctgtaattgaaaaacaaaacggaataccagttagaatcattgctttgggaagtagaattgtacctctcacccctaatgaatcagacaacttctctcaaggaaaagcagtatccatcaaccagcaacgcacgcaaaaacgcacagcacgaaaaactcttgaccgataccagatgcggcgtgcgcttctgtgcgaaacgctgaccgacaacgacatgaatcccactcatgaacttatgtgtgcttcaaaagaagaactttggaaaatgcgctccgatgctgcaactcaacaaatttctttaaaggaaataggccgcgtgctctaccacatcaaccaaaagcgagggttcaagcttgccaagaatgaggcatcaagcaccgatacaactgaacaaacttacattcaaagcattaatcaacgctgcgcagccattgctggcatcactatcgggcaatacatctatagcgaactcatcaaaaatcctgaatttagataccgccagctcgtttactcacgagaaaaatacattgaagaatatgacaccattatgaagtgccaacagcaattctaccctgatgtgctgacagatgaattgatttccaaaatacgtaatgaaatcatcttttatcagcgcaaactcaaatcgtgcaagcatttagttagttattgcaatatggaattgcatgaaattaaggttgcggacggaagaattgtgatttcaggaccaaaaacagcgccaaaatcatctcctcttgcacaagtatgcaaagtgtgggagtctatcaacaatattgtgctttgtaataaaaaaggtgacactttcagcatttcagatgagcagcgcatggctattttccaatttatggaaagaaacgaaaaactgaaagtcaccaatctttacaaaattcttggtatctcaaaaaaagacggatggtggggaggaaaagcaatcggtacaggattgcagggagacaccacacgaataaaaatcgaaaaagcgcttaatgggaaatatccacatctgcttaaattcaacattgacaactcgggaaaatgcgtaaataaagatacaggagaagaacttccttgcgtcaaagacaccgcatttaacgagcccctgtttaagttatggcacaccctctactccattagcgatattgaagaactgaaggccgcattacgcaagaattttaacatcaccgacgaatacgtgttagacaacctttcttcaattgattttgtaaaagaaggttatgccaacaaaagtcataagtatatgcgaaaaattctccctcaacttcaaaaaggtgtgatgtatgcccacgcatgtgaaattgttgggagcagcaactgtagcgattataaagccacgaaaagagccaacaacggagcgcttctgctatcgcctatcgctaaaggcgaactccgacaaccagtagtggaaaaagtgctcaaccaaatggtgaacgtggtgaatgcacttattgaaaaatatggagaatttgaagaaatacgggtggagctcgctcgcgacctcaagcaaaaccgcgaagagcgtaatgaagattataaacgcatgaccactcaaaacaaaaaaaacttggaaattgcaaagcgcattcaacaagagtataaactctatcccactaaagcaagaatcagaaaataccgcatgtgggaagaaacagaacatcgctgcatttattgtggcgcacctgttagcatcaaggaatttctttcaggaatagatgcagagaaggagcatattattcctcgttcacttttattcaacgacagtttctccaacaccacttgtgcttgcagaagttgcaatcatgacaaaggacaaatgaccggctttgactatgccgaatcaaaaggaaaagccttctttgatgattacatcaaccgcattaacaaactggctgacaaaaaagaaatctcacgttctaaattcaagaacctcaccaccaaacgtgaagacattccccaagattttattgaacgacagctccgcgaaacgcaatacatttcacgaaaagctgtagaaatgctccaatcactgtatgccgacaaaccatctggcaaattatatgtgaagacttctggtggcatcatcaccgacttcttgcgccaccagtgggggtgggacaccgtgctccaccaaagcaatttcaagcgatttgaaaaagccggattgatagaaaatgtgcctgttatcaccaaaggtgaaaaacactttgaaaagcgaatcattggttggaataagcgaattgataaccgacaccacgctatcgacgctcttactgtggcatgtacccaacaaagccatattcagcgcctcaacactttaaacgcaaataaagaagcattcaccaaactcgatgccaccaccaacgaaggctatcgtgcctttatcaagcgtgttgcacaggaagctcctttcaccactgccgaagttcttgaagccgctgacaatattattgtgtcattcaaacccatcacaaaatccacgacacctggtaaacgaaaagttttcaaaaacggaaagccaataatcaagcaaacaggaattcttgtgcctcgtggagaattgaccgaagaaactgtttatggcttgatacaacgatatgatggcaaaggtggttttaatgcctgtagtgttgtgcgctatccactatctaaaatcacatcgcaagcagttgctgactcaattgttgatgaaggcataaaacaaattgtaaaaaagcgactgaaagaacacaacgacaacgccaaaatagctttttccacaccactttatagcgatgtggcgcaaaccaaagaaatcaaaggcgttagatgttttagcggtcatccaagggcgtctcttgccatagtcaagcgtgatgaaaatggcaaaccaataggcttttcacctacaggaaacaatcacaatgtggctttttatctcaacgaaaatggcaaaccagttgaactggtatgctcattttatcacgccattcaacgtcgcctttttaatattcctactataattgagaatccatcagaagtatgggatttaattgaaacaagtggcaaagagtattcagaagaattcttgtcacaattgccgaatccaaaatggacatttgctttctccctacaaagaaacgagatggtgattatcggcttaactaaaaatgatttcgaatatgccctacaaaatggtgataaaaaaactcttgcacagcatttatataaagtgcaaagtatatctcacaatagttattgcttcacacggcacaccgaaacaaaatacgataaaaaacataccaacaaagccgatgagcgttttatgcgatacgcatcagcgtcttctttgttgcgagatttcactgcaaaagtttcaattaatgtgattggtgatataatagaaaaatgattaagcgaaccatatattttggcaatcccgcatatttgagtacccacaacaaacaacttgttgtgcgattacccgaagtggagaaatgcgatagcctatcagaggtgtcaaaaaggaaagcgacagccactattcccattgaggatattggcgtagttgtgcttgaccataaacaaatcaccatatctcatgggctaattaatcatttgcttgccaacaactgtgcgcttatctcctgcgacgatagtcacatgcccacaggtttaatccttccattggatggtaactccattcaaagcgaacgcttttatcagcaaatcaacatgtcgctacccctaaaaaagcaactatggcaacaaaccattcaagcgaaaatttccaatcaacgaactgttttgcaacgatatagaaaagatgtaaaaatcgggaatatgcgcaaatgggaatgtgaagtaagaagtggcgacgcaatgaatttggaagcaagagctgcagcttactattggaaaaacgttttcccatcaatacccggatttgtgcgtggtagagacgaagcccctccaaatcagcttctcaactatggttatgccattttaagggcagtcattgcacgggcactggttggggctgggctattacccactttgggcattcatcaccataaccgatacaatgcttattgccttgccgacgacatcatggaaccttaccgaccctatatcgatgaaatggttatcaacatggtggataataaaaactacgactccctttccacaaaacataaacaagagtttctgcaacttcctgtaaaagaagtggtcataaatggaaagcgtagcccacttatgattgccgctcacactactgccgtatcacttcaaaagtgtattgctggcgaaacaaggaaaattgcataccctaccatgtgaactatggaccgttttagcgaatacagaatgatgtgggtacttgttttcttcgatcttcctaccgacacaaaaaaagagcgaaaagcctatgcacaatttcgtaaaacgttgatgcaagacgggtttactatgttccaattctccatttatatacggcattgtccaagtcatgaaaatgcccaagttcacatcaaacgcgtaaaatctgctcttccagaattaggggatgttggcatcttatgcattacagacaagcaatttagcaatatagaaatcttttctgctgcaaaaatgcaagaaacattaaaaactccactccaactaactctattttaaacacgaagtctttttaataaagaaatccgacatatttctgccggatttctttatttttagatactttttttatttgcaaatctatttttaaaactctatctatcagagaaataaaaacaatctgttgtatctaattacaaaattacaaaatctgaaagctattcacaactagggaaaaggataatattctgcaagaagtgttgtatctaattacaaaattacaaaatctgaaagctattcacaacacttgaagttgataactatttgttcaatcggttgtatctaattacaaaattacaaaatctgaaagctattcacaacgaggtctcacttgatgtggttgtgttatgcgttgtatctaattacaaaattacaaaatctgaaagctattcacaaccaattcgggacagcgaatttgcgtaactcggttgtatctaattacaaaattacaaaatctgaaagctattcacaacaaccactgtaacaatcgcagtcgccaacaggttgtatctaattacaaaattacaaaatctgaaagctattcacaaccggggtcggacaaatgcttgttggtgctggttgtatctaattacaaaattacaaaatctgaaagctattcacaactcactttcagttgcaatccgcgcatatattgttgtatctaattacaaaattacaaaatctgaaagctattcacaacgaatcggatagagtaaagcaaagcgggcttgttgtatctaattacaaaattacaaaatctgaaagctattcacaacttctttaacgcgatgccgcattcaatcatcgttgtatctaattacaaaattacaaaatctgaaagctattcacaacgagttcccccctggtataaatggacgtttgttgtatctaattacaaaattacaaaatctgaaagctattcacaacaggaaatggcattgtaccgggaacaattcggttgtatctaattacaaaattacaaaatctgaaagctattcacaaccccagtcacacagcttggtcagcgaaatctgttgtatctaattacaaaattacaaaatctgaaagctattcacaactgtattgaccggagaatgtacctcgctcaagttgtatctaattacaaaattacaaaatctgaaagctattcacaacaacccacgaatgaagaagggcgacggctcggttgtatctaattacaaaattacaaaatctgaaagctattcacaacagcagttattatggctgtgtagcaaccttggttgtatctaattacaaaattacaaaatctgaaagctattcacaacagtcgcaaaaggataatctcgacgaacgtagttgtatctaattacaaaattacaaaatctgaaagctattcacaacgtcgttggccgctcttaccggcttggctttgttgtatctaattacaaaattacaaaatctgaaagctattcacaacatctctggcatcgctccgaggaaggtgtaggttgtatctaattacaaaattacaaaatctgaaagctattcacaactttatggcgttcggctcaatctcactccagttgtatctaattacaaaattacaaaatctgaaagctattcacaacctacgcagatgtaggatgatgtaaacctacgttgtatctaattacaaaattacaaaatctgaaagctattcacaacgacgacttcgccgatgtggagcacagaatcggttgtatctaattacaaaattacaaaatctgaaagctattcacaacatacggcttccagctcttcacggctcttcagttgtatctaattacaaaattacaaaatctgaaagctattcacaacctccaccgtgtcggtgaacttcgtcatctcgttgtatctaattacaaaattacaaaatctgaaagctattcacaatattgaatgtataaattctaatttctctattgaataagggtggggagtagcggattgggagaggatgataaatctgccacaaattttcacaaattaattttgttgaatctgttgattctgtgtgagcctaaacagaataagtgggggaagtggggattagaggttgaggaggttgcggagaatccaccagaggatgacgatgatggcggcgatgacggtgacgatggtggagttgaggcgcgagtagaagcgtgggaagtgaccgcgccaatagcggttggtcaggagcagggcgatgaacggaagactgaacacgagcagggcattgtagcgaatggctgccagcacgtcggcgtggagcagggcgtgaatggcgcgttgcgagccacagccggggcatttaaaacctgtgagggcatagaatgcgcacttgggaaagaggcgtgtggtggtggggtcgaacacgaaatacaccaccgccattactgccagcgccactgcgatgacaatgaatgtgattttcttgttgatgggcattcgcatggcctacagcataagcatggagaatggcataaacagaatggagagcaccaccgacagtatgcagagccacgctccccattcgctgtatttttgggctttcgcgtactcgccagcactatatttgtttttggtcatcactgccagcactatcgccaccactgccaatggcgtgcagcacaacacggcgcacacgatggctgccacgaggttggtgggcggacattcgggcgcgggggcttgcatcggctgcatttgagggggcatttgtggcacaaatggcggcacttgcacctctggttccacgtattcgggtggcacaggagcagcagcctgttcttcggctggggcttcgtgcggctcttcagtaatggcatcggcttcaatcggctctactgcgctttcttgtggcgcggcaggctctggcgcagcggtcaggtgtgccaattcggggattttgtcgattcgcttccatccgtccatacctttgtgccaaacgtaggtgtgcgccttgtcaagcgccatagattccagttgttcgatggtgtgtggtccgctttgggtgccattctgattgatccaatactgaagattctcgctcatagtcaattattttaagcaaagttactcattttcaccaaaacaacaaataagatggaagaaattagaagttagaaattagaaattagaaattagaagttagaaattagaagttaaggagttaagaagttgaagaagttaagacgatagttccgatagttcagagcgctcagagtactctgagtgctccgataacaagaaacgaaaacaccgatttaatccattcaatcctatttacacctaaaaaatagactaaaaggattaaatctgtgttttttagtctacgtaaacgcccactaatgtggatttatttattaaggctgttgatatccatcaagaaatcaactaatcccatcgttaatatgccgttctcgtcacgccatggattgatattgtccttcacaacgattatttttttaaacgaatcgttgattttaagtaatgatgccatttcttgtgcgcgcttttccttatcgggcaacgccaatgccgattggatatagtatttttggttgccttcattcaccacaaagtccacctcaagttgtttgcgttgccatttgccttcaccatccacaaaacgttgctctaccattcccacatccactttacagcctcggcgacgcaactcattgtagatgatattttccataatatgggtttcttcctgttgacgtagtcctaaaatggcattacggagaccaaggtcgcaaaaataatacttggaaagcgaacctatatacctctttcctttcacatcaaacctatcagccttttctatcaagaaagcatcttccatatagccgaggtagcggtcgatggtggtggaattgattgccacctttttcacgctcttaaatgtgttcgacaatttcgttggattagttggtgctcctattccagaagcgataatgtgaaccagttcagcaaattctgcttcgtttttgatatggtttcgctcaataatgtcaatcagatacacactatcaaaaagattacttagatagtcgagtttcttcttttccgtttcgagcgataacacgtgtggcagaccaccgtaagtataatagtcattccatgcctcagtgggtgattgccctgcgccctcacagtattccgacaaggaaagaggataaaggcggatttcatcgccacgacctcgaaattcggtaacaatatcgcttgacaggaattttgaattactgcctgtgacatatacatctgcattatcaatgcgcagaaggctgttaagaacatcttcaaagcggggaacgagttgcacctcatcaagcagtatgtaatactggttgctgtcggtcattttgcctttcacatgcctgtaaagagagagtggctcacgcaaatcttgactttcaatatcatcaagggcaatttgaatgatgtgactttcggcaacaccgctttctaacaggtgctgtcggaacaatttaaacagaagatacgacttgccacaacgcctaattcctgtgacaattttaatcaatccgttttgtttcccatcaatgagctgctgtaaataaaaccgtcgttgtatctgcataactatatcctacgaagaatttttggcaatattgccactttttcttcgcaaatatacccatttttatcggtttccccttatttcagaaagaatttttggcaatattgccactttttcttcctaagatgacgttttttgggtggttttgggggcttcgttgcgaagaatttttggcaatattgccactttttcttcgtagagccgtgaatgggatataatgaatggtatgccgattacagaaacgaaaacaccgatttaatccattttcaatcctgtttacaccaaaaatcaaagttcgaacgtgtgatgtcttgtttctttagcggaaacttgttgacctattggttcgttgacctgttgacttttaaaatcggtgtaaattggattttaataggattaaatcggtgttcctttccccaattaatagttttttcccactgttaatcagggtgtttatcttgcggctatgggtggggattaggggtcaacccagtcgccgttggctttgatgagggcgacgaggtgaggaatcgcctcggtttcgggcacgttgcgctctatgcactctttgcctttgtagaggctgatgctgtggcgcgctgcacccacatagccgtaatcggcatctgccatttcacccggtccgttcaccacgcagcccatcacaccaattttcaggtgtgtgaggtggcttgtggcagccttcacctgctgcacagtggtttgcaagtcgaacatggtgcgaccgcaacttgggcaagagatgaactcggttttcgacatacgcaaacgcgccgcttgcagtatggcaaacgcatattccaccactttctgctgactttcatagttgggggcttcgagccatacgccatcggcaaatccgttgagcaggattgtgcccaagtcggcgccagccttcacttgcagccattcggtgtcggtgtcgggatagttcacacgcaccaccactgggcaatccacgcccatgttcaccatggtgtggagcaacgcttgcagactgccagtcacgttctgattggcagcagtggccactaccaccacgttagccagtcctttcaacgccagcaactgctctttcgctacatcagccttcacctccacccattgcgcagcggcggtggcatcgggggtgaaatcggcgagagcaacgagcggataggtgtgcgtgccgtcggtgattgcgccgtcagcaaaataatagtcaggcttcagtttgcctgttatgtcgccgaggctgcaagatgccaccaatgcgggcaccttcttgccaccaatcttatcaagcacggtgagcgacttgcggcgcacaggcaacagcgcatcgtagccctcgtaaggcacagcctcgatgggggcatggccggcacggctggtgatgtattgcaccaacttttgagccacaggcacctccacttcggggtcttcgctaagcgatacacgaatggtgtcgcccaagccttccgacatcaggcagccaatgcccacggcactcttgatacgaccgtcttcgccaaaaccagcctcagtaacgcccaaatgcagcggaaagtgcatatcttcggcatccatggccgccaccacgcggcgcacagcctccaccatcaccaccacatttgaagccttcatcgaaatcaccacatcgtagaacttctgctccacaaacacgcgcaaaaattccatcacgctctccaccataccggcggcggtgttgccatagcggctcatgatgcggtcgctcaggctaccgtggttcacacccagacgcactgcggtgtggtgctcacggcaaatgtcgatgaaaggcaccagcgcatcgtgaatgcgcttcaactcggcctcatattcctcgtcggtgtaggtgaggctcttgaacgtgcgcgcagggtcaacgaagttgcccggattgatgcgaaccttatcggtcaccgccgcagcggcaaacgcagccttgggattgaaatgaatgtcggccacaagaggcacattgcagccctgctcacgcaatgcggtgcggattctgccaatgttctcagcctccttcacgccctgggcggtgaggcgcacgatgtcgcccccacagtcggcgatgcggcggcactgagccacgctcgcctcaatgtcgtcggtattggtgttggtcatcgactgcaccttcaccgaatgtttgccgcccagcatcacaccacccacattcacatctacggtggcacgacgatggtaattgaatatatcgttcatttagtttaccttaaaatcatatttcacttcagccaaatccttattagccttttcaatcttggcaccaagagtggccttgtaggcagccaccttttcggcaatcttctcgtcgccgagtgccatcatttcggttgcgaggatagcggcgttcatggcaccgttcacacccacagtggcaactggaatgccaggaggcatttgaatgatgctcaacatagcgtcaaggccgtcgagcatacccttgatgggcacgccaatcactggcaaagtggtgcttgccgcaatcacgccgggcaatgcagccgccataccagcacctgctataatcaccttgatgccacggtcctttgcctcacgggcaaacttctccacagcatcgggggtgcggtgcgcagaaagagcgttcacttcaaatgggatttccatatcgttaagccacttgcaggctttttccatcacaggcatatcgcttgtgctgcccatgataatgcttactaatgctttcatttatagtatgtttgagttgaattatccaaaaagttgcatgagcaaggtcacgcacaggaagccgttgatggctcccgctatcacttgcccaagggtgtggcgtgcgagaatgatgcgcgccgagcccaaaatgccgcacagcgacaccgccacaatcatcacccacagcaggttaaacgcctcggtgatttgcacatgcatattgtagatgagcgccacaatgccagccatgccagccatgtgcgcactgattttccaccacatattcaccaccgccgacaccagcaccgtgagtgcgccgccagcgcaaaacatcaccatccacatcggggcgtgaacacggctgtagaggtaatacgccgcagcaatgtagcacacaagcgcgaagacgaacggccacaggcgttccttgcggtcgatgagttttttatcgacgataaacttaaagtgatgcaaagtggcgataaaaaacatcggcaacacgcaagtgatgcccagcaccatcagcaggatagtcacacgcaaacccacatcgtaggcactcagataggagcaccacagcgctatcagcacaccataggtgggcatcagaagcggactgagcattgccgaggcgaagcgagcaagccccaccagtattcgtccgtatttcacatcattcgctttcattgtctgggaaaaagtatattgttagagaatggtagttatcacagttccttgcggtggcgcgagtcgggtatgcccatctgcacacggtattttgccacggtgcggcgtgccacggcgtagcctttcgccttcagcagtttttcgatggcaccgtcgcccaacggacgctttttattctcgctgtcgatgatttccttcagggcattcttcaccgcctttgtggctacggagttttcgccgccatcgcccgatggaagtgcgccgctgaagaagtccttcaacttaaacgtgccccacggtgtcatcgcatacttgcccttgtcgccgccgcaaatgcgcgaaatgactgactggtcgagcccggtgtctttctcaatgtccttgtatttcatcggcacgatgcgattatcgtcgcccgacaagaaaaatgcagtctggtgcttgatgatagatttcatcaccgccatcaatttctcctgtctgcgcttcaaaatggtgataaagcgattggcactggtatagaaattcttcacgctctcgtctttggcggcaaacttgtcgatgtcgtccgacaggtcggaagcaatctccagttcgggaatgcggttgggcatcgtcaccatgattttgccctcatccacttccacttcaaattcggggataatctgattgcggcgcacatcgc

SEQ ID NO: 3210 - DNA, 23385 bp, synthetic construct
  source 1..23385: mol_type = other DNA
  misc_feature 1..23385: note = Synthetic
tggtgactcaagggtcgttgcgacggtttccgctatctcagtttcatgagttcatctctgaatgcctcggttggagtttgccatccgaggcactttctgggggttccgttcaggcggtcgcaaatcgccatcattttgcgatttgagagcgccgccacgagcgtgtcgcgaggaaggtatcggcgcgcacgcttgttcaggttttcgaccgatcccttttgccagggcgcttgaggatcgcaaaaccagctctctgttccaataccggatttgagtctgcgccactctcggaattcaaatccccggtcgaaggtgatcgagcgtcgtgctggttggggcaggggttccatcacatccatcagtttgttcatgaagtgcgtcgaactgcggtcgttgttgcgaaacagcacggcaaaccgggtcttccgctcgatcagtgaggcgacgttcattttacctgtgtggcgctcaaaaatcatcagatcgccttcccaatcgccgaattcttcgcgtgtttttacgtattccgggcgctggtgaatggaccgatccggcggaaaaacctggcctctggggcgtctggcataacgcggtcggcgtttcttacgtctgctcggcaagtgccgcgccagttgttcggattggccttcagcgctgtagacatatgcgtagatcgtctcgtggctgacccggacaggctgatcgtcgtaaccgaggcggcccgcgatctgttccggtgtccaacctgcaatcaaacgctcgatgacatgtgcgcgaaggttctccaagcggatcagcttgcgccgccgagcgcgtctggactgcgccgtacgttgtgctttgacgccatagtaaccactcagatacgacaagtcggagtcttcgaaacggttccgtttgatctctcgataaaccgtggatcgatgcctgccgatctccaccgcaatcttgctgacgggcatctttgcgttcaacatattctcaatggcgcgccgctcgtgcagatccaattccgtgtgtgccaatttccgttctccttgcttttcagcaagataggggatttgtcgcaacccagtttagaatgtgccccaactgcaaattgaagaccaataatcgctgcatttgtcgacaatgaaaccaagatacacactcaccgcttcggcatatgccttcgcgcctttgccgccttcgcgcagtggggttgggtcggggttcatcccatccgccagcgcatccgcttcgatctgtacgcgggcctcatggaccagatcactgaacgtgttcagtgccacgagttgccgatcagtaaaaagcttgccccactcatccagcccatatccgtgacaggtgccacccgtaagtcgtgcaggcgtttctccggacaagaatgtctctcttccttccttggctaccttagcggctctatccgaaaacgccgtgtgcacatgggcttcattaggcgcgacgtattttctgccgcctttaccttccgctacgattgccaaaagggactgacccatttcccccgatttacctgcctttttcacataatctggcgtaattactgtgcctgacatcaggcaacggaaatgtgctccgcgtcgctgtttggtgccttccttcgctttggcccagtcgtttttgctgccaccggtgcgaatttcataagtgatggatttagatgcccggtccacgaccgggtcgatccacgcttccctgccttttttggaactcagcaaaaagctggaagcaatcggcacatgtacatcggcaaaggccggatcggggctgggcacagtgcgtgcccagatccatgcgataaccgtggccttaccgccaccatgttcctgcgggaggtcgaccttgggataaagatgcccgatgcgttcaaacgctttttcgcgcatccattcgccgtaatgtttcacatcctcggccagcccttcggcattgcgatagaaggaccggtccttgatgcttggatggataggttccatgtttttgaactttggcggaatctcgatcatcgctttgccgatcatcaccgccaccgggttcaggtcggacccataggcgggcagcccaagccgctgcgcctctagcgggatcgacccgccacccgaaaacggatcgtagaccgggggcagttcaccaccgcaactggcgcgaatttccgcccgtgcgcgttccagtacttcttcgttggtggagttttcccatttcaccagttcttcgataatcgcaaacagacgcttacgctcttcttcgacagctgcttcggtcgggaacttgtccggattgctggacgggtcatccaccaactgcgcaaacagcaccgcccggcaagccgccaaaggccgtcgcgcccaccacaggtgcagggtgctgggatgcccatgccggatcgacttttcccgaaccgcagctgcattgatcacttcgaggggaatggcaacttctatgagtttctttttgtattgggcgcccgtttttcgtttccggacatctccaatgaaattattggatcggattgtcatgagctttctccggcgaaaacggggaatgaattttgaggcacaaaatgcctgccctaatggctgcggcagtgggcttcgccgccaaaggacagatggggctaaaacaccacattgggctggtggtttcatggaaatttgggagctttacgtccctgatcagaggcactcagttcctgcgagtggctccttaacgctccattggttttttaggagttttcggcagacgagatgcgtgcctgcctaagactaagagctcatcaacaatgtcagtggagcgggcgaaatagccctgaatagtgttgcttcacgcaactacatcgcccgttcagaacattgatgacctgagccgacagtcagaatgtccaaccacgtcggatcggtgagaaatacgagcgggatcgacccgatattagcgccggattgacgagcggtcggccgaagctcctagtaggcactgccattgcagcagcagtgggcttggaatgtgctcctcagcgccaactgtgaaaccatcggaccaggaggggctgtcagccgttgacgggttccgaaacgcacaaataaaataattcgacaaccgaactaagttggatttggaggattaagcaaagttgcggctcgaaagattacctgtcgttgtctcaaatcggggtttaccgttccataaagttgcggatttaatttgcagccgacgtttattcgaatcgttcgattgctatagctacatgatttgccgttgatgaggggattgtctttagtgcggattcaagcggagagtttatgcaatatttcaacgccataacgtccactatattaaaagcctatgtgtgtgctttggctgcttcaagagtgaaaggcgccctacgagatcgcatctcttatgttggcaaggggaacggaagcctctgtttcaatcatgctggaacagaaagaaggttacaggaccagctactcggtgagtgtgaacacaaactgaacttttccgggacattcacagcgaagagcgcgcggttgaactgttccgcgggaatattgccttttatgggtaagcgtcaggaatgaatgaaaactttaagtaattccaaacagaacaatactaatttccgaaatacaggcatcgttccaaaggtcgagggaaaaagtgacatatctattggcacgcgttgagaatttcgcacggttcgacggggaaagcctaaccgcagagcctgtcatggggtacggacagagtggagagactcctcacgagatttacaatttctcagttgcttcagacggtttcatttatggccatcttccaagaagcggcgggggtgatttaagtcggttgggcgagaaggtgggtgccaaagaagcctcaggcataactgtggttttcatcagcaatggtgtgctttgcggctactacaaaaacgcgacagtattttcgtcgacggagcgacatccggatggtctccaggctggggggtcagacattttctgtagggtaagagtggatcctggtgatgcatttttaattccagtcgacaaaagaaatgatgaaattcagccaaaacctagggggcggtttccggtgctttatggggatgaaagctctgcttgggttaagtggttcaagacctggattggtaaccggaagcggtcctttgcgagtgaaaagaaacgtagaacttggactcaaggtgtagaacgagactccaaggctagaaaattagccatcaaagagtatggctacaaatgcgaatgttgtgagatttcgtataaagacaaaattcgagctgctatgtttgaagtgcaccacaaggtgccatacgcggtgaatttcgaaacgcgacctttggagatttccgacttggccgttctctgtgcaaactgtcatcgaatgattcacaaaatgccagatgtctccgatatcaacgcgcttagaacctacttggagtgcagttcgcctctaactcatcaaaaaagctgaaaccttctcagaattttagccgttcaattgctgcgctgatacccaagcaagtttcgcaagcgaagcgccattttttcaccattggcgatatccacgctcgtagtctctaggattgtctcctgacccgaaatccggaactgagcctgaaccccctcctcgggtgaaagctcttcatggtggggatatagcagcgtcagtcggggcgctttgtaaaggtgagcgtaggccatcatctgatagacatcactttgtgaaatcccttgcttgcggtcgtcaatgcgcgaggaaatccgtttccacttcgtatcgatcacatgcacaacccgtcctgcatgccggatcaggatgtcaggcttggtctggaacaccgtacggtcgtcatcgatagatgtcaggcagaacaaccgcccgccctgaagcgcgacctggtattctgtacctgccaatgcacgtctaatcaatcggccaacatattcttcaaaaagcgtgttcatttcgaagaggagtgctgttccttgccccgaaccggcgctcgtcgtttgaaagcgattgtgcagaaaaagctgtgccatcccgaaaagctcttgccacgctcggttggtccggtcgatgaccacctcgtcccatttcagcgcggcaaccgaaactgtagatatgtcggcatagacaaaggccagttcacgtaagtgctgttgggtggtggctgtgcgtgacattcggaacaggtgcacaacagtcgctttcatgatgcggttcagcgcgatgtcgtctgatagctcatcaaatttacacgccagccgcgaagggtttgcggcgtggcgcgtgaactgacgagacagattgaggctgccacgcaaggccgtgaggtcatcctcatggaggatgtaccgacgcggcatgccgcgacgaacggcatctgtcagttttttacagaaaatacggatgagaatttccagaagtgtgtcacgctgccagtcgagctcggtgacctggccagtttcgatcttcagatcgagtgcgaccgcaagcatgtgaacaaggcgtttgcggatggccgtgttctgcttcgccttatttccctgttgatcaacatcgatcttgggaaggatctcaagactgcctccttctgtcgccagcacgcctacaacactccgcgcccgcaattcatggcggcgatcctcaagcacaccgccgccacttcgaccagcaaaagtggacgtcctggcaagtgccacaaaacgttcggcgaaatgttcgggaatacaggcgtcaccctcgccatgcggtagagtttcccattcacgcaaggtgtaggccgacatcaggtagcaaactccgagaagtcaaaactttctttgacgagccaccgtaacttttcgccggagaagtcgtcttcggacatgcctccaggtgcggcaattcgttcagcggataggaaccgagacgggccttgctcaacgtcccccaaaaccgccgctactttagaccaatcctcgtagaaatactcagcaagcagcgggatcaccttgtcccgcatcgcgctctcgatatcctgtctcgtctcacagccggcgaagtaagcatgtccgatctgatgatcccgatcaaaaagatactcgatgcgcatgttgatcgtggacaacagcttttgcaggtcgacgccatcaacgttgttcgaaagaacggacgggtcaggcatcaattcgtgaaaagtgaaccggcggcgtaacgctgtgtccaggagtgcgatggagcggtcggccgtgttcatcgtaccaatgatgtgcaggttccgaggcacgccgaagagcttcttcgagtaaggaagcctgaggcggatttcgttgctcattccgagccgtttgtcaggctcaaggagggtgatcaactcgccgaataccttggagatatttgccctgttgatttcatcgataatgagcacgtgactgcgcgcagagctgtgcgcctctggctcagcgccgtcaaatgcaattgcctccaacgcgtcccagtcgatgcgatccgaagcaagctggtacaacggttgaaacgcactgaagctatttggataaaactccgatcgttgcgcgccttgctcgtcgacccaaatccactcaacaccgcgtgagtgctgaacgtcagttgaattggcgttgaattcgtagtcaccagagatcctgcccagggcgaccgccaagtttttgccaacggtaagaagaacgtagcttccctgttccgcggcccccctgaaatgccaggtgccagtaatatcagccgcgcgcccgtctgttcccggatttcttgccagccacttctgcttgatcgcttgaaagtcttcatactccggcgccgaccaatcaatccctgcgccaaagccccaggagatctttttatcgtgtatggcggcagagaatttttctttccagttcgccccgttgaggctgagtttgaagattccttgctttcggtccagatgttgtgcttgtccgtcctctcccggatccaggcgcgcaacttcgcaaatgcgcttgaaaattccgtcatgacattcaaggcgaaatccagaactgctttcgttttcgtccaccctggccatattttcatttccggtagtgggccgaagcccttcgacgaactcttcgtaggacatcgactggtggaaggttacgaactcgatgcgcccctcatcgacgagcttgcgatacaagctcatcaagtcagctcgctgagcaccgcccttcagtcctgacgcaacttgttcacccaaacaaagccgaacggcttcccatgcggttcgatacgttttgcccgtgcccggaggaccatagaggatcaagttcgtggcagaagatgcgggtgctttgtttgtgttggtcacggcgtctgcctccggttgaggggtgagtgtataagtaaagacggtcgagctgcttgggtttggttccgtgctcgtgggcggtgctacttgtgccagtttctggaattttttaccgccaagagcctggcagatgtttgggaaggcgtcttttaatcccattgcagccgcgagatcaccggcacgaaccgaaacctcctttgcggccttttcccgagcgggctccaagtaataattcagagcgcagagcctgatgcgatcagcgcccttcatgagatgcgattttgatgggacttcaacaggcgtgtcatcttcattgacgatgataaaacctgcattgtgtaaagccgaggcgccagattttcttgcgccccaaccaccgcccatcgcactgtcacggttgacgaagaagttaataggcttggttggataaacacgattttcacgttcgcgcgacgagcgaacccagtagtcgcgcggttctccaaaggcattgaagatttcgctatgcgccccgctcttgcggtagctgtcgtaggcatccattgccgcttcgatggtgtggcgcgacaacgaggcattttcctcgccgacacttcccgtctctgggatacccacagcctcagcaatctcaggtgcgatttcatagctgatgagctcaccttccctgaatccccagtagtgctgcgtgccagtagacaagtttttgcagtggaccgtgcacccttcttgcaatactgcacgtgccagttccgatagttcctctgtgacaacgatatcctcgtccgattgggaggcgcccggccgaaagaactgatatccaggatgctttttgccgccgtttcgtgtaaccgaataaaggtctccgttcgcgtggcgaaatacaatccggcgttggtcggtaaggttagtcattttcaactccaatatgcattcaaaggtttgggcaatttgattgacctcatgtccgaagttctcgaaacagcacccgtttcttttcgatcgacgcttgctgctaaatggtcgtatgtattttgatatcagtgtacgcaatactggccctgtgattccgcctgtgtcgcttgccacggcgcgccagcggatcgctatcagatggccccaatgaaaatggccgccgcggattcacattaagaattcaggatgttctctggaaaactcttccgtattgagaccacctgcacgcgacttcactccgatttcaagtaacggcaattgcggtgacgagaatcaataggattgctaagtggatcatttggttctcctcaggaagcgtacactgccctcataaatgaacgctgtaggcacagaattgcacgtgagtttgggcttcgagcgacctcatcgggccaggatgttccgcattagaacacctgagacccatttgcgctctgaatgtctagtttgatccgttcacgatgcgccgtatgaacgaagagctaaacagtgttcaaggacagaaattggctctgagcgatcgtgtgaccatgaaattgcgcgaacacgtcgccgaattattgtcaccacaacgtttgtgcctccggacagcacaacgaaagagacgatcacgacagtgttcaaaggcgtcaagcagaccaccaccaccacgtcaaagttgaaaatgctcctgaagggggcgtgaagcagtgtcagcggggttgggtctcttttgggcacgccgtgctccttctggagcggcgaacctcggccctccggccaataacactgaccgcgccagtgtgacgttagagtttcctgaaattcgcctgttacccctccctcagtcgaggtgatctgcggagagcggttgaactgagctagatacaccgagtgctgtggaactaagccggcagacatgagatcactctattgagcggccttgcgcatgaatcttttgtgcccagttggccgaaccaaatcggtattccggcacgttctcagcgccatagaaaacagtcaggccttggggcctcaagatgaatttctttacgcagtctacgtcacggaaactccgaattcataaaacgcaaccaaaagcaccaatctgacctagttcccagacacacgccttgaagcacgacccacactatggtcattttccaaaaatgaaagagaagatgacaatgattgcagaccgaagagaagacagctgccggtctccgatgtttttagtgtttttgaaggagaaatccacacatgccgttcaccaggtttgcggtatcgagcacaacgaacgacagctttgcgtaacaaaccggactttgcaaaggttcgagtacggcccgaagccgacctccagcgcccccaaaccatgctgcagtgcggccgagcaaatttgccattcgtgctttgacgcaatttcttctcagtaatgacggctgttggagtcgtttcctatggaccgtgagcggaaattcaagatgtaaaaggggcaggccacggcctaccccaaaatggtgtggtctaaaccttatcgcgggaaagaccacgccgcttcttctgctaagatcttcagtctatcccagtactttgttgttttgcaagcatgattggaaagagaatgtatcgttttgcttttgatcttgggtccggttcgctcggctgggcggtttttgaattaaacagcagcatggagccggttggcctcaaagatctcggggtgcgggtctttccgaccggacgggatccccagtccaaggaatcgaatgcgctcggcagacgtcagccacgccaacagcgcaaacaaatcgaccgccggaaaaagcgccggattgaacttgaagaccaattggttgccgccggtttgatgccgcctgctacggatgcgtctcaaaagtgcaagcgctgctcgccgcccgctgaagctccaggtttctctgaagccgatgaaatctgtaccagatgtaagttctttgcaatcaatccatacgaagcccgcaatcgtgccgcccgcggcaaaaccgatgtgtacgaccttggtcgcgcgatctggcatatgtccaagcaccggggcttcaagagcaaccgaaaagccgaccgcactaacgaggatgataccggcaaaatcgccccagcctctgccgcgcttcgaaaaacgctcgctgaccacaatgcgccgacctacggcgcttggctggccggacggcaagagcagggacagcaagttcgggtgcgacctgtcggcgaaggcgccaaatcggcctacgacttctatccggcccgggtgatgctaaaggatgagttcgatcacatctggcgtgtgcaggcaccgcaccaccccaacctcagcaatgaagagcgcgacgccatccgcgactgcgtcttctttcagcggccgttgaaaccggtaaagccgggccgctgcaccttcttccccgacaactaccggctgccgaaatggcatccgctggcgcaggaatttttgatcctgcagcaactcaacatgttgcgtatcatcgacgatagcggcgaacgggcgctggacctgactgcgcgtgatctgatcgcgcgacacctgatgtcgggtgaaaaactcacttggtcttcatcgaagaagggcctgcgcggggtgttgcgattgcctttagaggtaaggatcaatctccaggaaggcggtctaagggaacttgcccataatgccgtcgtggcgcctttggcggtgaaaacagcaaagaaagaagcgcctttggccggcatctggcatgaattggatcctcgtcggcaactgctgcttttgaaaatcgttgcggtaacccattcgcccgaacgtaccgtcgagcggctggaaaactggatcgggttgtcgcgtgaaatcgcggagaaggtggaggagatcacccttcccgatggtcacctgatgctcggcgaatgcgccgttcgcgcgatcctgaaagtcctgcgcaaggaagtggtcgtctattctgatgctgtaaaggttgcaagcgaacgggggctattcggtgacggcgtggtgatccatcattctgacctgcgcccggaggacgacccgggtctacctgacttgccgcgctacaacgaactcccggcactccggcggatggtcggcaccggcaccggcgacccggacgatccgcccgacatccgctttggccgtatctccaacccgaccgtgcatgtggcactgggacagttccggcgggtgatgaacgcgcttatctcccactttggtaaaccgaggcaggtggtgattgaaacaacgcgcgacatggcgaaatcagcacgggagttgaaagagatcgataatgagatcaaggagaacaccaagcgcaacgacaaatggcgggcggaactggaagacgaaggaattgttgccacaggtgcccgcatcggcgaccggtttttgcgcatgcgcctgtgggaagagctgggaacctccaatgccgaccgaatctgcccctattcgggccgccctatttctttgcaccagttgcattccgacgaaatcgagatcgaccatatcctgcccttcgaggacactttcgacgacggcccggccaacaagaccgtctgtttccgtgacgccaaccggatcaagggcaagagcgcgccgggcgacgcttggtcggggaaggaactagaggctgtcatcgcacgggtgaagagcgcgccgggaatgaagcacaaactttggcggttcctgcccggggccttcgaaaaatggcagcaagacaagggattcgaggaccgccaactgcacgccaccggttacctggcccgcgtcgtgcgcgcttatgctgaggccctatttcccaaggatggcacctcgaacatctggatgccgtccggccgcatgaccgccatgatgcgccgccgctgggggctttacctacccgatcataacgccaagacccgtgacgaccatcgtcaccacgctcttgacgccgctacggtcggtatgatcgaccggcgaatgatccagaagttgcagtcctatgcgcggcagatcggcgccgaagatcttgatcgggtgcttcccgccccgccgccgcccttcgtaggcttctccgaacaggtccgtgaccaggtttcagagcttactgttagccaccggcccaaccatgccatcagcgggcgcctgcatgaagacacggcttatgggctggtccgcgaccggccggaaaaccaagcggcgcgaacgatcggtaatctcgtcaagcgcaagccggtttccgatttgtcatcggatgagatcggccaaatccgggacgtacctttgcgcgatgcgttgcttgaacacaccgatggcaggcgaaaaggtaagaaagaccgcggcgacgcgctgaacgaatggcagaaagcaggagagcaggacatcgatccgaattcgccagagcgtcttgcgaaacagcgcatgtggatcgcagagaactaccccgattacgaaacacagtcgaagaaatcccgcgctaggataagagcgagagccaatgtggaactcggcatcggcgtcatcccaaatcacgcccgtcgggctcgtatcctagtccgcgacgaaacggcccgccccattctcggccgagtaggacatccgcgggaaggagaaccctacaaatggatgatcccggatgaaaatgccttcatcgagatactcgaagatgttggtgggaagtggttccgctatggcgtcgatatttggtctgccgcttcgaagacagcccggccttggaacgaggcccatcccgaggcccgtttcatcatgcgtctgttcaaacgcgatacgatccagttgttcgactgggacaagacggaaaaggctattgtccccgggagcaaccagatcatgttggtcacgtcgattccgaactccgtgaccaacaactacgttcgtttccagcccgtgaacgacgctactagtgacaactcaacaactgcagcgtttgacacgttgcggctgcgccgcgcccgacgggtgcgcatcgacgaattggggcgggtgaggattgtgccgcacggcacggtctgatcttcaggccaacctgtcgggcccccgcatttcaaggaggctaccatggttggacagatactggaactgacacgcgcgggacttgccgtgcacaagcgccgcggatttcttgcggtggacgacggcggtaccgaagccggccgcatcggactcgaagatatcgaggcggtgcttgccgcaagccccggcctgatgtggtcgaacaccgcgctggcggaactcgccacccgacaagtgccggtcatggtgctcgggcctacttttacacccgttgctgtcgtcctaccgctcaccggccaccacgttcaggccgaacgattccgggcgcaggcggaagcgacacaacccctgcgcaaacaggcctgggccagtcttgtccgccacaagatcgccgcacaggccgaagcgcttgaccgcgttggcgccccttccgaacgcctgcgccgtttgatggttgccgttcgttccggcgatcccgacaaccgtgaagcccaggcggcccaagcctattggccactgctaatgggcaaagcgttcagaagagaccgcgatgcagctggggccaatgccttgttgaactacggctataccgtgctacgtgcggcgaccgctcgggcaatcgttgcctccggcctgcatccttcgttgtcgctgcatcaccgttctggcggcgatgctctagcacttgcggatgatctgatggagcccttccgtccgacggtcgatcttgtcgttcaacagcttctcgcctcgggcatcaccgaggtgccggatgcgcgcgaagacctcgtggcttgtctgtccgctgattttccgaccaagaacggcgcaactccgctttcgcacgtattagtgcgcctttcacggagtctggtccgctccttcgtcgacgggaagctccggctcgaattcccatctcgcccgctacctgaagagtgcttggagccgaatgatgcctgaacgttatctgcaactatcggggtaccaaatcatgtgggtatgggttctattcgaccttcctgtcggcaccaaggctgagagcaaaagggcaacgcgctttcgcaatgatctgttggacctcggcttcgaaatggtgcagtattctatctatcttcgccacgcatggagccgggaaaaggccgaatcattcgcgcggcaggtgggtgaatgcgttccggaggccgggcatgtccagattctatttttcactgataaacaatacgcccaaagtcaggttttccgtggacgcgcacgggctccgcaacccaaggaaaaaccacgccaactggtgcttttctaatgcccttggcgtcattttttcacgtccggcgccgagaaaaagccccacacaacagggtgttgtgcggggccaatcctagcagaagaagcggcgtggccaaacccggacgggtcggtgttcaaacgcaccgagtacaccatcctagcagaagaagcggcgtggccaaacccggactgggacggcaaagacgcatacgaagccgagaatcctagcagaagaagcggcgtggccaaacccggacctggtccgggaacacgccacgccagccgttatcctagcagaagaagcggcgtggccaaacccggacgcgacctgtcgtatagctctcctaggtgtcatcctagcagaagaagcggcgtggccaaacccggacaggggactatccccctcgggccgaacctgcatcctagcagaagaagcggcgtggccaaacccggacatgtgcgtatacctctcggtgccctcttagatcctagcagaagaagcggcgtggccaaacccggaccggtgcctcgggtcagcctctcaggccgttatcctagcagaagaagcggcgtggccaaacccggacgtgctttccattgcattcccttattggtcaaatcctagcagaagaagcggcgtggccaaacccggactcgaacatttcacctgtcttcaagctctcaatcctagcagaagaagcggcgtggccaaacccggacgctgcgtatagcttccgtcgccgtggtatgatcctagcagaagaagcggcgtggccaaacccggacctctatgggcttgtcggaaaatccctcggtatcctagcagaagaagcggcgtggccaaacccggacgacatcccaaacgctttcgtattctgatgaatcctagcagaagaagcggcgtggccaaacccggactgtccaattcgttgagtacatcctcaacatatcctagcagaagaagcggcgtggccaaacccggacgcatggcgtcctgagaccttcccagacgatatcctagcagaagaagcggcgtggccaaacccggacgtaacccgccgtgttgtattttacaacggcatcctagcagaagaagcggcgtggccaaacccggacgagacgcgggcaagagccttgaaatagtcaatcctagcagaagaagcggcgtggccaagcccggacaaggatctccgcgaatggctcagctgcaagatcctagcagaagaagcggcgtggccaaacccggacaatatcagtttgtcggtgcctgggtgtcgtcatcctagcagaagaagcggcgtggccaaacccggacgaggcggcccgagcattggcaaaagcgcggatcctagcagaagaagcggcgtggccaaacccggacttgagtgctgtccggatgcgctcggacgaaatcctagcagaagaagcggcgtggctaaatggcggctgggaaacgcgctgattgaatgtcagcttccaacaattgacctgacaagcgtgcgtctgcagagaatagccgcttttcgccgaacctttggatcgggcttgtctgctgtgggtcgatagcagactagcgcgattgcagcaggccttttggtggccagcggcagttgtgggcaccgagcggtgcgcgctgagatgggaaactctcaatggtagttttgagaaatcagagctttcctatggcgtgtgactcacataaaccatgcctatggaaaaaatgtgatttacaagcagagctaaacaattttgagttgcatctgattgagggtgatcgaacggcagcaagatcctcattacggaatcttttgttcgcatatgggggtatgcggcttcggtctatgaagaaccgccgtactgatcgatgtagcttttggcgcgctccatcgaggggaaaggggtgccgttataaacatatttccccttcacgatttctatggtttcccctttgtattcgtgcacacctagcgcgctacgtttgctggtttctgcatttggcactttgtctttcagctgcgctgccggaggatcgtccgacccgtttgcaggcttgtcggcatagctgccaccagcagcggtggcggcctcgcccgcggagcggtctgccagcgctgtgaatgactgtttcagttctgtggattggttgagcgcgcgttcagaaaccttgagctgtttgcgtgcaacttgaagcatttgctgggtcagttcggcagtatcgactccagctcgccctatttgaaccaaagccaagcatacaaaacccaaaatgatagagagggcaccggctgttatcccatagagaattaggtaaaatcccatgaggcgtggcaggaagtcgatctcatcaaatgaagtaaaggctacgaggagcaaaatcacccctatcgcgacgaggcaccatgacaggaaagccaaaaactgaatatgttacgagcaacttcatacgatctcacggaaatactcctttgcaaatagcttgtcaggctgggaaatgccggtctcatatgggctggcagatgccgcgatggcgtcgtggccattgcagcaatgacgtgagtattgttatcgcggcggcagattcgcggtatcggggtaagtcttttttaggaaataatttttcccaattgtgcagctatgcgacgcggcgctctgaccgattgggaagcgatcttgccagaacagttgccaattgacacatcgacgtgacctgcacgatagctagcgcagaattggccactatatttagattaatacaaacgatgcactggttgcgctggtgcgctgccaccacatagggtttcttggttcgtgcggctatccgggtcgatgttagaaaacatgcatctcgttgatttttatggtataaactggttgtgactacaatggagaagacgcaagtgtcaaaagtagcgcatcaatcgttggaagcaaccgattttgctaacctgcctgaagaactggcccgtgttggcgatgaaccagcattggttctggttgacgggaaaccggtgggtcattttgtacctctgacagaagcggaagcccgcctgcaaccggcatctgataagcagatggatgaagccttgaaggtgttgcgggaagaaccgcacgcgagcgtacttgacgaactggcagaccgttagcatggggctggtaacactttccgtagacaacattcggaagctgcatgacgaagctctggctggccgtggtggattgaccggagagcgtccaggtgaggcagtagagcgcgttctagggcgcgttgatatgcaactcacctttgacgttatctgtagtggttccgatgtaatctggctgcggcgtatgctgtggccattgcaaccggtcatccgtttattgacgcgaacaagcgcactgcgtattcggccatgatcgcgacgctcgtcgtcaacggcattcggccggtgtttgagatggaaacaaccgttgaccagatgttagccgtagcgcaaggccacgtatcaatggaagctctcgcggattggcttcgtactcacacttagttcttattctgccacgctattgcggccaccagttttggtggccgttttcttttcatctgtatcgcctagtgctgcttcacatttttgtctccagatctgatgttttacttccaaagcctatcgtcacggttccgaacaaccgaagaagttttgaaagcaggtcgtgacttgaatgacgtcacattgttgttctgatctcctaaaccttcggcgagttctgcccgtgtaactgttgctcgatcgcccacgatgatttcggcaagtttcaattcatccgagaacggttcgaaatagaggttacggtcgcaccatttgcccttaacgctgtctgcaagacggcagaagcagcggtattcagcttcgtataccggtcgtgcggaagcggtcatttagctcccgtatgcgcaactgcggtggtgtgtcagcctgcgaccacaccaaagtagtcttctctgcacactggtaacagtgagcaagttcaaggacgcgctctacttcccgtagcccgctttcagggttccagcaggctgccgctgctttgacaacgcgctccgagccacaaatctggcaacgcggtacaatgccgataatttagctgttctttggttgagtatttgcttgttgagtgcccatcattgcacatctccttccgacagagcacgcgggaaacattcccgcgcactcggcgaaaggcaatccgatgccaaggcatagcttgcgcgcaatattgcccttgtcttcggccaccgtagcactaaggagtttccgttcagtcactaagatatcctttgttggtgtgggcgccgatgacacgcaccggacgcagttcagggctattccggcacaaaaatctccgcgtagaggctttcaaatgcctgcgcctcgtcatcgctcagcgctgcaaactcaccttctcgtgcgcgctttgaaagcctgccctcattctggtgcaagaagcggaacagcagatcgatcatgcgctccggcatgtcgattttcgcattcacggccccggcaaagcgatcatagcgcgccaggaacgccgcctcgcgcggtaaatccacttcaatcgtgcgcttcacgcacgcgaacaggaattcggcatgcgcggtcgcatcgaaatagcggtagaaatctgccgtatcgtttaagacccgcacgttctgcttttcggtcggctcccatctgacgtgcggtagcagcctgcgtgaatagtcttcgagcacggccctgtaagccgtgattttttcaaggaaggcggctgataccggaaacaccacgtcgggtgggttaaagccgtcctcagcaagcacgtgatggatcaggtaacgatgtatccgcccgttcccgtcttcgaagggatggatgtagacaaaaccaaaggcgagcatcgctgcagccatgaccggatcaaggccgtttgcggaggacctatcaaaggcgatcaggccgtcaatcagctccggcaaatcttcggcacgcgcgctgacatgctcgggcagcggcgcgccggtatcgcgttcatgcttgccgacaaagcccccttccttgcgcagccccatatgcacaaagcgcgtgtcttcgatcaccatacgctgcaaacgcagcaagtcatcagcttccagggggcgcaggcccgcttcgcggatcgcttcgccccaccgcctgatacggtcatgcggcgccctttcgccttcaatcgcaaaactcgcctttgagtcttccagccgcaggaaagccgccgtacgggccagcacgtcatcgggcaccgcggcggcggcggcctgggcttttgcgcgcaaatcctcggccagataagcgtcaagtgccgctgtgcggctgacgagcggacaaaaggtccgcgttccgggaaggtcgtttatgatccggtgacgctttgagcgcaccccttttccggcatattgcagtttcggattgatcagcggcgcgaagccgacttcaccggcgccatcggggagatcaagcgtttgcccggtcagccattcatagagaaaccaaatctggcgcgcgaactttccggtcgggctgccgcgcacgatcgcctcgatgggctgcgggcctgtggctgcaaacaaccgcccgagcaccgcgagatcaataccctcatggctcagggcgaacacgaggtgcccttccaggctggccttgggctgatagcgcggcccgaagtagcgccagcgctccttttcaagcttggggcttttttcacggatcgcgcataaaaagcgcggccagggcacttcaaggccataggcatcgatgagcgccgcatacccgacaggaataccgggttccggcattgccatgtcgtgaaaaccgctctggcgtcctgaaaacggatctgtgggctcttcactcatgaaaatcaactgtagagcaggatttttaatctgtcagcaaatatcctgtgaaaatcgatttttttaccatgtattctgtgaatcttcacaaatatgagcgatgttagaaaaaatcaaccggccgcgctgtgagtttctatagtgtcaggggttcgctcgttaagcgatgtgcatcaagtgctcattctcaaattctctgagcgcatttccaatcaatgcggcggcttcatctatatcttcttcgctcgtatcgcgccccaaactgaacctaatcgaggcgtccgcctcattatttgtcagcccgattgcgcgcagcacatgggatggttcaggaatgccgcttgtgcaggcagcgccgctcgacgccgcaatgtgaggctggagcgcaccgagaatgtcctgcgctgaaaatccctcaaatcggatgttggcattaccagggtgacgcatttctccagaaggcggcccgtttagggctacctgataggggagacccatcagattttggacaaatcggtcgcgcagacgtgcaacgcgcggctctgggtgcagtcaattgcccggtcagcgccaaggcgctggcgtgccagcccattcaagcaacgcacgctctataaaggacattgaaaatgggtaatcatatgatatgtattttctgctcatatggagttagtcgtgcttgaacccatccaaaatgcagctcaaccggcatatatccagccaattgaccaacaggacaagatcgctgcgattatcaaaggcgttgttcggaccgctgatgcctgggggctttcgaatgccgaggccgcaatgcttttcgacgtcccgacggccacgtggggacgcatgaaggctggtacgtacaagggcgtgcttgatcaggacaaggtcacccgagcaagtctgttgatcggtttgttcaaagctctgagactgctgttcaacggcccgctcacatttggctggccaaagaccgccaatgtaggccctggcttcaacggcaggaccccggttcagatcatgtgcgagggcggcattccagcgatgatgaaaatgcgccagcatattgatgcacttcgaggtggtgtgtgatcagagccagcgacctggcacaggtcgagtttacagaccccaatactgtccggctgatttccaccgcctatatcgacgaaccagcactggcaccgttggtggataatgacgatgagttggcgatcctcgaggaactcgaaggactgacctcggcacgacgctccgtcatcctgccgattccaggcggcctccatcccggtgagcttctgaccgaagccgccggttatggctggacacttgtgaatgcagcgttctgctatacccgcatcacaggcaacagattcaatggtccggaccggggggtatggtacgcatcctacggggaacttgcggtcgagacggcccaagcagaggtatcctggcatctgacgcgagagctcgaagcgaccggtgtattcgacaacatcacatcctacagggagctttttaccgggttcacttcacagtttcacgaactcgccccgggaacagaagacgccgcattgcacgctgaccctgcgaccgcatacccggcggggcaagtcctggcacgcgatgtacttggctcagacggcaacgggatcctttacccgtcctcacgactgtcggacggccaatgcctggtcgcgcttcgtccccatctcgtgcaaaatatcaggcagagcgcgacttgggattttgtctgggatggcgcgcccgcaccaaccatcaccatgcgttcatagaaacctgcggagacaactagaagatcatgctgtttcttgatggcctttcgagctggccgatcctgatgcgaaggcactcttgatacgatttgcaaacaaagttgagacccaacaacttccaaatgaatctctgtcgtacatatctggctttgcatccaaggcagccgagcaagtagtacgaattgccggtgtcctggcggttttttccgatccagacgcagagtttttgtccattcgcgccatggagtgcggtatcaaactcgcttcttggtacattgcagaagctcagcggctcttggatgcaggtccggttgataaatctttggaactggcacgggaactgctcgattggctaaaggcgcggtatccagtcgaacctttcgacaagagaagtatcgtaagatttgggccagcgcgattagagatactaaaactgtaaagcgcctgctgtgcattctggcagagcatcggcacgtttgtgagttgccggtcggaactgtgatcaacggtcataagacccgtgaagcatgggggctgtgccacaatgagtaagctgttcagttttgaccttgatgaagatgttttggatccgcgtgtggcgtctgtacccggtcaaactcacaatgaactcaattctccaaaaccggcgaatacaaactcaacaatcggtttcagtgcctactaccaaggacctttgcagcaccggtcgcaaatgtcgcttgtcgcaaagtacatggctctagatccggttgcatttcacgcattcgaggagagagctgcaatactagaatttgatcaggggtttaccaaggaagaagctgagatggaggcgtttaggagggtgatgaaagaataccaagagtctgcctgacggtttgggtccttcttggaggatgtaacgtgggtttgtttgcgccgcgctgtgtccgtaggcgttcaggtttcgaactggctagatttgggttggggttgttgtcccgccccagttcttgctgctagttttctgcgccct

SEQ ID NO: 3211 - DNA, 23348 bp, synthetic construct
  misc_feature 1..23348: note = Synthetic
  source 1..23348: mol_type = other DNA
  variation 15083..15102: note = note, n is a, c, g, or t
ggggccatgctgcttgtcaggttgcggtccctttcggcctcactcaacccgtctgaactgctgttgcaggcggacaggccgcacacaagggcgagggcggacagggttgtggcatgtttgttcataacagtattccttttgggcttccggcatgtttcccgccgtaaatcatatccggcccggcctgtcaacagggcctgcaaaaaatcctgcacgggggcggttgcacccggcccggttttgcggcacaggggggtgtgcccatcctgcgccccaaaattctgttccgcatccttggcctggccgttgtgaccggggcggcggttttcgttctgcggcccggttctgttccgcttatccccgccgccgggcaggccggcagcgtcggtggcacggtccgccatgtggccgatggcgacacgttttttatacggggtgtcgggccgccgatccgcatctgggggctggacgccccggaatgggacaggcgcgggggcgaggcggcaacggcggccctgcggcggctgattgacgggcaaaacctgacctgtcgcgtgcgcgccatagacaaatatgagcggattgtcgggcaatgcttcctgcccgacgggggtgatgtgaccgcccggatgatcgccgccggggtggcgcgggaatactgctatttttcgcacaacttctacggcacctgcggcgggaactgacgggtgggcaggcgatcctgcttgccagcgggaataaatcggcccgccgtgcggcgattgaggcgggagcggaccggctgtatgcggaatatcaaacgctgcaagaattccaaaaggccagggcgcaggcacatgtgcgcctggcggaaacgcggggcataagccaggccacatacacaaggtatgaacggcagcttgaccttctgctttcaacgctgaaagactgtgtgcgcaggatgggtggggaactcaaattgcaggttgaattccctgacaacgtaccggtcatgttggaagggctggaagaattgggtgtgccggcaccgccgggggatgactttcgtgccgccgcccggaaccaggaccgggaaacggcacatccctgaacccttccccccgccctgccccgggtcaaaccggttcggcggttttacccgcgctgccgggcgggaaagtgccgcccggctgtaatacattccatgggcggggtgcccccctgaaacaacgcgggaaacgcaatatggccgatattgaaaaagtgaaggcggcgttgcacggcgggtttcgccggcagcatcccggtatcccgtttgatacgaagggatatgtcggggattttcgccacacccttctgccgcaggttttgccaagggattttgagcaggatctgctggcgggggacggcaatgaactggccaccaaatttcgggcgatacattcatcatcagggctggcggtaaactgccttgcgccgttccggcggcggatgtctgacatggtgataccggcacagcccgcatttgatacgctccggtttgaacacaaatgtcccaccggcctgcgcggcacaccgcccaaccttgacgtcgtgctttcgggcatccacggcgtggtcggtatcgaatccaaactgaccgaatacctggcgcgggaaaacgccagggccctggatacgctcgcgtcttacgaaaagggcatcacggactggcggcgcaaccagggatattttgccgcactgctgcaccttcgggaatgcccggaccattacaggcaccttcacgccgcacagctgatcaaacacgctttcgggctggcccgcagctttccccggcgtccggtgacgctgctgtatctgttttgggaaccggccaacccgggggcctgttccgtgtgcgcggcccatcgcaaggaggtagaggagttcagggggcgcgttgccggatcaaccccggcgtttgaggcgatgagctacccggagctctggcatttctggcagggtaacccgtcagcaccgccatggctgcatcagcacgttgatgccctgaaacggcggtatctggtcacaatctgaccgtgtgataaaaccgcgccacccccggctgacggtatcatcggcccggtctttcagggggccggcgggtgtgcccgccccatcccctgtcgggatggtgccgacagggcccgggcatccccggtcggggaacgggggccgggatcacctgtgcgggatctttgcggcacagcgcgcagggttccctttgcccgccccgaaaggcgccgctttcggacgggcgttcagggggcgggcatccgcccggccaggtcggcaaaaaggttcaggaattccgggtcatacggcgcatccacatggttgttgttccaaaggccggaccggcgcaccctttcccgcccgctgtgacggcccggccagccggggccggggacatccgggcggggggccagatagctgctgagcagggcaatgctgttgcgttcgataatcccgcgcgcgctgtccgggccgggggcatccgggatatccagcaccagcagcgtcatatccccgaggtatcggcttacccggagctcgtgcggccgctcccgcgcccgcacatcccggggcgcgttggccccccggccccagctttcaatgttcagtgccgggtcagcgttgatcaatgcctccccggccagcagccggaagatggatgcagcggaaccctgctaacgacaagggtgcccattgatcaatgcctccccggccagcagccggaagatggagccgcgatggtttccccccggcggatttttggtgccgcgatgctggcacagccggttccaaagcgttgtgcgggatcttgcggccagggcgtgtgtgccgacccgcaccacccgcccgggggcggaaggggcagtgcggtgttcgcccggttcaaaaaagaaatacaccccgcgccggggccagggcatccgcccgtgacaatcgcccagccggtgccggccgccgaccctggtttcaagcgcatccagcacggcatagaacctgtcaagatcagaacgcagggccattatccggccaatgcaattgtgcgccgatacgcatgtcttccatcggcactgtcaccttcggaaaacgcctggcgcaggtatggcataaggttttcgcgatagcgggcaccggccagaacgacgatttcgccggcaccggcgggaagggttgcctccatccgggcctgcacccgccgggcccagggtcgcctttctgcggtttgcatggtgttcagggtgcggttacagggtgcgctgacctgtgcggggggcagcagcccgtgttctgccgacaggatgaaccagggttccccggtttccttcacccgccgccgtgccttcaggaaccaggcagacgtgtaaaggtctgccgccggtgcggccttcggctgcttttgcccgacgcaggacagcaggaaaatacaggtcatttataagctctccgaatcgctgatcagggtcaagtttaggcaaatcactgatcaggggtaactcccggcgcggaaatggctgtaatccggccccgcatcggtgcacaggggccggtttggtttttgaaaagcccggcttgcacgacagggcgacggtgcgcacatcggccaggcggcgcacccggcgacacgtggtcggatgcgatctgccgacgggcgattatgtctcccaacgaaggccggggagttaaccccggcgacacccgaacgccgttcagggatgaccggacatacacctttacgcctaacgaaggccgggaagttaaccccggcgacatagcagagagttacagatcggatcgtttccctcaccgcccgctcaacgaaggccaggatggaaacctggcgacacccgaacaccatccaagactggccggggtatcagaaccggtgcaagccccggttcctgaagggtctgtttttaccaaaacaggcatcagcctgtgcgcggtcagccgggcggcaatcgcatcccgccccgctgcggaaatccggcacctgattttacgcccgtccccatgctgcctgattgtgaaggatggttgcttacggtcggtatccagtgccacaaccctgccttcaacggagcccgcctctgcccgggcgcatgtgcgaaagaggcatgcgtgttccgcgtcttcattcccggtaagcatgtccagggcgcgttttgctgccggggggcggatttcacaggggcggtcaccttccagggtgatgatggtacagccgatgccgttcaggttgcgccgaaacatccgttttgcaacgtcgcgcttttcggccgggaagtcattatccggcggctgcccttccaaaaggcgcagaaggttgagttccatacgcaccacatggccccgcacctggccaaaggcaggggcttttgtgcgctgatcgaagggccgggcatcgacagtcaaaggggaattggtgctggcggacacaagctgccaggaaatatcaggccggccctcatctgtcagcaggtcaaaatagccggcaacctgctgcagcgcatcaggtatcacaggattaccgccgttttcctggcatgcctggacgataatgcgcttcggtttcatcgcctggcctcctgccacgtctgcatccgcaccctgccacatcggcatctcagccggggcaggtgcgggatgataccgaacccgaatgtgcagggggccagcgtcaatgctttcaggtctttgtcgaacggggcggcgcagatggtgcggaattcccctgttcggcctgctttagccctggaatgcgaaatcgtcttcggcaaggtgtgcggccgccatatcctccagcgtgtcgtcgccgcccccgcctttcagcctgtcgttgccgcccccgcctttcagcacgttgttgccaccatccccggtcagcctgtcgttatggccggacccgatcaggttttcgatactggtcagcacatcgccgtgcgcatccccgccactgccgcggccggtggccaggttcaccgtcaccccggcgttcgaatcactgtaaacggcggtgtcaataccttccccgccgtccagcatatcggccttggccccgccgtttagcgtgtcatttcccgccctgccgacgacagtgtagctgatatccgggtggacatggttccgattcaattcctcgccgttgtcggtttcggccattatatacgttatgccctgatgtatcacggtggggagagcagacatggattcatacatttctgttggcggttctctagcccggtcgggccgatgcaggggcgtgtgtacagggtccgggcggggcggtcaataccccgcggccatattttcggatgttgtcggacgcagtgccggcgcggtgtacgcgccttgtattttaacctgcccctggccttcccgcccccggggcggtggcaatcaggtccgccgatgcgaagtttatcgcccgcaggaaggcgcggttagcactgtgaaacagggtgcggccggcatcgtttgccattggcgggcggttcctgcgccctgaatcccctgcgggcccgtgtgccatgaaagaccgaccgggtaatcggcggccagtgcccgataaatgaggcgttaatccggccgtatctgtcccttgcgcgacagggcgatggcgcacacatcggccaggccccgccctggcgacagggcaaaggcagggtgcccgcccccggttcatcgggggcacaaggggtgcgccctgacagcctgcttccgcgatgccaccaacatggcggtgtgcgccagggccaggcaaatcgctctttttcccgcaccctgtccctacaggcgcgggtcggctgccccgggggattcgcattcgggccggggctttatctttcactgatcgcgtgaggcagtggcttgagccccttccgcagggttcggggggaataatgcgccctggcccgtgtcatccacccgcagaatgcccaacagctgccaggtctgcgggcgttttgccatgttcccaacgcagaagagcatgcccttctgcgggtgttcttcgttgaatgttttgcacatccatttgagcgcggcctcatctgagccctcccgacgctttccgttaaagaacatggcgtgggcttcccggtcgccgttcgcgtaatcatgcggtcccgtgccatcctcaaatttgaacctgaacgtgtaggggcctggttccagtgccttcagttcttcgtcgaagaactcaccctggcgtgcggccttccgacaggtttcgcgttcagcctccacctgttcggatgtctttgccttgtagtagaatcgcgtgttgcgagggcggatcagggccagggattttccggcatcctcggcgtccttgattgacgccgaaacgagcgggttgaggaaactggcgcgatccctggcaggcattttgcccgaaacgcggatcgtttcctccatgacgtggcagctttcctgtcggcggtcgcgcgttggcgggcggtatttgaaattgacccaatcccacctgttgaaggaagatttcccggacagatggcgaaatcgtacaggatacagccgcttcaacgcgccgccgtcggttaccccggcacagcagaccgtttccccgtgggcactgcttctttgcggcaatgccttcaccaggatggccacgcggcactcacgcagcgttacggacatatttggcgggcccggcggcaaacagatggcggatttcgcagcccgtctgttcggccagggcatcggcgaccatggagcggtggcaggtattcggggcacgttcaaaacacatcaggcaggcggggcttgtgcgggcggctttggcgagttcgtgcagcccggcctgggccgtggccgtttgcagccaggcggcaaagatggcgcggaattcatccatacggccggcccgcgccgcggcacgtccttccctggggttgccgagagcaggcagatggctgtattccagccccgcatcgatgcaccggctggccagtctggactttgaaaaccccggcttgcgcgaaagggcgacggcccgcacatcaatcagatgccgcacacccgcgccgcgcagggcggcaataaaccggtcgggcgtgccgcgctcatagccgatggtgaacagggtgatcatggctggtttataattttcgggcgggggcctgtaaacaccccccttggcggcggcgcggcgggtggcgttggcgcggaacagggtggccggaacccgatcccgatcctgttcatacacctgaaaggcatcggtcagggtcaggcagggggaagggggcctgggtgcagggcgggggctgaaacttacccggcggcgagggcggcgagggcggcgtagcgggcggcaatcccggcaaggatgagcagcacggccacagcgcagccaccgatgcgcatgatccagcgcaggtctgattcgatcccggtcagtcgcctgtctaccccggccagttctgttttcacgccgccgaggtcggctttgacggcggccagttctgttttcacgccgttcaggtcagccctggtggcgaggtcatcctgcctgatttgcaacacctgagcggtgtgggtggcgatggcctcggcatgtttgcggtcaatgcccgcatccgccagttgccgggctgcagaaggggtatcaatggcgggcatggcatcctccatttatgacttcggcccctggggcgcggcccatccccgcccacgccccggcgacagggcaaaggcaaggcatccgccaccggttcgtcaagggcacgaggggcgggggttacggggcataatgcggcgggcgggcgcgtatccgggcccgcacattggcggatgccccgggtgtttggccttatccttcttcgggggcaagccggacggccccctggctggcgttggacacgttggcggcatacacccgcagggcccggctgacccgccgtttgcgcggccttgtgggtttccacgggtttgcgcgggcttccatcccggcccggcgggtggccagttccgcgtctgtcaggcgtacgttaatggtgcggtcggggatgtcgatatcgatcatgtcgccttcgcggatcaggccgatggccccgccttccccggcctccgggctgatgtggccgatggacaggccgctggttccgccggaaaaacgcccgtcggtgatcagtgcgcaggcggtgcccagtttcatggatttcaggtagctggtcggatacagcatttcctgcatgcccggtccgccgcgcggcccttcgtgggtgataaccaccacgtcccccgcggccacctgcctgccaaggatgcggttcaccgcctcttcctggctttcgcaaacgatggcggggccggaaaaccgcagcaggctttcatccacgccggcggtttttaccacgcagccttcccgggcgatgttgccgaacagaaccgcgagcccgccatccctggaaaacgcgtgttcggcggaccggatcacccctttttcccggtcggtgtccagcgtcttataccgccggttctggctaaaggcccgggttgtgcgcaccccgccgggggcggcactaaacaattcatgcaccgccgggtcactggtttgtgtcacgtcccactgccggatggccgccgccagggtatcgctgtgcaccgtggtgacagaggtatccagcaggccggcccggtccagctcccccaggatgccgaaaataccgccggcccggtgcacgtcctccatatgcacgttctgcactgcgggtgcgaccttgcacaggcagggcgtggaccgcgacaggcggtcgatgtcggcaatggtaaaatccacctcgccttcccgggcactcgccagaaggtgcaggatggtgtttgttgacccgcccatggcgatatcaagccgcatggcattttcgaacgccgccctggtggcgatcccgcgggaggaataccgggttttgccctgctcatagaaggcgcgcgtcaggtccacgatccggcggcctgcacggcggaacagctgttcccggtccgcgtgggttgccagggtggacccgttgcccggcagggcgagccccagggcctctgccaggcagttcatggaattggcggtaaacatgccggaacaggaaccgcatgtcgggcaggcgttttcctcaaacgcccttacgtccgcatcggtgcggtccgggtttgccgcctccaccatggcatccaccaggtccaccgcccgcaccgcgccgtctatatccaccttgcctgcctccatcgggccgccggacacgaagatggcgggaatatcgagccgcagggcggccatcagcatgccgggggtaatcttgtcgcagttggaaatacagaccatggcatcggcgcaatgggcgttgatcatgtattccgccgcgtcggcgatcacctctcgcgatggcagggaatagagcatcccgtcatgccccatggcgataccgtcatccacggctatggtgttgaactctttcgcgacaccgcctgccgcctcaatttcccgcgcgacaagctggcccagatccttgaggtgcacatggcccggcacgaactgggtgaaactgttgaccaccgcgatgatcggcttgccgaaatccgcgtccgtcatcccggtcgcccgccaaaggccgcgggcacccgccatattgcggccatgggtcgtggttctggatcggtagggtatcatggcggggcctttcggctgtttatcgggatttcggccagcgggtcataaaccgggatgttcgcctgggtggcctggccttggcaagccccgaatggacggaggcggcacacccggcccaagggacggggacaggccgcagcctgcccctatgctgtgttgtgaaccctgtcgcgggaaacaccacgccgcttcttctgccaagaacacccaaggtattacgggattttcttgcgtcaacagaatttttgtgttaaggctgacttttgttatctgacagacatcaggtgtgccatgaaacgttttgcgtttgacattggttccggttcccttgggtggtccgtcttccgcctggagggtgacggacgcaaaccggtagaactggttgacatgggtgcgcgcatcttccctacggggcgcgatccgaaatcgcgcgaatccaacgccttggggcggcgggggccgcgccagcagcggcggcagggtgatcgccgaaagaagcgccggggcgcactcgagggggtgcttgcggcccatgggctgatgccgccggccggggatgatgagggccgccaagacttcttttcaaccgacccttacgaagcccgcgcccgggctgcacgagatgaggcggcgttgttgtatgacctcgggcgggctatctggcatatatccgggcacagggggttcaaaagcaatcgcaaggctgatcggacgaataaagatgatacgggtaaaattgcagatgctacaaggaatctgcgtgagatgttggtacaggagggtgcgccgacctatggggcctggctggccggacgccacgcgcagggtgcgcccgtgcgcatccggctcaataatgaaaagggttatgacttttatccgaaccgcgccgtgctggaggaagaatttgatcacatctggcggatgcaggcgcagtatcatccgaactatttgaccgacaaggcaagggacgaaattaaaagcgtattgttctttcaacgcccgcttaaaccggtgaaaccggggcgttgcaccttttttccggatgaagatcgccttccgaaatggcatcctttggcccaggaatttttgattcttcaggaactcaacaggttgcggattatcgcagacaagggggagtgctcccttgatctgacacaacgcgatcttttgctgaaccacctgatgtcgggtaaaaaactgacgtgggccggggtgcgcaaagctttgggcatcccaccggatatcgggattaatcttgaaaccggcgggctgaaaaaacctgcgcataatgacgttgcggcccggcttgcggtcggcacgaagaaaaacccggcaccattggaggaatgggtgcgccggggtgcggataagcaggtgctgctgctttcaatccttaatgattcggaaaccccggatgtggcaattagacgcctgcaagatgaatgtggcctggcggcggacattgctgaacgggttgagaaggtcacgctgccgaccggtcacatcaggcttggcctgcgggcaacccgtgccatcgtccgggccatgcgggatgaggtccgcgtctacagcgcggctgtcgggtacgccagcgcatcaggtctgttcggtgatggtgtcgttcttaaccattcggatttgcgcccggagggtgatccgggggttgcgcggttgccgcgctactacgaagtgccgacactccggcgcatgatcggcaccggtaccggcgttcctgccgacccgccggaaatccggttcggaaagatctcaaaccccacggttcacatcgggcttggccagtttcggcgggttatgaacgccctgatcgaccgccacgggaaacctgaccaggttgtgatcgaaaccacacgcgacatggccaaatccgcccgcgaattgaacgagatagaaaccgagatcagaaaaaacacgaatcgaaacgacaggtggcgtgaagaactggaggagtgcggcctgctgccccccggggggcgtgcgggcgaccggtttttacggatgcgcctttgggaagaactgggcaagacatgtgctgatcgtctttgcccgtattcaggcaggcccatcggcctgaccgatcttcattccgacagggtggagatcgaccatatcctgccgttcagtgatacgttcgatgacagcccggccaacaagacggtctgctttcgggccgcgaaccgggaaaaggccgggcggtcccccggtgacgcatggggtgatacaacgctcggtgccatcattgaccgcgtaaaagatgcgccgggaatgaaaaggaaactttggcggtttctgcccggcgcacttgaaaaatggcaggaggacaagggttttgaggaacgccagctgcacgctaccggttatctggccaaggtcgtgcgggcctatgccgaagccctgttcccgaaggacggcacagcgcacatctggatgccgaacggacggatgacagcactgatgcgacggcggtgggggttgcacctgccggatcacaacgcgaaagaccgaaacgatcatcgccatcacgcgcttgatgcggtggtggttggcgtgatcgaccgggccacggtccggatgttgcaaacccatgcgcgcaggatcggggcacagcagcttgaccgggttcttccggaaccgccggaaccctatgatggatttcgcgaccaagtgatggaccgggttagaaacctttgtgtcagccatcgccccgaccatgcaatcagcggccggctgcatgaagacacagcctatagcttggtgcgtgatattccagaaaatgcggctgcattgaacataggcaaccttgctgcgcgcaaaccggtaacggcactgacggcaaaggagatcacccgggtgcgtgaccagcggttgcgcgaagagttgcgcaaggtaacagaagcggtgaagggtgacaagaacagggagaatgctttgtcggaatggtcttcccgcactggtgcgcaggatcatttagcccaacagcgcgactggatcgcggagtactatcctgattacgaacaacggtcaaagagacagcgcgcgcgtattcgagccaaagcaaacaaagatcttggaaactatggcttcaaaaacgtcagaactgtccgggtaattaaacctaagaaatcagccaagccggtaaaaagcgcaccttacaaatggatgataccggatggaattgcttatatggatgttttggaaaaccccgatggtaaatggttttgccatgcgaccgatatttgggcagcacaaaccgccccggaagagccgtggaaggaagatcatcctgaagcaaaattcatcatgcgcctgtataagaatgatacgctgcagctgtttgaattggacaagacaggcttgcctgttccgggaagcaaccggatcaagaaaatcgtgcaacttgatcggagtagctcacgtgtgtatctggtcggtgtgaatgatgctggtgaatatcgaaaacgacatgaagacccggatgacccctttcgctgggatttagccaaaataggcaagctgaaggcccgccgtgcgcataaggtgcgggtcgatgagctgggccgggtgcttaccattccgcacggaacgatgcctcgggttccgtcaaaaaagaagccgtcatgactgggcgcattgtggaactgacccgcacaggacttgctgtacacaagcggcgcggattccttgccgttgacgaggacggaaccgaagccgggaaggtcagcctcgatgatattgaggtggtgctgtccgcaaaccccggtgtcatgtggtcaagcaacgccctttctgaatgtgcagctcgacaggttccggttatgatggtcgggtccgactttacacccgttgcagttgttctgccgttgaaaggacatcatgcacaggcacaccggttccgcgcccaggcagaggcgacattacccctgcgtaaacaggcatgggcgtctctggtgcgtcacaagatcgctgcccaggctgatgttttggatcggaccggtaaaccatccacccgtctgcgcaggctgttgatggctgtgcgctccggcgatcctgacaacagggaagcgcaggcagcacaagcctattggccacttctgatggggaaaagtttccggcgggacaggaaggcggatggtgccaacgccatgctcaactatggctacgccgtgttacgtgccgccactgcgcgggctattgtttctgccgggctgcacccgtccctgtctgttcatcacaattccggcggtgatgccctggccctggctgatgacctgatggaacccttccgcccgacggtcgatcttgccgtctatcggctcttggaacagggagttgcgggtgtggaagatagccgtgctgatctcatcgcctgtctgtcggctgatttcccgacccgacatggtgccacacccctgtcccaggttcttgtccgccttgcacaaagccttgcccgatccttccttgaccgcaagctgaaactggattttccgcttggaccgctaccggatgacgaagacgaagatgcctgaacgttacagaatcttgtcagggtatcaggtgatgtgggtctgggtattattcgatctcccggttggaacgaaaactgaacgcaagaatgctacgcggtttcgcaatgatcttctcgacctgggttttgagatggttcagttttcagtgtatctgcggtatgcgtggagccgggaaaaggcggaatcctttgcgcacaaggttggtaattttgtgccggattcaggtcatgtgcaggtgctgttcttcacagacaagcaatatgcgcaaagcagggtttttcacggtcggtcccgacccgcacaacccaaagaaaaaccgggtcaactggctcttttttgaaccggtctgggcttgaccgcccctctatgcttgttggactttatgtttcttgtgatgtgagcctgatatatcgaaataaatttgaaaaagtgcatttaggggttgtcagttcgaaaagggtgttatatgggcattatgaaagggacgtggtgctgttctgtatttagcaagtgtagagggggcggtctttcctttgataaggtgaaacctgctttaaaagcaggttaatatccacaaaattgaggcaggctgcggcctgtctgtcggggggacagatttcggtctgtccccctttcccttttcttgtcggagagaatcgatggaaaaactgcatcggacagccatattcacatctgttttgcgtcggattttcaaagatggaatcaggaaaagaccccatgtaacaaggagttacatggggtcgtttagcaagtgtagagggggcggtcaagcccagacaacgttaacgctctccccgtacgcgcttatnnnnnnnnnnnnnnnnnnnnggggggggggggggtacccgggagcttttacaaaaattgacacctgattgcgcattgacacctgatgcagacaatcggaccatgtgctgtcaggctacgggcaccttgacgtggcctgcggggcaaccctatcgattctgggagagaaattcatgtctgacaaccggcaccccatcccggcggaaatcgctgccaatgcgcacatcaccgcggagcaatacagggccatgtatgaggcctcgatcaccgatccggaggcgttctgggggcagcatggcagggcactggcctggtcaaggccgttcaccagggtcaaggaaacatcctatgaatacccggatgtttccatcaggtggttcgcggacggggagctgaatgtttgtgccaactgcattgaccggtacctggagacccgcggcgaccaaaccgcgatcatctgggaacctgatgatccgaacgccccggcggaacatatcacctatcgcgatctgcaccgccgggtttcaaaatgcgccaatgtgctgaaagcactgggcgtgggcaagggggaccgcgttgtgctgtacctgccgatgatcccgcaggcggccatagcgatgctcgcctgcgcgcggataggcgcgatccattcggtggtgtttggcggcttttcgccggacgcgctggcggcacgggtgaacggggcggacgccaaactggtgatcactgcggatgaggccccgcgcggcgggcgcaacacgcccctgaagctcaacgccgatgccgcattcgcgaaggtgaaccacgattgcatgatgctggtggtacgccgcacgggcggtgcggtgcccatggtggccggccgcgaccattggctgcacgagatggaagaaaccgcccccgccgactgcccggcggaaccgatgggggcggaggcgccgctgtttatcctttacacatccgggtcgacgggcatgccgaaaggggttgtgcacagctcaggcgggtatctgctgtatgcggccatgacgcacaaatacgtctttgactataagccgggcgaggtgttctggtgtacggcggatgtgggctgggtcaccggccacagctacatcgtctatggcccgcttgcaaatggtgcgaccacgctgatgttcgaaggggtgccgacctggccggatgcctcccgcttctggaaaatatgtgaaaaacaccgggttgcccaattctacaccgcgccgacagccattcgggccctgatggggctcggcgatgcctttgtaagacaggcggacctgtcctgcctgcgcatactcggcaccgtcggggaaccgatcaacccggaagcctggcactggtacaatgaaattgtcggcggcaggcgctgcccgattgtggatacctggtggcagacggaaaccggcggccacctgattaccccgctgccgggcgcgatcgggacgaagcccggatcctgcaccctgccgttcttcggtgtgcagccggtgatccttgacccgcagtcgggcgaggaaatacgcacgaccgaggccgaaggcgtgttgtgtataaaagacagctggcccggccagatgcgcacggtctttggcgatcatgaccggttcgtgaacacctattttgcggattacaagggctattactttaccggcgacggctgtcggcgggatgcggacgggtattactggatcaccggccgggtggacgatgtgatcaacgtctctggccaccggatgggaacggcagaggttgaaagtgccctggtcgcccatgacagggtggccgaaagtgccgttgtcggcttcccgcatgacataaagggccagggcatctatgcctatgtcaccctgatggccggcacacagccgacagaagacctgcgcagggaactggttgattgggtgcgcaaggaaatcgggccgattgcgaaacccgatcatatccaatgggcaccggggctgccgaaaacccggtcaggcaagatcatgcggcgtattctgcgcaagattgcggaaaatgagtgtggtgcccttggggatacctcaaccctggcggacccggcggttgtggatgatctgatcagaaaccgaaagaaccgctgaaaggcgacggggaaggaggcacagcctgccgtacgctcccgggatttcagcccgccacaccctggccgaacgggtccgggttgtagtgcacggagtgcaggtataacccctccggcgggcataccggcccgcaggcggcgcggtcccgggcctccagtgcggcctttacatcctccggccgccagccgccggtgccaacacgttccagtgtgcctacaaaactgcgcacctggttatgcaggaatgatcgtgcgcggacatggaagcggaattcggtgccttgcgggtaggggtggcggttcacctgcactgtatccaccgtcttcaccgggctggctgcctggcaccgggcactgcggaaagttgtgaaatcatgtgtgccggccagatacgcggccccggcccgcatggccgccaggtccagcacccggggcacctgccagacccggccccgatccagcgtgaccggcgcacggcgggtgacaaggcggaaaaggtaggtgcggttcaccgcggaaaaccgggcatggaaggcttcaggcaccgccgcggcatcaatgatcgctatcgcggccggcttcaaatggtggttcagggcctgcatcagccggaacgggttccagccccgtgcgcagtgcacatgggccacctggccgtgcgcgtgtaccccggcatccgtgcgcccggcccccaggaccgcgggccggcccggctccacctgcgccaccgcatcctcaagcgcggcctgtacggaaggccgcgccttctggcgttgccaaccggcgaaccccgtgcctgtgtactcgattttcagcgcgaataccggcatggccccagggtagcccggcccccggccccggcgcaaggggcgcagcccgggatgatatgatccgccgccctgtttgcggaacggaaagcatcatgcgacagccggtgcagatacctgccgtaaagctcgtgcccgctgccgaaaccgcaccggcagggcccggcgggtgcctgccggaatgaaacggcaacgaaatccggcacacggcgcagtcatcgctgcggcatctgcggctttccgcccgtccgtgtcaaaggggcggattagttttggaattatcacctggcatcggaaccagttaccaacgcccgaattacgctgtaaaattctccgatctccttcaggtgatcaggttttttggtcagcttatacgacgcgttggtcgccttttccattgacaccagattaccggcacggcccgttgtcacgtccgctttcgtccatgcgccaacgtaaatgtctgaaggcgcgataccaatgcaaagcaatgcgtcgtatcggcgatgataacgaatgtggttgaactgaaatgcgccgcccacgtcttcgctggcagtcttcaactcgaaagtcctgcctccgatccgcatatcccaggggctttggcgtttgcgcgtcccgtccggcttttcgggaaacgcgcattccagcccgcatgcgcgacaaagggcttcaacgaagtcctgtccaacgtccccgactttggtattggggatgtgccggatgtgctcaaagggcattccggcccatttgtccgcatccgtgtattttgcgagcacttcctgcaggaggtaaccagggtcacgctgcatcaacgaaccccgcttcaaccagggcagcctgaatgtgttccatgctgatatgcctgcaattgtgtgccgcaaggtttgagtgttcccgccagtccgcattccgcaaggcggctgtcacacctggtttatccttccgaatgataacgccgtaaccgcagccgtatttcacatccctgaagtcggtcacgagggttggcggggtattataaaaggtgcgttgcaacagccagtccgctctgccaagcctgtcctggccgcacaagcgttccttacggcggtctatcgtgaacaactcaacccattcacgacatgtggatacaggcttgcgattgtttaccccgcgccgccaaacctgccagagcgcgtttatctgcacacccttgccctccggcgtcacgaaggcatcagaaggaagatccatcgtgttcacaagctccgcaccccgcaccctgaatttggggcttcccttgccgttcgattgaaagcccataggcagaatcatcccgatataatccgcgaaggttgccgcatgattaacgaaggcaagcgcaagccatgcgcgatacccgaacggcgggttgccaatcaccgcataacggggccggtcatcggaaggtttccatgtgagaaagtcctgacagacaaaatccgaacggcccggcaccagttcaatccctgtccggtggtccggtggcagcaggtcgtaaaacacaccatcccctgccgatgggtcaacgaatgtgtagtgtcgggtttcagcatgatcctcaagcatcacccgaagcagattgttgtaacacttttcagcaacggaagggcgggtgaaaatgcgatccaggctgactgtttccgggtttacccaggcgggtatcatcgggttttcagcccagcccgcattacgcagcgcacacgccttgtcaagaacctgcggtggctggtcttgaaacgcaaataatgtttttgccatgtcttcagctttcgcgtcaatcgggggtcgtgcgctgcccgcgtttcaccggcacctcaaaagtctcaattcccttcctgtgtaccctggcacgggcataccgcgcaacggagtgacgggcaaaatcgcgggtatgattatccatgcacccctgtcggctgccgctgcatctgtgcggggctgtgaccgggcgacctgcgcggagcaggcgttgcagggtcagtctgtcagcctttttgtgacaccccggatgcatagggccaaagccccttgatttttgcctgccggcgtggctcatggttgggaaaaatacggggcggccatgtctggtctgttccggcaggcagatgccccggggcctcctgtcagcaagcgcggcactcgtcatctgccggatcatgagtcctgaccctggccaggcatatagtcccccctgttttcggcggttgcgggatttttgacattagttgaatttatagttgacacgggtgtttccggcccccaggatcggggtgcgaagatgttgggacactgagcccctgacgccggaaggagaaaccgacatgactgaaatcacataccacaacggccactatttttgggatggtgcccgctatcgtgaccagcacagttctactgcagactggacgcatggtgcatatggcaccaatgcgggaacccctggggatgatacgattcttgcccaatcaaagcagatacattatcttgtgcccccgaccagaccttttgcctttggctttgccggggatgatacaatcattggcaccaaccttgatgactggctgcagggcggtcttgggaatgacaaaataacaggcggtgccggggcggatcacatccatggtggccccggaatcgatactgccgattattcaggtgcatccgcatcagtcactgtttccctgaaaggtttccaatatggaactgctttgggtgatgccaagggagatgagcttatctcgattgagaatcttatcggctctgcacacgatgatcatcttgttggtgataacggggcgaacaaaatagaaggcagagccggggatgactacattgatggtgccaaggggaacgatgtcctgcttggtggtgccggtaatgatcgcctgattagtggccaaggcgatgatcgtatgacaggtggttccggtgcggatacctttgcctttggctcccatctcttgacccccggtggtcacgatataatcactgacttcaatcctgatgagggtgacaagctgaattacatctatggaaactcttggggtgatattactgaagagtttgtagctgtccgtgttcgagtagaaggcaccgatggagtaaaactgacttggggtgaggagcatagttcgctcacattcctgaatgcgaaaatgaggtggtttgtcaaatcggatcccagaccagacactgatccacccaaaagctttacctatgaaccgggttttgaacctaatggggctgttcccaaggaacctgctgaaacccccgcagaaccggaagcaccttcaaagagctcttatgttgcagtggcaagaatcccggactcgactgacgggttcaatatcgtagacgggaggaatcctgccgaggttactggcgcacaggaactttccggcaccaatagaaaggactggatcaggggttccgatggcaaggatgtcctgcgcggcaactctggccgggattaccttgaaggttctggcgggaatgatttcctgtccggcggcaacgcccgtgactggcttgttggggggcgcggaggtgatcgtcttcaaggcggaaaacaggatgatattctgaccgggaatcagggccgggatacctttgtgttcaaggccaagcatggcggagacattgttacggacttcgctgtcgggaaggatacgcttgagcttcatggtgtagagttttctgacctgacgataaagaaatgggccaagggcaccggtgcgcgggtggaatgggatgagggagtgatctatctggagtttgtccaaagggatgccttgacagaagactcttttgagtttgtgtaacgagctcttgaaaatgaaacaaaagaggggtatctttcgaggtgcccctcttctgatttgaaaggagaacaagcaatgagtgttacaataaaagtttatacggaactgacagggatgatgaccttaaaggaggctccgggaatgacctccttcaaggaattaacgggaatgacatccttgacggaggcaccgggcatgataaccttgaaggaggtaaaggggatgacatcctgaggggtcgtgccggggatgatgttctttacggggatgccggggcggatctgctcaatggtggtgccggggttgatattgcctattataccctttccaacgcaggtgtgaccgtgaatcttgccactggtgaggctaaaggtggctatgccgaaggtgatgttctacttaatatcgagcgtctgtggggttccgaatacgatgatatcttgaccggagataacggggataattggctttatggaattggagggaatgacattctatatggccgtgccggagacgatagactcaggggtgattggcaggctgataagctgtatggcggttccggagatgacatccttgacggagctggcggggcggataagctgtatggcggttccgggaatgatacttttgaaaacccttttgaggctgtcctcatccgtggcggggaaggtgttgatactgtcgattatcaaaaatactcaaaatacattaaattcaatgaaggtgtgactgttgatgtgacaagtgatacctttgtcagtattgagatcctccgtggctcttcttttaacgatactctgaccggaaactccgtgattactaaaatccatggagatcacggaaacgataaaatctatggaggctccgggaatgatgagcttgaaggaggttacgggaatgacatcctaaggggccgcgccggtgatgatatactctatggatatgacaaggttaacggatccggtttcggggcggataagctgtatggcggttccgggaatgatgaactctatggaggctacgggagtgacatccttgacggaggcaccggaaatgataccctgactggaggttatgaatatgacggaggagataccttcgtgttcaaggccaatcacggcagggatacaattactgatttcgaaataggtaatgatacccttaagctgcatggcgttgagttctctgatctcactataaagaacgcctttgatggaaccggtgccagaatcgagtgggatgaaggcgttatctttctgagtggtgtccagagggatgatctcaggaatgaagataactttgagttcgtgtaaggcgggaaacccccgggattttcccgccgggattttcccaggggcagggggcccgtaaacaatccctgacaggggctttcaagggccccgccggcgggccttccccggggtttgtttctgccggaacatgcccgtcgcctgtgcccatgccagcccccga

SEQ ID NO: 3212 - DNA, 23267 bp, synthetic construct
  misc_feature 1..23267: note = Synthetic
  source 1..23267: mol_type = other DNA
atagggggccccaaagggcgcacacaaggcgcgataaacgatttagagataacaagtaacaacccctataattggtcggatagtactgaattgttttttcaatctgcttttttggcaaaacatttcaatcacacttttcgtccgccgcacgggcttgccaagcgaacggcgcgtatctcggtagaccgattggtcatagctcaagacaaagggaagaaagcgcctataaggttaaggtttatgcctggggaagcgtatgagaacttggttagggagaattttcccgatgagagcgatcccaacgttgtcgcccttaggggtataaaatttgattttttcacagatgtgaactgggccttggaaagaatcggcaccttggaaacgagcggcacagaggattcgcaaagagagtgcaggaaagcatatgatgttttgactcagctcagagcatgtcatggaagtttgagtgataaggataaaatattcatagaagaagaatttgatgttatagacacaggggttagagagttagaagatgaggaatcgggggacaatatcgacttgtctgccaggatactcgaagcgaaaggctattgcccgaaccccgcgggccaataatacgctacccccccttgagggcccaggattcagccggcgctttgaatgatgggaggatcggcaacagccagatactctgccgcagaaatatgcaccagcccccgcaaatgcagcaaggcccgatcctctgcacaaagggcctcgatcgcgtgttgcatggcatcaaacaggggggcagggtcttggtgcgccgcggtgatacagggcaagcctggcgtgggcggcgtgtgggcgataaccgcaagatcgtcggtgacatcgtcaaagcgctgcatcagggcccagctgagcgcatcaagcccggcgacatcagcgcacccctgtgccaccgcgcgggccgacaggcggtgcgatccggtttcatgggtgctgctcacaacgaggccccgggcctgcaaccaggctacaggcgcggcccaacccgattgcgagatgcgcgcgttgaaggcaagacgcaggctgcggacatcacccagcatttcctgggctctggcgcgggggacaacaatgaccgaataataatgccccgccgggcagtgcggcagaccgtgatcgagggtgcccacgagcctcaccttgccatgcaggcgcgtgcgatagggtagcccgcaggtttgccctaaaaataggtcggggctttcccagacagaccagccagcgccgcaacaggggcggctcaaccgcttgggccccttgcccagccgcgcccgaatcaaagaccaaaaccgatcgtgcgctgcggcattctcgggtcgctcatacataccaagccaggcaatcacagcccctttgccacgcgctgccgcgccagtgcgctgtcgcgatcgctgatacccaacagattcgccgccaagcgcagcacgctgtcctcggcggcatcgcgccccccatcggctagggcaatatgccagagcgcctcgatcaccgccaggcgatcctcgtgaggcaccgtctctttgagggcacgggtaaagcgcaccgtgtcggcggccgccgcttccagtgcttcggcgtctcggcgccgcgccgccgcctcaaacgggcccagcccataacgcgccaccagcaggcgatcgatgcaggccgcttcctcgttgctgtaatccccgtcagcacgggcaatacgcaccagcaacgccccaagggcgaggctttcgctatgatccgatgcgggggtctctgccaatgggcttgcagagcgcgccgccaaagcgctgaccagccgcccccacatcagctgtcatacccctcgataatgacaaggtccccctcgctggcgcctaaccgccgcgccatggcctgccgatagagatccgaatcatagcacgccagcgccgcctggtaggacgggaattcaatcaccacattgcgggcgcggctgccgccttcggggttttcaaacgtcccgccccgcaccagaaaccgcccgccaaaggcggcaaaggcagccttgttcgcagcgatataggcttgatacccctgcatgtcgtgcacatccacgcgcgcaatccaatatcccttgggcatggtgtttcctcgcttatgatcaagggggcttcccggctgccttagagcctagcagacccagacgccaagcgcaaaggcagacattggcatcggtgatagaggctgttgcgcaacagagcgttcggctcaggcgttcatctactttggtacccattggggcatcccgtgtggcacccactgtggttggcatcggggaaaggcccgcgctcttcgcccttgctcgctggtggcggcacccgcgacatccgcgccgcgcgttcctttgccgcccgaacgaaatcgcgaaacaatgggtgcggcgcaaagggtttggatttcagctcggggtgaaactgcacgccgataaaccaggggtgatcccgccattccacaatttcgggcaagcgaccatccgggcttgtgccagaaaagcgcaaccccagtttttccagcgtctcgcgatagcgcatgtccacctcataccgatggcgatggcgttcctcaatacgccggcaccggtagatccgcgccgccaaagatccctcgaccagcagcgcatcataggacccaagccgcatggtgccgcctttggcgtcatcttgccggcgctggatggtggtgttgccttgaacccattctttcaggtgatacaccatggggataagtgccgtcttgcctgtgtcttgggggcccgcgtcttgggcaaattcttccgagcccgcccccggcatttgccccacatggcgcgcggcctcgatcaccgccagttgcatccccaggcagattcccagatagggcagtttggtctcgcgcgcatattggatcgccgccatcatgccctcaactccgcgcaccccaaacccgcccggcaccaacagcgcatggcagtcgcgcaaatgaagggctgccccttcttggtgcagcatctcggcatccagccagcgcaacgcgatacgcacccgattgtgcaaccccccatgcaccaaagcctcgcgaatcgattggtaagcgtcttcaagccgggtgtatttgcccacaatcgccacggtgatggccccctcgcggctttgcaagcactctttcacatcctcccagcgcgccaaattcagcgcaggcgcgggcctgatagcgaaggcctctagcacagctcgatccagccccgcgcggtgatagaccagcggcgcctcgtagatcgagcccaagtcgtaggccggcacaaccgcctgcttgcgcacattgcaaaacagagcaatctttgcccgctcgttcgcggggatcggtcgttcagagcggcacaccagcacattgggcgtaatcccaagcgattgcagctccttcaccgaatgctgcgtcggctttgttttcaactcccccgccgccgcaacatagggcaacagcgttagatgcacgaagatgcacgctcccgcgggcatgtcgtggccgaattgacgaatcgcctcgaaaaacggcaggccctcgatatcgcccacggtgccaccgatctcgcacagcatgaaatctacttcatcggcgccgatgcgcagaaattccttgatctcatcggtcacatgcggcaccacctggatggtcttgccaagatactgcccttttcgctctttctccagcacgttggagtagatatgcccagcagacaccgaatcgcttcggcgcgttttgacgccggtaaagcgctcgtagtggcctaggtccaaatcggtttcggccccgtcatcggtcacgtagacttcgccatgttcaaaggggctcatggtgccggggtcgatgttcaggtagggatccagtttgcgtaggcgcacacgatagccgcgcgcttgcagcagggccccaagcgctgccgaggccagccccttgccgagcgacgacacaaccccgccggtgataaagacatagcgcgccatttttctaagaggtctcccgtgaaaacagatgttcgccctgatctgagaggtctgatctctggaccccatcacggggtttcagctatacaggcatggactgggaagcgcaaccataagagcctacggcatggcccctaagcccccctgcgtgcacgattggattggccgccgcaccgaggcgcgcgacattttgcaagtgcggccggcgcgtcttatgcaggcgaccctcgatcgggagccctcgcttggggaaggcgacatgctgccgcccctgtggcattggctctatttccttgacgcctgccgcgccggcgatttggggcgggatgggcatgcacgaaagggggctttcctaccgcccgttcccctgccccggcgcatgtgggcggggggcaggttgcgctttcacgcaccgctgattctggggcgggaggcgcggaagcgctctgaaatcatcgctattgaggaaaagcaggggcgctcggggcggctttgctttgtgacagtggcgcaccatgtgtttcaggatgtgtttcagggagatcggttggcgctcagcgaagagcacgacattgtctaccgcgaagcaccctcgccgcacgcgcctgtgcccccgcctctgcctgtctgtgagggggcggcgttctctcggcgggttgtgccagatgcggtgatgctgtttcgctattcggcactgaccttcaatgggcatcgtattcactatgacgccgcttatgcccgcgcggtcgagggctatgaggggctggtgttccatggcccgttgatggcgacgctgctgttggatctcgcgtgcacgcagacgggtctgcagccgcagggtttttcctttcgcggggtggcacctgtggtcggcatgcgcccctttgatctggaggggcggcaggatggcacggcccttaggctttgggcgaagcgtgcggatggggctttggccatgtcggcggtggcacacttttgagtttgagtgggggttgaggggctctcgtggcccctcccgcggccctctcgcaccgaaatggacctgcgcttgatttggccctaccccctcaaaggggcgcgtgtgcgcagagcctccgcgaacatcagtggcggcgcaaaaggtgcctcttcgtatccgccccaagatttttcttggcgtttttgaaaaataccttgcatggcatgccgctttgttgcagaatcgcggtggcaagcggtatcagatacgaaaaggggcacgccccaaataccgggcagcccctgttgtgcaatgttatgtgctgtgcagagttgtgcagaatctggctcgcaggctgaaaacacaccagctcaacccacatacaggagttctcgacgatgggtgacaagcaactttctttcgatgcgttcgacgaggtcgtcaatcccaaacctgaggaatgcgattttgatcgaatcgtggagcgcgctatctcgcgccgggggtttatcggtggcgttctgaccataggcggctttgcggccctggggggcactgccttgcccagcggagcgcaagccaccagcaatcgcttcgcttttgatggtatccctgtttctaccgccgatactgtggctgtcccgccgggctatcgcgccgaggttgtcgtgcggtggggcgatccgctttggtctgacgcgcccgaattcgatcacaccacccgcggcaatgccgctagccaggcacgcgcctttggcgacaacaccgacgggatggatgtctttgcctacgacggccgactgctgctggtggtcaataacgaatacaccaaccgccgcattatctggggcaacaaccccgatggcaaggccgcaaccgacgatgatgtggccaagggcatgagagcccatggcatcacggtggtggaaatcacccgcgagggaggatcttggcatatcgtcaaggacagcccctacaaccgccgcatcaccccccaaaccgagatgaccctcaccggacccgctgcaggccatgaccttgtgaaaaccagcgccgatccctctggcacaactgcgcttgggacctggaacaactgcggaaatggggtcacgccctggggcacctacctgacctgcgaggaaaacttcaacgggtatttttcctctagcgatgaaaacgcgccgggcctcaccccagagatggctcgctatggcgtcagcgccaaggattggggatacggctgggccacgatagatgaccgctttgacgtcgccaaaacccccaacgagcccaatcgtgccggctatgtggttgagatcgatcccaccgatccgaactcgaccccgaaaaagcgcaccgcgctgggccgcttcaagcatgaaaatgccgaggtcgtggtcaacaatgacggccgcatcgtggtctatatgggcgatgatgaacggggcgagtttctctatcgctttgtctctgcgggggtctacgcccctggggcggccaccgatgacctgctggaaaatggcacgctgtcggttgccaagttcgccgatgatggcactggcacttggatcgatctgaccccagccaccaccggcatggccagcgcagctgagatcgcgattcacgcccgtcaggctggatcgcgcgtcggggccaccactatggaccgccccgaatgggttgccgccaaccccaacgccgccgaggtgtattgctgtctgaccaacaacaagaaccgcggcgtcaagcccaacgccggcggcgatgccaccccggctactggccccaacccgcgggccgaaaaccactatggtcaaatcgtgcgctggcgtccggatggggcagatcacaccgccgccgggttccagtgggatctctacctgctggcgggcaatccgacggtgcactctgatgcctatgggggctctcccaatatcaacgaggccaacatgttcaactcgccggatgggttgcgctttgacagcaatggcctgttgtggatccagaccgatggttcctacagcaacgaaggcgacttcgccggccaaggcaacaaccagatgctggcgggggacccagccaccggcgagattcgccgctttatgaccggcccgaacgcgtgcgaaatcaccggcctgacctggtcgccggaccggcgcaccatgttcgtgggcattcagcatccgggcgaggatggcaacagccactggcccgaggggggcgatgcgactccgcgttcggcaatcattgcggtcacccgcgaggatggtggcttggtcggctaacctctcgctcctttgcttggggcgaaaccaacccccggtaggcgcggccctgccgggggttttctatgggttgggtgtgaagggggccccagctgggggaagatggcttgacctagggtcgttgaggccttacttaggggttagggcttagggcgcattttccaactgaagggagacatacaatggaaccacccaaactaacgcataaggattatataaccttgattacggagattgagaccggaaaaatcaaaattcctcaattccaaagggattttgtctggaccctggcgagctcagccgcgctgctggatagtgtcatcaagctataccccattggcactttcatcttgtggacaactcaggaaaccctccgcagcgtgcgcaatattggcaatttggatctgccgcccgcgaaagagggcgaaacgaccaactatgtgttggatggtcagcagcggttgaccagcctgttcgcggcattcaaggggctgaaaatcacccgatcaagcgggaagagcgaagatttttccaaaatatatatcgatcttgaggtcaacgaatcggaccctagcgaatcgaaacctatcgtcataacagatgtgtctgaccggaaggaaggtgcctgcatccgcctgcgggatctgctctatggcagtttgaaaatgcttgtggcatttcctgcggaacaccatggcaaactggataagtataaaaatcggattgcggcttataattttccatttattgaggctcccaatgtgccgattgacatagcgaccgagatattcacgcggctcaatgtgggcggtaagtcgctgaccccatttgaaatcatggttgccaagacctatgatgagaagcgcgaattcgaccttgaggaaaaatatcgccattttatcgatcgccttgaagatgttgattaccagaccatccccaatcaaccgattctgcagctcattgccttgattttgtcaaaagattgcacaaggcaaacgatactacggcttgagaaaaacgctttcatcgacacctggcccaaagccattgagagcatggaaagcgccattgactatttccgtgatagcatgcgcattccggtttcggggttattgccctactataccctgatcgtcccctttgcctatttcttccatcgcctcaaggagaataataaggagagcccaaacttcgagcagggccgcctgcttgaagatttcttctggcgctgttcgctgggcatgcgctattcatccgctgtggaaaccaaacttgcgcaagacagacaccgcatggagcgtatcctcaacaatgaatcccccgactatgattggggaattgatatatcccctgaatttctgatcgacaatggattcttccggcccagccgcagtttcatcaaggctatcctttgcattctggccgcccagcggccattgtctttccgaaccaacgccatcgtccgaatcggcaatgactggctgaaacgggcgaacagcaagaattatcaccacttctttccccgtgccttcctaaaaaagaaaggcgtgccggaggacaaagccaacaacattgtcaatatcaccatcgtcgatgactaccttaacaaacaggaaatgagggcgcgccccccatccgactacatggcggaattcgcgaagaaaaacccaaaaatcgctgaaacgatgcgcaggcacctcattgatgatttgcaggactttggcatctgggatgacgactatgacaccttcatgcacaagcgtgcagaggcactcagcagggaactccgaagccgtatcatcccgcgcgactcagataggttcgccgggccgccctctgtggatgattctgacgacgacgaggattgaggatcgcaccaccgcccgcggcgcggcggcctttccccctgggcgcaatgcccggccagcacgatagcccgcgccctcagtgtgtcccaaaagaatagcgtgcctcaaaagaatggggccggtcgcaaccggccccgatgtcgcgttctgcaacttatcgcgggaaagaccaccccgcgccttatgctacgtgaatcactctatcccttgcccgaagcaatgtcaacgccaaaatgcaagaaaatcgaaaaaaatgaaaaacaccgggcatcggcaccagagcatgccccaaccgcgtctaccgccatcagcggggaactccaaagccacatccccaggcgcgccccaggcaggtctgcccagctgcgcaatgtggatgactctcgaaggcgaagatgaacgaagatcgcggcaccgcccgcgcggcggcaccttcaccctgggggcaacggcgggtcagcccgatggcctgcccccgaaggggggggcggtcgcaaccagcccccatgtcgcgttctgcaacttatcgcgggaaagaccaccccgcaccttatgctacataggtcactctatcccatgcccgcagcaatgtcaaagccaaaatgcacgaaaatcgaaaaaaatgaaaaatacagggcttggcatcagagcatgccccgattgcgcctatttaggtgacgcattccccagtttgtaaagattatctttaccttttgcaactcgcgggaggggccagcctgcctcttcaccgcgtgaagcaaaataaagccttgcatcgaaggcataaagcgggttcaaatacggaacgcaagaaaccgcaagaaaccacaaagataggagatacgcatgcgccaacaccgattcgcctttgaccttggctcaggctcgcttggctgggcggtttatgagctggcaccatccagcagtggcaaaccgcgccccaccaaactggtagaccttggcgtccgaatctttcccaccggccgcgacccgcaatcgcgggagtccaaagcctcggggcgcaggcaaccgcgccagatgcgacggcaactttaccgccgcaagaaacggcgcggtgaacttgaaggcaaactcgtgcggcacgggctgatgcccgacaaatcgaatcacgcgcaacggaagaagttctttgccatcagcccctatgaggcgcgcagcaaagccgcgcagggggaggccgaactctatgaactggggcgcgcgatttggcatatgtccaagcatcgcgggttcaaaagcaaccgcaagaccgatcgcgccaacgaagaggactcgggcaaaatcgctgaaggctctaagcagctccggcaatcgctggcagatgaaacagccgcaacctatggcgactggctggcgaagcgccacgcaaagggcgatcttgtgcgggtgcgcctagtgggtgcgggggcgaaggcgtcttacgatttctatcccctccgcgacatgctggaagatgaattcacgcggatttggaatacacaagcccagcaccacagccacctgaatgacgccatgaaggaggatattcgcgatactgtctttttccagcgcccgctcaagccggtcgatccggggcgatgcacatttttccccgatgagaatcgattgcccagatggcacccgctggcgcaggaatttctgatcttgcaggcgctcaaccacctgaaatggacagatgagcgcggcgaagagcattccttgagcctggacacgcgcaacgtcatcgccaagcaactgatggatggcgttaagatgacctgggcagggctgcgcagggtgctgaaaatcccctcaagcgcgatcgtcaacattcaaggggattcgaagaaagaaaagcagggggccctcaaggagcctccctacaatctcgtcgcctggaaaatggagaacaaaaccaggaaaaaaggaatagagatccccgccccgctgccgcgatggcacacctgggacgaggcagtgcgcatgcaggtgctcacaatcctcgatgagggcatagagccggaggcgaccacaaaacgcttgatcgacgagtgtgggttggaccaagacaccgccgcggctgttgaaaaaatttccctgccggaggggcatctccgaatcggtgagagtgccgccaaagccattgtgcgggagctgcgcgcagacgtgattgtgtattccgaggctgcggaacgcgccgggctgcaccattccgatctgcgccccgatgacgctaagggcttggacgcgctgccgccttataacaggttagaaaccttgcagtctgccatcggcacgggcaccagcaacccagatgacccccctgacaagcgctatggatgcattgccaatcccactgtgcatgttgggctggggcagtttcggcgggtgatcaatgccttgattcgccgctatggcaagcccaagcaaatcgtgatcgagacaacgcgggacatggcctactcggcccaagacatcaaagaccacgagcgcgcccgggcagccaacacccagcgcaatgacgcttggcgcaaagagctagaagcggagggggtgatggagcccggcgcaaaggccggggatcgattcctgcgcatgcacctgtgggaagaactgggcgaatcccccgccgcaagatgctgcccctacacaggtcgcccaattgcgctgcatcagctgcactcagatcaggtggaaatcgatcatatcctgccctttgccgccacatttgatgacagccgcgccaacaaaaccgtctgctttcgcaaggccaaccgagaaaaggctgggcgctctccgtctgacgcctggtcgggggataaactgcaaggcatcatccaacgcgtcgtggccgctccgaatatgaagcacaaagtgtggcggtttcgcgagggtgcactcaaggactatctggacaagcgcgattttgaagaccgccagctcaacgcgaccggatatttggcgcgggtggtgcgccgctatgccgaagcgctgtttgacaaggatggcacgtcaaatgtctgggtcgtgccagggcggatgaccgcgaaactgcgccaccgctgggggttctatctgtcgaacgacaactacaagaatcgcgatgaccaccgccaccacgccttggacgccgctgtgattggcttgatcgaccgcgccttggttcagcagttgcagacctgggcggggaaatacggcgcatcagagattaacaagcatcttttaccccccctgcccgaggagtgggaaccgattcgcgacaaagtcagacagcgaatcgcccaggtgcaggccagccaccgccccaatcacgccagcagaggacgcccgcaccactcgaccggcggagcactacacgaagagaccgcctatgggcaggtgccagaagaagaacaagaggcacaggggctgggcaacttagtgtttcgcaagagcgtggaagccctagagcctggggaaatcaaccgcatccgcgatgggcatctgcgcgcgcagctaaaagactacacgcaaagccatctcggcaacaagaaagccctgcgcgaggcactgcagcagtggggggaagatttccgcggctatgaaacagaaaagaacgcgaatcgccgccatggcacccgctcgctgcggattgtgaagcgcgatcaaagcgcgcggcagattcctggccagcgcaagtgggtgatccctggggaaaatctatttgtggaaatccttgaacaggggggcaagtggtttggctatggcgtcgatcggtggggctatgcctcacgcacagcgaaaccttggcaagaggcgcatcctggggcaaaatttatcatgcgcctctacaagggcgacacaatccagctctatgactggcacaaagagcgcaaagccatcatcgaggatccgggtaggaatcgggtcaaaagggtgattcgaatcgggatagtcgctcaggcgcttatgattgcaggagtcaacgaggggggcactcttgtaaaacgacacaatgacccagaggatcgttttcgctgggatataccctcgtttgaccgcatgcgccagcggcgggcccggcgggtgcgcatcgatgaaaccggccgcctgcgcgtggtgcccatggggtgagtgagcgcccgtatccctcgccccctgcgtgaaaggccccccatgtcgggacgcatattagagttgacccgcgccgggcttgcggtgcacaaagagcgcggctttataaccataaaggcggatggggcgcaggtcggcagcgttgggctggatgatatcgaagcggtgctgacatcaagccctgggcttatgtggtccaacacggctttggcggagctggcaacgcggcaggtgcctgtcatggtcatgggggcgggctttgcgcctgttgcggtggtgctgcccttgatggggcatcacgcacaggcggatcgctttcgcgcccaagccgccgccagccgccccatgcagaaacaagcctgggccgccctcgtgcgccataaaatcgccgctcaggcggctgtcttgactcgaatcggcgtatcggaatcggaacaacggctgtatcggcttatgaactctgtgcgatcgggggaccccgacaaccgcgaggcccaggccgcccaggcctattggccgcgcctgatgggcaggcagtttcgccgcgaccgcaacgcccaaggaatgaatgccttgctgaactatggctatggcgttctgcgcgccgccaccgcgcgggccattgtggcggctggtttgcacccctctttgtcgctgcaccaccgctctggggggaacgcgctggcccttgccgatgatttgatggaacccttccgcccgaccatagacctaagcgcccgccgcctagtgatggccgggcaaaatcaggtcggggatgctcgcgaggagcttgtcgcctgtctttcagccgattttccaacaaagaaaggtgcttcgccgctgtcgcaggttctgctgcggctggcacaaagcctcgcgctttcttttcttgcccgaaaaatccagttggattttcccctacatcccctgccattcgatggggggaaagcaaaggatgcctgaacgctttcaacaactatcggggtatcagatcatgtgggtctgggtcttgttcgatctgccggttggcaccaaagccgaacgcaaacgggctacagggtttcgcaagtatctgctggaccttggttttgaaatggtgcagttctcggtttatctgcgccatgcctggagtcgggagaaagccgaatcatatgcgcggcaggtgggcgaatcagtgccgaggactgggcatgtgcagattctgttcttcaccgacaagcaatatgcgcagagccagatatttcggggctccagccatggcagccatcctgcggaaaaaccgcgccaattggtgcttttttgacgcaaatggcgggggattcctatgggatttggaaaaaaagactccgcataacaatatgttatgcggagtagattgtagcataaggcgcggggtggtcaagcccggactaagcagatcatggatacagcgggcataaaattgtagcataaggcgcggggtggtcaagcccggactgctgttccatatcttggtgctgattttggcaattgtagcataaggcgcggggtggtcaagcccggactggcttcatcgctaatccatacccgccgccattgtagcataaggcgcggggtggtcaagcccggaccgtgcgcgggtgttatcggcaagcagcggcattgtagcataaggcgcggggtggtcaagcccggaccaattgtgctgaacggcttgtcgcgcaatgattgtagcataaggcgcggggtggtcaagcccggactgctcaaccccgtggggcaaccagtcacgcattgtagcataaggcgcggggtggtcaagcccggacggcagatggtagcataaggcgcggggtggtcaagcccggacagccccctcacgcgcccggtcgccccgccaattgtagcataaggcgcggggtggtcaagcccggacagtgccattgatcaagggtgttttcattgcattgtagcataaggcgcggggtggtcaagcccggaccagagtgctgaacttgctggaaagttcggaattgtagcataaggcgcggggtggtcaagcccggacaccgcccgcttgtagggtcttggctgcctcattgtagcataaggcgcggggtggtcaagcccggactcctgcgcaaatggaagttgccctcaccgaattgtagcataaggcgcggggtggtcaagcccggacgcgatagctgggtcgcttgcgcttggcctgattgtagcataaggcgcggggtggtcaagcccggacgcaagctgcaagctattggctgccgcgaccattgtagcataaggcgcggggtggtcaagcccggacagaaagtgaaggaacattttctttgcaagaattgtagcataaggcgcggggtggtcaagcccggaccaattgatactgcgcttgctaaggctgctgattgtagcataaggcgcggggtggtcaagcccggactgaccatctgctaatcgcaacacgtcaggaattgtagcataaggcgcggggtggtcaagcccggacttaccaccggtgggcttcttaccgcaccgcattgtagcataaggcgcggggtggtcaagcccggactggtaagccgaggcgcacccatgcggtgcgattgtagcataaggcgcggggtggtcaagcccggactaccatagcggagcgtcttgagcgtatcgaattgtagcataaggcgcggggtggtcaagcccggacagactccgcgaacgtgacctcacgcagtttattgtagcataaggcgcggggtggtcaagcccggacccagaacgcgatatggttgttcattagcctattgtagcataaggcgcggggtggtcaagcccggaccctttaccagcatattgacagcagcctctaattgtagcataaggcgcggggtggtcaagcccggacccacgacttggcgtgaagcccagtgagcagattgtagcataaggcgcggggtggtcaagcccggactatcctccttcctaggctcggttccagcagattgtagcataaggcgcggggtggtcaagcccggacccgcacccatgcggtgcgcttagcggtgcgattgtagcataaggcgcggggtggtcaagcccggacgtgtagatcgagccatgtggttttattgccattgtagcagtagcataaggcgcggggtggtcaagcccggacagccccctcacgcgcccggtcgccccgccaattgtagcataaggcgcggggtggtcaagcccggacgccccgtccaccatggggccataaaccagaattgtagcataaggcgcggggtggtcaagcccggacggcatagggcttggctttccccaaatgcatattgtagcataaggcgcggggtggtcaagcccggacgccgcctaacaatgcttgatgcaaaaccatattgtagcataaggcgcggggtggtcaagcccggactggtgcccgccaaggctcgctggtgcccgcattgtagcataaggcgcggggtggtcaagcccggacataccatcatttatggcagcaggggcaccaattgtagcataaggcgcggggtggtcaagcccggacatgcacacccctgccgattgattcgccacgattgtagcataaggcgcggggtggtcaagcccggactcaatttgcatcacatctatgcaagcatagattgtagcataaggcgcggggtggtcaagcccggacgccgggtggcagctggggcagcaggggcagattgtagcataaggcgcggggtggtcaagcccggacgccataggctcgctggtgcccgccaaggctattgtagcataaggcgcggggtggtcaagcccggacgctgagggcgaggagccaaggctggtcatcattgtagcataaggcgcggggtggtcaagcccggactgaagcaatcattggcccataggcaagcccattgtagcataaggcgcggggtggtcaagcccggacttggtggtaagttaaattgccgcgagattgattgtagcataaggcgcggggtggtcaagcccggactaaaacaatggggcaagagctgcgcgatctattgtagcataaggcgcggggtggtcaagcccggactgatagggcctccttacggcaagaactcatattgtagcataaggcgcggggtggtcaagcccggacaagaatggaattacatgttccatggcttatattgtagcataaggcgcggggtggtcaagcccggacgggcccgaagcgggcccgttttcgcaccttattgtagcataaggcgcggggtggtcaagcccggacagccctgtccaagtaaagcgcatcacagcgattgtagcataaggcgcggggtggtcaagcccggactgcgtgaacaaacacgccttactccacttagattgtagcataaggcgcggggtggtcaagcccggaccaaaactcccactacaaaagtgtagaaatcattgtagcataaggcgcggggtggtcaagcccggaccaaagagctgaaagccaaaggcacgatggaattgtagcataaggcgcggggtggtcaagcccggactatccaaagcacttatattaataggatatgattgtagcataaggcgcggggtggtcaagcccggacatgaaagggatggtttggaagccatcagcaattgtagcataaggcgcggggtggtcaagcccggaccgcctttttctacgccagaggcttgcaaacaattgtagcataaggcgcggggtggtcaagcccggacctgcccctgctgcccctgctgccccagtggattgtagcataaggcgcggggtggtcaagcccggacggcttcccgttctgataatgaagttggactattgtagcataaggcgcggggtggtcaagcccggacaaggctccgccgacattaactctgggactgattgtagcataaggcgcggggtggtcaagcccggacagatgctccgctcgaccgctgctaacatttattgtagcataaggcgcggggtggtcaagcccggaccattgtcccacacactaccgctcgtgaggcattgtagcataaggcgcggggtggtcaagcccggaccaagtgggaaaatgcccgttggaaatcagaattgtagcataaggcgcggggtggtcaagcccggacagagggaatgtcgtagagtttatagtccaaattgtagcataaggcgcggggtggtcaagcccggacggggtgcagattcgcgcgatgcattcttagattgtagcataaggcgcggggtggtcaagcccggacgcagtgaaagttgcagtcattttgtctccaattgtagcataaggcgcggggtggtcaagcccggacggagaagggaaagtccagttaggcggttcagattgtagcataaggcgcggggtggtcaagcccggactgattgttgcagatgtcgttcaatgggcaaattgtagcataaggcgcggggtggtcaagcccggaccaaattcaaatcccttctttgtaacaatcgattgtagcataaggcgcggggtggtcaagcccggactaactccaatgctttcacgcaaattgccagaattgtagcataaggcgcggggtggtcaagcccggacgccgccaaagttgcctaagcttgcaacagattgtagcataaggcgcggggtggtcaagcccggactggcctaggcacaacaatgcatactagcggattgtagcataaggcgcggggtggtcaagcccggactggaagtatcttgtataaatacaatgaaaaattgtagcataaggcgcggggtggtcaagcccggacaaatgtagacagttttaccgatcctgcagtgattgtagcataaggcgcggggtggtcaagcccggacctgcgcaagcgcatgagcatggcgggctttattgtagcataaggcgcggggtggtcaagcccggacaagcggcggttctatctgcggtcacgcttgattgtagcataaggcgcggggtggtcaagcccggacttaggagacccgacaagcaatgcgcgagctattgtagcataaggcgcggggtggtcaagcccggaccaagtcagcttgacaatgcgggcttgccgcattgtagcataaggcgcggggtggtcaagcccggactggctcggtctgggccgcgatatgcgcataattgtagcataaggcgcggggtggtcaagcccggacgggaaatgtgagcgggcaagtatggttgccattgtagcataaggcgcggggtggtcaagcccggacaatggtggggtccatctgctttcgcagtgcattgtagcataaggcgcggggtggtcaagcccggactgccaaggcgttagggcaggggctgcattgattgtagcataaggcgcggggtggtcaagcccggacgggatactgcaaccttaggcgcattcatggattgtagcataaggcgcggggtggtcaagcccggactcgatcaaacatcagagcctcagtttcataaattgtagcataaggcgcggggtggtcaagcccggactgcacaaggtttcggtatgtgtcaagcgtcattgtagcataaggcgcggggtggtcaagcccggactatgacgcatagccaggggcctgtctgattattgtagcataaggcgcggggtggtcaagcccggacagcagggtgcgtcattagactttgctggtaattgtagcataaggcgcggggtggtcaagcccggactgtcaaagcaaaagaaggcaactgcgacctattgtagcataaggcgcggggtggtcaagcccggacaccagagcccctatgaacaccaccggtgagattgtagcataaggcgcggggtggtcaagcccggacgaaataggcgtgcggccgataagtcgatccattgtagcataaggcgcggggtggtcaagcccggacttagcccagtctggccctgcataccccttaattgtagcataaggcgcggggtggtcaagcccggaccgcgctggtgccgcgcaggattgtagcataaggcgcggggtggtcaagcccggacggcatataatatcactggctaccaggccagattgtagcataaggcgcggggtggtcaagcccggaccagggtgccgcactggtgccgcgctggtgcattgtagcataaggcgcggggtggtcaagcccggacttgatcaaagccttccttattaaggcaggcattgtagcataaggcgcggggtggtcaagcccggacccccatggcgcgtgtgtagattcccctaccattgtagcataaggcgcggggtggtcaagcccggaccttgcccaatagctggtttgaatggattccattgtagcataaggcgcggggtggtcaagcccggactggtgcggtgctggtgcggtgctggtgcggattgtagcataaggcgcggggtggtcaagcccggactgagggcagcatgggttcctgctgcccctgattgtagcataaggcgcggggtggtcaagcccggactaagggaaccgcaggccggtgctggccattattgtagcataaggcgcggggtggtcaagcccggacatattcaaatattgctttgaaaggactgacattgtagcataaggcgcggggtggtcaagcccggactgtgcaggcgcatttatacgcagtgcacgcattgtagcataaggcgcggggtggtcaagcccggacatgatagagctaatatttttggtgattggaattgtagcataaggcgcggggtggtcaagcccggactagcagtttgcaggcaagtttatggcaaaaattgtagcataaggcgcggggtggtcaagcccggaccagcactgggggggtgccgcgccagcaatttattgtagcataaggcgcggggtggtcaagcccggacggaaggcggtggtggcccgcatggcttcggattgtagcataaggcgcggggtggtcaagcccggacgggctcccctatgggtcaatgatgttcccaaattgtagcataaggcgcggggtggtcaagcccggactggccagggttaaatgccaacgcttaaattattgtagcataaggcgcggggtggtcaagcccggacttccacgccctcttctttttctgggccggcattgtagcataaggcgcggggtggtcaagcccggactggcttcttcggcggccccatcggcggcgcattgtagcataaggcgcggggtggtcaagcccggacagtgcaggtagatactacctgtcggcttcaattgtagcataaggcgcggggtggtcaagcccggacagacaaacagcagcctctatcgctccggtcattgtagcataaggcgcggggtggtcaagcccggacaaggctggcgagcattcactcgcagcaaaaattgtagcataaggcgcggggtggtcaagcccggactaatacagggggcgtgccgcggcagcagttattgtagcataaggcgcggggtggtcaagcccggacaggctcggttccatcggcttgattgccaggattgtagcataaggcgcggggtggtcaagcccggactgctgccgtagggatggttttgaactttgaattgtagcataaggcgcggggtggtcaagcccggaccacatggctacggtcattgacgggtggcacattgtagcataaggcgcggggtggtcaagcccggacccgcggggcttacgctctttggctatcattattgtagcataaggcgcggggtggtcaagcccggacacggcagtgaagatgttagaccgcgtgattattgtagcataaggcgcggggtggtcaagcccggacattcatggtgtaaataatactgccatcgctattgtagcataaggcgcggggtggtcaagcccggactgtcggtcaatgatggtttcaatgcgagtgattgtagcataaggcgcggggtggtcaagcccggaccaacacggggggggtgcctcggcagcagttattgtagcataaggcgcggggtggtcaagcccggacttttggcaccttatcgcaggagttatggagattgtagcataaggcgcggggtggtcaagcccggacgggcgtttctggttggcgcggctttgggcgattgtagcataaggcgcggggtggtcaagcccggacgagggcagatgagacaggttcaagcgcataattgtagcataaggcgcggggtggtcaagcccggacagctgtgcaggcgcacctttataaggtgcacattgtagcataaggcgcggggtggtcaagcccggactggggtgtcaatttgtcagcgcgtttggcaattgtagcataaggcgcggggtggtcaagcccggactgttggcgaagccaagaggctgctaactcgattgtagcataaggcgcggggtggtcaagcccggactgcatagggggtattatggcataatattatattgtagcataaggcgcggggtggtcaagcccggactgcgcccgcaccgcgcctgccctgcgcccgattgtagcataaggcgcggggtggtcaagcccggactaaccagcgtaaggtgccagcgtttaaactattgtagcataaggcgcggggtggtcaagcccggacattgcccattatcaatcaatgacgattcgtattgtagcataaggcgcggggtggtcaagcccggacgtcttgaatactccatgaaaatccatactgattgtagcataaggcgcggggtggtcaagcccggactggcctggtggccagtgatgttatatgcagattgtagcataaggcgcggggtggtcaagcccggacacaaacccaaagcccccatttacccatattattgtagcataaggcgcggggtggtcaagcccggacctgcgcctcaaccaaggcgcattctttcgccattgtagcataaggcgcggggtggtcaagcccggacagccctagacggacagccctagtgtccgc

SEQ ID NO: 3213 - DNA, 23240 bp, synthetic construct
  source 1..23240: mol_type = other DNA
  misc_feature 1..23240: note = Synthetic
gtcgcgcgccatcatgtcatagaaggtgcgccgcccgatcccgaagtaatcggcgatctgctcggacgacagcactgcggccagggtttcgacctcggccttctgcacatccgagaactgcatcggctggcgtgccatcaagcacccccggcgagatcaggctgggaggtagttgcgcgcctgctctcgcgcccccaccgcgcgaaggcacgccggagtacatagatgcgtgcgagccaggccagcgtgaaggcgaggtcgagcttcagtgactggaccagcggcaggctaaggcccgccaccgggaacagcgcgagttgcagcagcgcggtgacaccatagccgaccgcgacattggccgcggccttgagcgtgaaaaggcggtgtgactgtctcatggcgcgccctccgaacgcgcgactgcgatttcggcgaaactttcgcccccctcaagccgtgccttctgccccgtgaacgcctgccagcgcaggatcgccacatcgacataggccggatcaagctcgatggcgtagcacgcgcgtcccgtgctttccgcggcaatgatcgtcgtccccgatccggagaagggttcataaaccgcctgccccgggctggagttgttcaggatcggccggcgcatgcattcgaccggcttttgcgtgccgtggatggtctcggcatcctgatcgcggctggcaatctgccagagcgtggtttgcttgcgatcgccgctccagtgccccgtcgcggccttgcgcaccgcgtaccagcagggttcgtgctgccaatgatagtcgccgcggctcagcaccagccgctccttcgcccagatgatctgcgagcggacattgaaccccgcggcctcgaggctgtccgcaaccgtggtggcatgcagcgccccatgccagacataggccacgtcgccgggaaagagcgcccaggcggcgcgccagtcggctcggtcgtcgttaaggactttgcccgtccgtttggtctcagaggccccggcccggttgcgccagtcgggatcatacatcacgccgtagggcggatcggtgaccattaggtgcggcgcaacacccgccaaaagccgcgtcacgccgcccgcgtccgtggcatcgccgcacagcagccggtgcgcgcccaactgccacagatcgcccagccgggaggtcgaaacggccggcgcctcgggcacctcgtcctcgcgcgggtcggccgcatcgccgcgcagcagcgcatcgatctcacggggctcgaatcccagcgtgccaagatcgaggccgagcgcatcgagctcgcccacctccagcgccagcatcgtgctgtcccaacccgcctgttccgctaaccggttgtcggcgaggatgtaggcccgcttctgcgcctccgtgagatggcccaactcgatcaccggcaccgtcgcgaggccaagcttgcgcgccgccatcacccggccatgtcccgcgataatgccattctcgccatcgaccagcacaggattggtgaacccgtattcccggatcgccccggccagcaacgccacctgcgcctcactgtgggtgcgagcattgcgcgcatagggcaccagatccccgagcgggcggtgtgtgatcgcgaggcccgccccgctcgccagtgccgcccggtcttgcggaacagccccgatctcgtcgcctcgcactgccttcgtcatgcctgatcccctgctgacccccggctagacaaaatcgcggggacggatgccttaggggcagtatatcaaaggcgtaaactattgtaaaaatgacattatttgacatttctcgacattgtgcgtcatgccacgccaaaagcattcgcgccatcgctcttcccaacgcgcaagagtccgaggtgtaattgcgtatgacggatatgacagaagaaaagggtttctgtctcacgcgcgcacgtggaaacaattaccaatcctactgtcacatccgtcatgtgatcatgaggtaccgaagacctccgccgcggccgaaccacccatgccatctttgaattgacaatacgctcaccgcagggttgaaatcccttacgcgctagggaaccagaaccaatgggccatattcatcttggcgttctgcccagttcgaagaagtggcgcgaggtcgtggcacttctggaagacggccttccggatgaagaggttctgcaagccagcgcgcttgccgccgagcgtgacctggatcgagccgcacacgatccgctcttcgtcgaatgcgttcgcctgctcgccatgatcccgcaagcggcccgatcgccagacttcggccaaggtttgcgcgatcttgatattgctgtcgcctcgtcgccggacctcctgcaaatcctctctgccacggggcggcaccttgatcttgtcgcgcgcagcctcgggcaccgcagcgatttcggggaactcgcacgcaaggcgctgctctcgaccctctcgagcgcaatgacggacgccatgccgagcctgttcgaagcaacacctagcgatgttcgggatgctgcgcgcggctttgcgcaatccgcacggttttcttctcttgcgcgtagcttttacacgcggctactgtctgacacattgcactcttggctcgaccggaccctctctgcacatgtcggagacggcctgcgctttcggagcatggaagctcgctcgggcttcgacgccgccctgacccagtattgttttgaggccacccgcatcattcgggagtttgccggcggatggtacggcaagaccgtctatcgggacggcgccatctcaacgcagcaggcgacggtgtttggcgccgtggccttcaagaagatttccgaagaactccgccacaaacggggtgccgatgactgagacattggttcgggtcgagactgggtcacaagaccgcgtgcgggacatggtcatccggatcaatggcgcaaaccccacgttcgacctgcagacagacccaatcgagcatcaattgctggtgcccgccaacgagcttctcctcgaccttcttgatgttgctgcgtcggtcttcgccgccgacagttccgttccgcgcggtggcgcgacccggcccgagttcggcgcggggtggcggcggcgaatgaccttcagcatccctgtgcgcagccccgatatctggaatcgtcccgaagtcacggcggctcttgtcgacgccgtcgagtttctgaccgacgacgaggtggcgttcgagtttcacaaagggcgccaaagcattggcccgcagcagtatttcgactttgcgggggattccgcgcatagtggtcagatcgaggatgtcctcctgttttctggggggctcgactcgctctccggcgcggtagagcgattgacccaagggccagggcgcatcgccctcgtcacgcacctctcggcgaacaagatcataaagcatcagaaactcctcatagaagcgttgaagaagcgctttcctggtcgcatcctgcacatccccatccgcgccacacgcaagggttctgaggccgcagaaaccacacaaagatcccgatcctttctcttcgcatcgctcgcctatgtggtggcccgcatgctgggcgcaaaacggatcgccttctacgaaaacgggatcgtcagtcataacctcccgatcagtactcaggtgatcggcaccatggccacccgcaccacgcatcctctgtcgctcgtcaaactcggggcctttctcgacaccttgggtggctcgcccatcccgatagagaaccgctttgcctggttgaccaaggcggaggtgatcacgcgtcttaccgagaatggcggggccgatctgatcaagacatcgataagttgcactcaggtccgcgatcaatcggtactgcacacccactgcggagcctgctcgcaatgtctcgaccggcgctttgccatgctggccaccggtctgcacgttcacgaaccggacgatatgtacctcaccgacgtcatcagcggcgcgcgcgatgcagggcgatcgcgcaccattgcgctcgattggatagcacatgcctgtcggctggcagacctcagccagcgagactggatggatcgcttcggcagcgagttgctacggatcgtcgaaggcctcccaaacctttccggaaccgacgccttgcagcggatcattgccctgcaccagcgccattcgaacactgtcaaaaaggccctcgaagacgccgtcgccaaatatgcgcccgaccttgtctctcgaagtttgcctgtgacttcccttctgcgcctttatctcaatgatccgccaggaacgccaagcctgccccgcctcgcgcgtggcaggtatgtttctgcagagccctctgtcgccgcgcctaccctcgacgcgggcacgcgcgatacgggcatctttcccctgcaggttgcgtttcacaatgacggtaaggatgacctcatcacagtcagaggcctcggcgaggtacgcgggcggtccgccagcgccgcccacctgctgcgcccggcttacgaagaggaccagaagaaagggctgaactccgacaaccacaccttcgttccggcaatgtccctgttccttcccgttcatgtcagcaaagctgctgtgcgcaaatgcgtgcagcgttgccgggacgcgctggcggaattctaccgtgcaattgaggggcatgacccgccacgggatctgctaatcgagaacaagccgcagcgcggctaccgactcgatccgacctgcaagatcgtggatcgggaccaatcgaagtagcaaacgcaatcgcccgacgatgaccgattctccaagaatgtcacggagcagcgcgttcgtgtcacgcagcaacgcttgacgcacggtatttcctgcatttttcccgccaaaatgtcacggagcgcgacgggaggcgtcacgccacgatcctcgcgtaacacactgatttcacgtcattatgtatgagttaggtgccgattttggtgccgcaggagatcaggcatgcaacatcaatgtgaccaggagggtgcgggacatcgggacggcccgattttacccgaacacatcgtcgcaaaacgctggaacaaatccgtccgtaccttgcaaaggtggcgtcgggcgggcaccggccctgcctacctgcagatcggcggcagtgtcttctaccgctccaacgacatcatcgccttcgaggatgcgtcccgccggattgggggagaaccagcatgaacgcttctcgcacgcccccacatcccgaccaattttctcccgatgcaactgcgatcgccgacttcctcgacctcgtctttggcgacactcatggcttcgttccggtccgcctgctgaccgagaaaggtacgcaggctggcaagccttggagcaagtatcctccggtcggccagtacctggcgggcacaatcgtgcttgaggccgaacgcgcggcgcgcgagggacgcggcatcttcatcgtgcctgggacggtggctcagccaggcagtgcaaaggcgcgcgaagtttgcgagatggcggtcattctcgtcgatctggacgaaggcgacattgaggccaagcgcgcccatctggtggagcatcttggcgtggcaacgctcgaggttgcgtccggcggcaagaccagcgacggcgccgacaagcttcacatctactggtgcctgaccgaagctggtcggggtgacgacattggccgcatctgtcggttgcgcaaagtccttgctctgaaggccggaggtgatccctccttcggcagcgcccatcagccaatccgcgtgcccggctcgatccatggcaaacagggccgccgcgcgatcgtgcgcatcgtcggccgctctgcacaaaagtacgacctcgacgagtttgcggaggcggtggcaagaatgccggttctccccgggcaggcgataatccccgcatcgacacccacggcaaagccgggcccaacggcacgccaattgatgactcgcgtgatccgggaagggggttccgacgggaccacgcgttttgacgcgctctcgagggtcatcgggcactggatccggcaggcgcgatcggggcagataactctcgacgaggcctgggacgccgtccagaaccacaatgccgccgtgattgcgccgccttggcccgacgaccgtctccgccaggaattcgacgctctcctccagcgcgacacaaggagcaccgggccaatccccgccgctctggccaagaacgcccttgttctgccgatacctgagctgagcgaggatgctcttgccgccagcttcgttgcgaccgtcgggcaagtctggcgccacgtcgcgatttggggcacctggatgtattgggacggtacgtactgggcgaaagacgagcttggcgcggttcgcgaagcggttcggcaggtttgccgggccgctgtagtgggccacgacaaaccctctgaggcgcgccgcatcgcctccgataagaccatcgccgcagtgctccgcatcgccgcaacggatccccagacggccaccagcagcgacgcctgggaccaggcaccgatgcttctcaatacgcccgatggaatcgtggacctcgcgacgggggaagtgcttccccacgatccggcgcggatgctcacccagatcacaatcgcatccccgggttccagctgcccgcgctgggagaggttcatcgacgagatcaccggtggcgaccacgaacttgccgcctatctggcgcggctgagcggttattgcctgacaggggcaatgcgggaacaggtgttcttcttcctgcatggcgctggcggcaacggcaaatccgtactcctgaagacgctgttggccgtcatgggcagctatgccaccacagcgccactcgacaccttcatggcggcctcaggagaacggcatccaactgacctcgcaggactgcgcggcgcacgcctggtgactgtcacggagaccgaagaaggacgcgcctgggccgagacccgcatcaagacgatcaccggtggcgatccgatcaaggcgcggttcatgcaccgcgacttcttcgaattcgccccctcgttcaagctgatcatctcaggaaaccatcgcccacgattgaacggtgtcggcgaagcgatgcggcggcggctgcacctcgtgcccttcaccgtgacgttcacggatcaaggacgtgacgcatccatcgaagacgctctcaccgcagaacgcgacggcattctcggctggatgctcaagggctgtaccgaatggcagcggatcggactcgcgccgccggccacgattctggaagcagtagaagagtattttgcggacgaggatctcttcgggcagtggattgcagagcagtgcatcactggcccctcccaacgagccaccgcggctgatctcttcggcagttggtccagcttcgccgaccggaacggcattcccagaggttcacagaagtcgctaggcgaagcgatgcggcagcgagggtttcgtccggcccgcagccccggtgcacgacgttggcagggcatttctgtccggatgaccggggagcccgaggcgtgaacccctatcctgcagcccttatgaagccgctcgaacgccgcgccgagctttgcgccattctcgcccgtggcctgtgccgattgaagatgagagacgcggcagaagtatctgctgtggatggagaaacttcgcttcactttccgcccgaccagagcggtcatgcaaccaccccaaaacggagagttgcatgaccgacccgatccccgcgcgcctggccgcgttgaagacgaccccgacgcccgacctgaagcagcagtggcgcgagctcttcgacagcgcgccaccgccgttcaaccggcgatatctggaaagccgcctagcctatcgtatccaggaactggcctatggcgggctgaagcccgagacgatccggcggctcgaacggctgggcgaagacctggacggcggcgaccggaagaagagccgcatccgcgccgacatgatgccgatcgccgggacaaggctgctccgcgagtatcaaggcgtcgagcaggtcgtgaccgtcttgcagaacgggttcgaatggcaggggcggccgtacaagtcgctgtccgcgatcgcccgggccatcaccggcacgcgctggaacggctgggtgttcttcgggctgaaaaaccacagggggcggacatgacgaagccaccggaaaaatcgaaggtgctccgcaagctgcgctgcgccgtctatacccgaaaatcctcggaagaagggctggagcaggagttcaacagcctccacgcccagcgggaggcctgcgaggcctacatcgccagccaacgctccgagggctgggtgctggtgcgcgaccagtatgacgacggtggggtttctggcggcacgctggaacgccccggcctgaaacggctgctggccgacatcgaagacgggctcgtcgacgtggtggtggtctacaagatcgaccgcctgtcgcgctcgctgatggatttttccaaacttgtcgaggtgtttgaccggaacggggtgaccttcgtctcggtaacccagtccttcaacaccaccacgtccatgggacggctgacgctgaacattctgctcagcttcgcccagttcgagcgcgaagtgaccggcgaacgcattcgcgacaagatcgccgcctcccgccgcaagggcatgtggatgggcggcgtcccgccgttgggctatgtggtcaaggaccgcaagttggtggaaaaccccggcgatgccgcacatgtccgctgggtcttcgcccgcttcatcgagatcggctcgggcaccgtgctggcgcgggaactggccgcgcgcggcgtcacgacccgccgcggccaccgcatcgacaagaagttcatctatcggatgctgaacaaccgcgcctacattggcgaggcggtccacaagggcgacagctatcccggtgagcatgacgcgatcatcgagcgcgagatgtgggacaaggttcacgccatcctgcaggagagcccccggaagcgcgccgcccgcacacgcgccgacacgcccgcgctgctgaaggggctactgttcggcccagatggcgccgcgttctcaccgacgcatacccggaagggggatcgtctctaccgctactatgtcagtcagaccgtgctgaagcatggtgctggatcctgccccatcggccgcgtgccagcgggcgagatcgaggccgcagtgatcgaccagcttcgcgccgtattccgccagccagagatcgtcgcagggacgtggaaggccgcccgcgcccatgccgacgacatcaccgaggccgacgcccgcgcggcgttgcagcagctcgaaccgctgtgggacaaacttttccccgccgagcaggcgcgcatcgtggcgctgctggtcgaacgcgtagacatcggcgcggacggcctgaatgtccggctgcgcgttgacggtctcgccggcctcgcgcgcgagatgctggccggcgatatgggtgcggccgcatgacccgcggggcgccgatccccgagacggtgacgctccacgtcccattcggtgtcgtgaagcgcggcggccgcaaggaaatgcaactgccggagggagtcgcgcagtcgcgccggaacgacaatacgctggtcaaggcgcttgcacgcgcataccggtggaagcgcatggtggattccggggagtttgccaccatcgccgaactgactgaacgcgaggggatcgcgccgtcctacatgacgcgcgtcctacgtctgacgctgctggcaccggacatagtcgaggcaatcgtggacggaacacaggggccggacgtgacgctggcgaatttgatggagccgtttccgctggattggaaagcgcagacatccaggcaatcggtctgaaacagatggggcaggccgcagcctgccccaatggtgtggttttaaccttatcgcgggaaagaccacgccgcttcttctgctaggaattttagggtatcccggaatatgctggcttggcaagcatttcggagggcctatgtatcgtttcgctttcgacctcggaaccaactcccttggctgggccgtctatcgcttgaccaatgacacgcggcccgcttccattgaaaggacaggggtgaggatcttcccaaacggtcgggatccacagtcgaaggagtcgaatgccgctggccgcagaatgccgcgcggcgcaaggcggaggcaggatcgaagcctgggacgaaggaagcggctgctcgatgacctgatcgggtttggcctgctgccatcagatgcagatgcccgcagcgcggtctttgccgcaaatcccatcgaagcacgggctcgggccgcgcgcgaacaggtggctctggaacaacttggccgggcactctggcacatgtcgaaacatcgcggtttcaagagcaaccgccgcgccgacaaggatgcggatgaaaagggcaagatcgcgatcgcctcggccgcccttctagagcgactgagggcagacgggcacccgacatacggcgcctttctgcacgcgcgcctcgtccgaggtgaaggaacgcgcatacgcccggcaggcgacggcgcaaagctgtcctacgaattctacccgacacgcgctcttctggaggccgagttcgatcacatctgggccatccaagcgggcttccacccgtccctgaccgaagcgatgcacgagcggctgcgcgacaccatcttctttcagcgccccctgcgccccgtccgtccggggaaatgcacattcttccccgatcaggaccggctgccgcgctggcacccggccgcacaggagtttctgatcctgtcacagctcaaccatttgcgcatcgtcgacgatcaaggcgaacagccactggacatcaccgcgcgggatcttgtcgcgcgtacgttgatggctggaacaaaactgtcatggtcgggcctgaaaaagaccctgaagctgccgtcacaggccgagttcaacctcgaaaagggcggcctgaaggagcttgcacggaatgacgtggcggcacgactgctgggcgatacgaagaaacccggaccgctggcgacgctctggccgaccctcgacagcgccacgcaagaggaaatcctgtggcagatatcggaggtcgcagacccggaagagctcatctgctggcttatggaaaggctcgggctttctcgcgaggtggcggaaagggtcgagaagatcccactgccggacggtcacctgcgtttctgcaagacagcgacgcaggcgattgtcgaaaaactgcgctgcgacgtcattccctatgacgaagccgtccggcgcgcgcctttgcttggcggggcggggctggaccactccgattttcaggccgaagaaggcgtcgataccctgccgccctacaaccggctgcccgttctacagcgcatgatcggcaacggaaccagcgatccgaaagacacggacctgctgcgctatggccggatcaccaacccgaccgtgcacatcgccttgggccagttccggcgcgtgatgaatgcgctgatcgcagaatacggtaagcctgcgcaggtcgtcatcgaggccacgcgagacatggccaagtcagccgaggaactgaacaagatcgagaaaaccatccgcgacaacgaaaaacgcaatgatcgctggcgtgccgagcttcagaaagcggggctgctggtggaaggcgcgcggatcggcgaccggttcttgaggatgcgcctatgggaggagattggcagaggcccggcagatcggctctgtccctacaccggtcgccccatcgcgctgcatcagctgcattccgacgagatcgagatcgatcatatcctgcccttcgagcaaaccttcgacgacagtccagccaacaagagcctgtgtttccgcgatgccaaccgccgcaagggcaagctgtcgccggctgcagcggccgaccggcagccagacttcttcgatctggctgccatcatcgggcgcacgaaacacctgcccgccaacaaggcctggcggtttctgcccggtgccatggaaaaatgggaagagacgcgcggtttcgaggatcgccagttgaacgccaccggctatctggcccgagttgtccgcgcctataccgaggcgctgttcccgaaaaccgatgccgagggcaagcgacgcagccatgtctgggtcctgcccggtcgcatgaccgcgatgttgcggcaccgctggggtctgaacctgggcgatcacaaccgtaagtcacgcgacgatcaccgccaccatgcgatcgacgccgccgtggtgggcgtgatcgaccggcggatggtgcaggtgttgcagacccatgcgcggaacctgggggtggagcggctggaccgcgtgttacccgcgccgccagaacccttcgaaggtttccgcgacgccgtgctggctgccgtcgaaaaggtcaacgtcagccatcgtgcgcaacacggcagcatcgacccaaccgatccatcgcagaccagcggcaggctgcatgaggatacagtctttggtcttgtgcgggatgtgccagagaaccaggccgagcgcaccatcggcaatgtcgttgtgcgcaaacccataaccggcttgaccgaaaaggaaatcggacaggtgcgcgacgtcaagatgcgcctcagtctgcaggatgccaccagtttagcccgcgacaaatccttgccggaggcagagcgcaagaagcgcctgcccgaggcgctggcgaaatgggttcaggaaaccggccaccgcaaactgcgtatcctgaagcccgaagctggcgttcgccccgttcatgaccgtgatggcaagccctacaaatggctggtgcccggtgaaatctcctggctcgacatcctagaagcgcctgacggcacatggtttcagcacgccacagacatctgggcggcaaactcgggtggggccgagccctggaacgtcgcgcaccccagcgcacgtttcatcatgcgcgtccacaagaatgacaccattcaagtgttcgattgggacgacagaaacaagtgtgtcgtggaaggaagcaaccagatcaagaggatcgtacgcttggaaccgagcgccaacagaatgcggctcgtcggcataaacgacgcaggcaagtttgacgaacggcacaacgagccaaacgatcccttccgctgggatcttgccacgatcagcaaactgaagctccgccgcgcccggcgcgtgcggatcgacgaattggggcgggttcacacgatcccgcatgggacagtttagaaaatgggctaacaggcaggccaaccgctcgggcgcattccctaaaggaggctctcatggttggacggatactggaactgacgaagcccgggctttcggtgcacaagcgccgcgggttcctggcggtagatacaagcgacggcgaggccgggcgcatcgcgtttgatgatgtggaggcggtgctggtggccagtcccggaatggtctggtcgaacacagcgcttgccgaacttgcggcacggcaggtgccagtcatggtgctgggccaggacttcaccccggtggcggtaatgttgccgctcaacgggcatttccagcaggcgcatcggatcagggcacaggctgatgcgtcattgccgtttcgcaagcaggcctgggccactctggtccgccacaagatcaccgcacaggcggaggcgctcgagcgcgtgaacgagccctccgagcgattgcgacgactggcaacagccgtgcgctccggcgaccctgacaatcgcgaggcccaagctgcgcaggcctattggcctttgatgatggacaaggcatttcggcgtgaccgcgacacctcgggcgcgaatgccctgctgaactatggctatgccgttctgagagcagcgactggccgcgcgatcgtggccgcggggctgcatccgtccttgtccgtccatcatcgctcaggcggcgatgcgctggcgctggccgatgatctgatggagcctttccgccccaccgtcgacctgatcgtccgtcgcctttgcgcggagggcatcaccgaggtcgccgaggcgcgcggtgcactggtggccagccttgcggccgatttcccgacgtcacaaggcgcaagcccgctttctcaggttcttgtgcgccttgcgcaaagtctcgcccagtcgtgtgaaaacggcaaactgcgcctcatcttcccggaccggccaatccccatcgcctctgaagtccacgacgatgaatgaaaatggcttcaaacagctttcaggatacagaatcatgtgggtatgggtgcttttcgatctgccggtgctgaccagcgccgaacgcaagcgggccacgcggtttcgcaacgatctgttggaccttggctttgaaatggttcagttttcggtctatcttcggcacgcgtggagcaaggaaaaggccgagagctatgcaagacatgttggcgacgtcgtcccggaccccggccatgtgcaggtgctgttcttcacggacaagcaatatgccctcagtcaggttttccacggcaagcgtagatcgaaggcccctgcagaaaaaccggctcaactcgtgctgttttgagcaggcaaggagcgttttttctgcggctcagccaagaaaaagccccgcgcaacaagaggttgcgcggggtagatcctagcagaagaagcggcgtggccaagcccggactaggatggagcgctcaaacgggacgcctgtatcctagcagaagaagcggcgtggccaagcccggactagaccttcgggatcatgtcgatcatgatcatcctagcagaagaagcggcgtggccaagcccggactgaccatccggtcggtcgactatctggtcaatcctagcagaagaagcggcgtggccaagcccggactcgatcagcatcagggacatgttcagtgatatcctagcagaagaagcggcgtggccaagcccggactggttgaggagtggatgtcgtgaatggtctatcctagcagaagaagcggcgtggccaagcccggactgtttcgtcgtcatcagccgggtcacggggatcctagcagaagaagcggcgtggccaagcccggacccatagggcgcgagggcttcgtcaatatcgatcctagcagaagaagcggcgtggccaagcccggacataaatcccgacgcggtggccgcgccccgaatcctagcagaagaagcggcgtggccaagcccggactagctttccttgccgatgcgcttggcgatcatcctagcagaagaagcggcgtggccaagcccggacgggaatggccggcggtgtccagtttttcaggatcctagcagaagaagcggcgtggccaagcccggaccgtcacttgcagcgacgcgcctcaaacatcatcctagcagaagaagcggcgtggccaagcccggacagcatatactcgccattgatacagtatccgatcctagcagaagaagcggcgtggccaagcccggacgggcgcaaactaccccagtcgataccctgcatcctagcagaagaagcggcgtggccaagcccggacgtcacgctggcccaatcgcagaagcgcgaaatcctagcagaagaagcggcgtggccaagcccggacaagctgcgaaatcgccttcgcaaactgtttatcctagcagaagaagcggcgtggccaagcccggacgtaccgctataagcgccgccggtcgtgccaatcctagcagaagaagcggcgtggccaagcccggacggcgtgatcgtggtagccatcggctattctatcctagcagaagaagcggcgtggccaagcccggacgacggcagctgccgcgtctttgagcgcatgatcctagcagaagaagcggcgtggccaagcccggactcgacccgggcgagcgcgcggccgacaccgatcctagcagaagaagcggcgtggccaagcccggacatggtgcccgaagtcgcgacctgcacggccatcctagcagaagaagcggcgtggccaagcccggacagccaggctgagcggccaaccaccccaagcatcctagcagaagaagcggcgtggccaagcccggactgacctcagcggctgtggtgatacctccctatcctagcagaagaagcggcgtggccaagcccggacagatccatggcgccatcgccggaagtggcgatcctagcagaagaagcggcgtggccaagcccggacagggcgtctacgatggcactccctgccgtcatcctagcagaagaagcggcgtggccaagcccggacgaagacaacaagcgaccggtgctttatgtccatcctagcagaagaagcggcgtggccaagcccggactacaaaccggtgcgggttctgtggcccaacatcctagcagaagaagcggcgtggccaagcccggacgaacattgctgtgaactcgcctccccccccccccgctgcgcacatccatgaaatgggtttggatttcagggccgcctgcactggaaatggaactgcgaaacgatcaattcgtaaggcgcaattatcttcttattatcaatatcttacggaaattcaccaaaattgcgcaggcaacaggtccggagaatttcggccccgagagcacgcctccgggcatccgagcgcgtaggacggtgaacagcccaccccgcataacctttgaatataacggaaaaatccggccgcagccggatcgggagaactctttcgcaagggcaagtggcggagacgaagggattcgaaccctcgagacggtttcccgcctgcacccttagcaggggtgtgccttcgaccactcggccacgtctccgccgacccgtttaatggcactgaccagagggggcaaggggggaattcaccggttcaggcgttgaacaggaaatgtagcacgtccccgtccttcacctcgtaacccttgccctcgacacggaacttgcccgcctccttcgcgccggcctcgccgccgtgggcgacatagtccgcatagcccaccgtctcggcccggatgaagccgcgctcgaaatcaccgtgaatcaccgccgcggcccgcggtgccagcgtgccacggcggatagtccaggcgcgcgcctccttcgggcccaccgtaaaataggtctgcaggcccagaaggtcgtagcccgcgcggatcagacggtcgagaccggcctcctcaaggcccatctcctcaaggaacatcgccgcttcctcggggtcgagttggctgatctcctcctcgatccgggccgaaatcaccaccgtgcccgcgccctgttcggcagccatcttcgccacccgctcggattgcgcgttgccggtggcggcggcgctttcctcgacattgcagacataaagcacgggcttggcggtcaaaagctgaagctggctccaggcgcgggcctcgtcctcgggcacggtgacggtgcgggcggggcggccatcttccagcgcggcctgcgccaggcgcagcagcttgtcctgtaccaccgcctccttgtcgccaccgcgcagcttgcgcgacaggccctgcaggcgacgctcgatcgagtccagatcggccagcatcaactcggtctcgatcgtctcggcatcggcgatcgggtcgacccggccctcgacatgggtgacatcgccgtcctcaaaacagcgcagcacatgggcgatggcatcgacctcgcggatattggccaggaactggttgcccaggccctcgcccttggaggcgcccttcaccagccccgcgatatcgacgaaggtgatccgcgtggggatgatctgctttgaacccgcgatcgcggccagcttgtcgaggcgggcatcgggtaccgcaacctcgcccacgttgggttcgatcgtgcagaagggaaagttcgcggcctgcgcggcggcggtccgcgtcagcgcgttgaaaagggtcgacttgccgacattcggcagaccgacaatacccatgcgaaagcccatccgcatctccttgaacccggtttcacggggcttttaggcaaggcagtgcgcccgcgcaaggtacagcgggggtcagggcgggggcggggccgggtcagggcagcgtccgggtcgcgccccagacgcgcaccggattgcccgcgccttcggtggcctgggcgtggatgaggctgggttggcccatgtcttccccctggcggatgtggacgggcccctggtgccggccggtgtcgcgcagccaccccgtcagcgcagccgcggcggcgccggtggccggatcctcgtagacgccatgtccggcgaaggcgttgcgggcgtgaaagcgccccggcgcctcctgccagacaagtgcgaccgtcaccagcccggccgcctgcatgaaacgcgcgccgcggtcgaacgcgtagcgcgcctcatgcagcagcctggcatggccgagcgggatcagcaggtgatccgccccgccgttgatgcgcgcaaggccaaggcgcgcgtcgatatccccgggttcgaggccgaacagcgccagcgccgcctcggcctcggcggcgtcgaccgggccatgccgggtggggggcgaggtaagctcggcgccccagccggccccctcgcggcgtccttcgaccgaaatttcgcccgtgttgaggcgcagggtaaagcgggccggcccttcggactgggcaagcgccgcgccaagcgcgatcgtcgcgtggccacagaacggaacctctccctgtggggcgaaatagcgcacccggtagccatccgcctgtttggcggcgaaggcggtttcggaatagcctacctcggcggcgatcgactgcatctgggcctccggtggcaactgtgccccaagccagacgccggcgggattgcccccggcgccatcattggaaaaggcacagatacgctgcaacatccccagtcccccgtatgtccggcattgccaggaagctagcgccccgtgggcggaaggaaaatgaaacccggtgatgcggtggatcaacgcatcggaacacattgattttcccgcggccctcgggcacatcggatcggacatcgccgaggagacgccagcatgacccgcatcgataccaaattcgcgcaactcaaggccgcgggcaagaaggcgttcgtatcctacatcatggcgggcgatccggacatggagacctcgcttgcggtgatgaaggcgctgccggggcagggggtcgatgtcatcgaactgggcatgcccttcaccgatccgatggccgacggcccgacgatccagctggccgggcagcgcgcgctggaaggcggtcagacgctgcagaagacgctggacatggtggccgagttccggcgtggcgacgataccaccccgatcgtgatgatgggctattacaacccgatctattcgcgcggtgtcgcgcgcttcctgaccgacgccaaggcggccgggatcgacgggctgatcatcgtcgacctgccgcccgaagaggacgacgagctgtgcatccccgcgcgcgacgcgggcatcaacttcatccgcctggcaacgcccacgaccgatgacgcgcgcctgcccaaggtgctgcagaacacctctggcttcgtctattacgtctcgatcaccggcataaccggggcggcggcggcgcaggcggcgcaggtcgggccggaagtggcgcggatcaaggccgcgaccgatctgccggtggtggtgggctttggcatcaacacccccgaaaccgcgcgcgagatcgcgggcgtggccgacggctgcgtcgtaggatccgcgatcgtgaaggagatcgccgccggcaagaccccgaccgaggtggcggccttcgccggcgcgctggccgccggggcgcattcggcctgagccgggcgcggaaaaacgcttggcaagcgttttcgcaaattccttgagaaggaatttggcgcgggccggagcggccggcccggcccgcggcttcagccgagtttcgcgggcacctggcgctcgatgaagcggaaggccagcacgatcaatccggtatagaacatgtatagcaccgcgagcagcaacagcggctcgtagatgatgaaggtatcctgtcggatctgcaggctgacctgatagaggtcgagcaccgtgatcgtggcgatcagcggcgtcgatttcagttgcagcacggtctcgccgcccagggtgggcagcacccggcggatcgcctgcggcagccagatccggcgcaggatggtgaggcgcggcatgccataggcgcgcgcggcctccaactggcccttgggcacgcccagcagcgcgccgcgcatgacttcgccctcatagcccgcgaagctcatggtcagggccagcagcccgtagggccaggcttcgcgcagataggcccaggcccaggattcgcggatccacgggaactgcggaaacagagagccgagcccgtagtacaggaaccacagctgcaacagcagcggtgtgccgcggatcatcgagcaaaagcccttggccggcagcgccacataccagggccccgcggcctgggcgaggcccagccagatcgccaggaaaaggcccatggcccagctgagcaccagcatgtaggtcgtggtccaaagcccttccagcagcagcccgttcgcgacataggtgggcagccagctccaatccagggtcaggatcgcccaggccacgatggcgatgcccacggccagcaggaacagccggcgcggcagcagcatcggcttgatcagcgccctcatatcccgcctccgcgaatattgggctggccgcgccgcgcccggcgttcggccagtgcgaaaagccggcccgacagcgccgagatgatcagatagaggatccccgcggcggtgaagaacagcatgaaggccttggtggtgccaccggcctgcaatgcggtttcggtcaactcgttgaagccgatcaccgccagcagggcggtgtccttggtcaggttcagccacaggttggccatgccgggcagcgcataggccagcatctgcggcagcgtcacccggcgcgcgatctgcagcggcgtcatgccataggcgcgggcggcctcgacctggccatgcggcacggcaaggatggcgccgcgcagcacctcggtcatataggcgcccagcacgaagcccagcaccagcgtacccaccaggatcggcggcaggtcgatgcgcggccggcccatgcttagcaggaaacggttcacgatatcggggaccagatagtacagaagcaagatctcgatcagttcggggatcgcccggatcgcggtggtgtagatcgccagcagatccttgatgatcggcccgccatacagcttgccgaacgccccgagcacaccgatggcggtgcccaggatgtaggatccgatggcgatttccagcgtatgcgacaggcccgtcagcaaagcccccccccaaccggggggggacatcgccagaaggcccagcgcgtgacccggctcgaacagcccgaacagccagttcatccctcaggccttacttgccgccgtagatgtcgaaggtgaagtacttcttggtgatcttctgatactcgccgttggcgcgcacgtcggcgatccccttgttgaacttctcgcgcagcgcggtgtcggatttgcggaagcccgcgccgatgcccgaacccagcgtctcgctgtcatagggcagcgcgccgaccagttcgcagcaggccttgccctgcttggtcttcaggaaaccgtccagcgccatctcgtcggcgatggtcgcgtcgatgcggccggcggcgaggtcctggttggcctggtcctgggtctggtaggtcttcagcgtcgcggtcttcgagaagaacttcttcgcataggcctggttggtcgagccgacctcgacgccgatggtcaggcccttcatgctggccggcgtggccttgaacttggcgcccttgggggcggcgacggcggccggggtctcatagtacttgttcgagaaggcgatgaccttctcacgcttcttggtgatcgacatcgacgacatgatcacgtcgatctggcccgaggtcagcgccgggatgatgccgtcccaggcgacggtggtgatcttgcaatccagtttctgatccttgcagatcgcgtgcatcaggtcgatttcccagccctgccaatggcccgaggcgtccatcgtcgagaacggcgggtagggttcggacgcgacgccgaccttgatgaccttggcctgggccgtgcccacgaggccaagcgcggcgacacccgcgatgatgagggtcttgagtttcatgatcttcactctccgttggtcgttcggtttttcgctgttgttgcggcgggccttaccagcccaccgttctgaggaactgctgcagccgttccgatcggggatcgccgaacagctggtcgggcggtccctgttcctcgatagtcgactatgaacaaaggtttcaggcgccgagttcagcgtagggccgctggtttccgtcgccgagcgcagccagaacggcggtcaaaatcgcggtgattatggctcggaggtgggcgaggatcttgcggatgttgtggccgcagccgcagagcacggcgaagatcgcgtcgccgatggtgcccttcagcggacagcgggcgagacgcccgtcagatttcatgtggccgatctcgggctcaatggcgctgcggcgcttgagcagtttcgccagcgcgggcgtgatgccctttcgggttccgctgatcagcaccttcgtcgtctccaccccgtgcccgcggtaaccgcggtcaacgacagccaaggagatcttccggtctgtgagggtctcgacctgctcgagcgactcaccgagggtgtggccgtcgtacgggttgcccgggtaactgcgcgtgccgaccacgaagccccctgtcagggtcgtggcgatgctgaccttggtgccgaactcatagcgcacccgcgccttgccctttgagatgcagtccacctccggctcatgcagggcgtagatcttgccttggctcttcggcccctggtgcaggagtcggctaaccagccagagagcttcgagaacgcgatcgcgcaaggcgccatccgggatctcgtcgaggtggcggcgcaggtcgcgcatgacacgacccgtgtaacccttgagctttcgcagcgccttgcgcatgcgccggaactgccgggcatgggcgtagcggcccacctgcatggccagccggggcgcgagccgattgtagctctgccgcagctcgatcccggcctccgcggccagggcaaccagctggcgccgggccttctcgtag

SEQ ID NO: 3214 - DNA, 23237 bp, synthetic construct
  misc_feature 1..23237: note = Synthetic
  source 1..23237: mol_type = other DNA
tgacacgcccgcaccgtcgggatggtcatgtcaaagcaacttgcctgatcttgtcgaaagagaggtgtcaaggcggcgctgacactttaactcgaccgtgggtgtgatggccggtatttgtccttgaatgagcaagatttcctacgcccgccaccgatttccatcgtcaataatccaacgggcgctctggctctattttcgctttccgctgagcttacgggacgtcgaggaaatgctggcagagcgcgggatcgatgtcagctatgaaaccatccggcttgccgtaaagcccgttcacccactcattggcgcaggcgggcgataccccgagcggccagtttttctgatttcctatcgcactgggaacacatcaggccgaccggcgaacaggcggcggaacagagctaccttttcgtgcgacggcgaggcattcgtgacgggggcattctcgaaagagggctgtttcacagttggcgcgggctctgcagccagacgagcctcaagtgcctccatctcgcgctgaagctcacgccgctcggcgtccagatcggccaggcgtgctcgaacccgcgccaaatccacttcgatgtcgctctcgtctgccacccgcgatttccacccaaacctttccgtcccgtccagcataattcgggaaagcgtctgacgtaagcaggtctgcccggtcatcggcccggccaccgaacggagagttagagatggagttcatgggggatgtccttctgcggttgagagcagaggcatcatgattatccaaagcggctctgttgcacaaatcccgtgagggattcatctcgtgaatccagcatggtagcttggctgcatgagcagacccagacccccgacttacaagaccaggaactggtcagccgacaatgaagcgctcaagcgccgtggctcgctgacgatctggttcgatcccgagatgagctgtgcttcgtaagaagttgagacggcatcaagtccttgagtttctcggacggctgccgtcctgcgtcgttgcgatggaggcctgtgatggcgcacatttctgtggtcgtgagctcggcaagctgagccatgacgttcggctcatcccgccagcctacgtcaagcccttcgtgaagcgtcagaagaacgatgccgccagaatcagaagtgcccgttgcgcaaccgctcagccagatcgtcgcgagaacgaggacgacgcaccgccgcctcaagcatccgtcgttggggttcatgggttctctccgtggtttcgagccgctcggcgcaaccgcgccgggtctcgggatgccgcatagctctcggtacagcggcgctggagcgcagtgcgatatggccgttggcgaggatgaccacttatggtgcgatatggttcacatagaacctcaaaatcttcttacggacatctgtcaggttacctcatcgaggcgacaagaacgcggaataaattggggggcgggtcaccctgatgatccgcgcgccgccgaattttgaaaatgctttcggcgttcgcggtttcgggtagtggctcgcatgcgccagacttggacggccaaagcgctggttgtgtcgtagccctgcatgagcgtcatgctcccaagggggatccggtcgtgaaatacaccacggagcggccccacccaggacgatccggcgcattcactgcgtcttggcgcgcatcacggtccggtcgaggtgcgcgcgctcggcggcgcggggcacacctgaagcgaatcgactgccccggcgtccctgatggaattcatcagatgactgcagtcagccgattgtgttgaagaagtcggctgcgaggacgcgttgactttcgcggtcgcgtccgtctgggcttacctgtcaggccagatcgagggatcccgggatcagtttcgcgagtttccggaggttttgggcggttgcggcgaggaggaactcgtctctggcgccgtttggtccgcggaggcgcagtcggtcgagccggagaatgcgtttcaggtgggcgaagagcatctcgaccttctttcgtcgtcggctggcatcgacataggcgtccgtggtggcgatgcggcgggcggcgtcgcgcgcggcttcgtgaacatggcgggagatcttcctagtcggctggttcggggtgcattgctccttgagcgcacaggccgaacagtcctgctttcgagcgaagtacttgcggaagccgtccttgccgatcccgtcgcggggcgtcttcatcttgcgccagtacttcttcagagccttgccgcccgggcaggcatattcgtcgcgctccgggtcatagcggaacgcggcgttcgagaaggtgccatcccggcgctccgacttgtcgattacgggtatgtgcggttcgatcccctctccgacgagccaaccgagcatttcgccagatccgtaggccgtgtccgccgcaagccgctccggggtcagaccgaacctgtcacgggtccgcgcgatcatcgtccgcgtggcgccaacctccgctgtgcggatagacctggtggcctctacatcgaggatcacgccgtgctccgtgtcgatcaggtagttgtcggaataggcaaagaaggctggccccttcctggcgccggtccactggctggctggatcggcaaaggacgtgaacttcgggtcaacctcactcgccgctccgaaggcggcatcgtcgagcacgttgagatactcccgcacagcacggggtgccgcctgcacatcgatctggcctggatcccaatcggccttggctgctgcgtactgcctattggcatccgcccggatcaggctggcgtcggtggcaaaggtctggccaccaaccaagccctcggcaatacagcgggcgacaacgctctcgaacaggtgccggaagagatcgctgtcgcggaaccgcccatgccggttctttgagaaggtcgagtggtcgggcaccggatcggtcagatcgagacgacagaaccagcgatacgccaggttcagatgcacctcctcgcagagccgccgttccgaccggatgccggaggcataaccaacgatcagcatccggatcatcagttccggatcgaccgagggcctgcctgtcgtgctgtagaacggcgcaagatgccgacgcatgtcgccaagatcgacgaaccggtccatggctcgcagcagatgatccggcggcacgtgatcctcgatagagaactcgtagaacagcgcgctctgcgctacctgcctcggacccatcatcgccagctctccctcgcctcgggagaagtgaatcagcggtgaaagcccggttcaagcagagtttttcaacacaatcagccctttttggacattccaaacgggtgcagcgtaagtaacccctcctcgctaagggccgcgcctatggccagccgtcgacccaaatgtgctgaggggggagggtcgcattggcaatcatatctggctgaataatgatttgaccgtcacaaatcataacggctggtcccacgcagcgatgctgaaaacgtggagcaattttttcgcccagagacatcagcttcttggatattttttcggcaggcatgcttggagggtgtagtttctgcgctgagggtagcagcacaatgtggtcgtagattacagcaaccggaaagtaatcttcatcaaacctcataagcccgatacccggttctgtgatttctcgggcaggggtttcaataagaaagttccaatccaaaatgtattcgtctgggttcagaatctgttctcggacaatgtccaggattgactggaggacaaaggaatacccgaaattcttgaaccaaagaccatacgcggcagtaagatacccaacctgcaacgacttctcgttggcaaaggctggcatagaaaattcaatcttgacctccgagggtttgggttcgcgccagtgcgcatcaaaatctgctgggttggagcgttttcggtccgagtaaaactcaattgctccgtcctcgccgagacgcatcaagccattcaatttccgtccgttagcgacgatcctagctttctgcttcttcgggtcttttgggaatggcgcgccgccctcgttcaacgtaatccactcaacgagccaatttgtttgcttatgcccgaatgtgctattgcatcttgtgcagagaaaagtcgtttgttgcccgccgacggcagcaggtactatgtgttcttcactaatcgcattctctgcatccgtgctgccaaagctgtcgacgggtaagtctcgaagacatgccggacacctaaatgagcccaagagcttggcgtcgaagcgcgcaagttcttgagatatctcgtaaaggaatttgttctttgtcatgcgtgtcgctcaattggctagtgcgcaatgctattctcttagctgcaaaagccgcaagcccctccatgtctgcctttggcaaccagcttggccaagtcgaggtcaactgtcggggcggttctggacagggcgtcgcacgatttacctaaactctacgcccacgggatgtgccagcttgtggcagatgcggcacgccgcgttaattgagacccacgactttgcaaattccgctccctgcgcagagctgccgcccaacactgacttggcgagcgctccctatcgctgtgtcttgcgccagtgatgccaaagagtcagaggcgacccctcttcgagccctcgaccggggacttcacactcttggtctttcgacaaagatcggcccgtcaagaccggcgtcactcctcgaaccgtcaccgaaaccccgaacacggcgaaatggtcacgcccgcgctgacggtggtcaggtatccttgcgcaaccggacgcctgcgccgcccccattctctgcgatgaactcgacgccggcggcttcgagggctgcgcggatcttggccacgttatcgggattcatgtcataacgcccggtctcgaaattagagatcgtgttgcgatggacgccggaggcttttgcaagatcggcaagagaccaatttaatgctccccgcgccattcgcacttgtgcagatttcacaactaagctatccttgtgctattgtcacatgtgacagtagcacacaaggagatcaagacaatgacgaacattcccgaccacgtccgccgaaatcacgaaagaacctccgaaagactggatgaggcgcgctcaatgctgcgcgccgtcgagcagatggcagaggctgcaaggctgccccattcgcccgagactgaaagtatgtttgttctgattgcagccacgcaagaccgtttgttcgaggttgaccaggctcacgttctcgaatgggtggggcacggcggcaagacggccgagatgatgctagaagaacccggtgaggccgaggacgcccagcaatgagcaactatcaggattcatgcacggtagctgcattatagccacagacagggcgcgagtgacgttcacaccagactggaaagggccgggcgggattcgcccggtctttttcatagctgcaagatccaatgataaatccggcggcaagggaaaatccacataaggtccggcaaaacaaaaagcactcaaccttcgctaccttcatcaggtagcagtttttccagccggacacgctcctattgcagtgaaactatcgcttatcagtaccttttggggattttcacggggcgtttcactgcaaccgggcattgcattttaacgcccatggcatcagatgcttccctgcaaccgcctgcaaggaggccctgtcttgacccaaccatcaaacgcaaactctttcatgacgccaaatgatgcagctgattatatcggagtgtcagcccggaccctttcaagatggcacctgcaacgagtcggtccgccgagaatccgaatcgttggtcgtgttttttaccggcaagcggctctggtggactggatgataaggaacgagcacgccccacttcgttctttctccacgggggtgatttgatggacacagttacagtcctgagggccaggaacacctttggacccgccacttacgcggttgttggcaaacatatttccaaagatggaacaataaaaccccttcagaaacaggcagcttgggaagtgcacacatacgaaatcaatgacctcgacggattctacgatttgcttctagaggtgagcaaaacaaaccactccatcctcctgaggggaaaattcaacggtggcaaccatctgcattgtcgcagaaacaaggagaattttgcctcaatttccaaaaattggatgatggtcgatattgacaaactcagggctcttgaggggatgaaaccggacagtgatgaggctattctgtacgcgattcagcagttgccaacagaattccatgatgctgactgtattgcacttttttcgtcatctgccgggctggcaggagaaaaaataaagctccacctaatgttctggctagaggagcctcaagacgacaatacgcttaggcgttgggcaagcagcacgaacgaccttgttgattttagactctttaactccgtgcaaccacactatgtgaccgatcccacgtttgaggatccttccatggatccatttaaagatcgcagcaggttaacgtacttgcggaaaaatcgcaggaccgttccggtctggtttctggaagattttaaaacccccaccccctctaagatagatcctaagccactgggggttttaaaccacgccggggccggaaccgccggcccgacatcatcgaccggcaagttgatcgacaatcgtgaggattttctcctcaaacttcgttggcgcttgatgcgaaaagggtacgaagactttgaccagttcgttgccgatgtcttcgagaagttctgcgcgggcgccgaactgggtgtgacggaaacttcggacacagactgggatttcgaactggtcagacgaaagtgcgagcaggaccgaaaccgtttgcccctgcacgtcggaccaaggatacagcgcacctatgattacctcccgcgcgaaaaggcccaggaacaacttgaggctctgatcacgggcttcctggcagcaccgaaaaatcttcttatcagggcagaggcgggcctcgggaaatcatctgctgcccagcgcgccctcgcgcagcaccctgatattggccgcaagaatatcgagatttacgtccccaccaagaagctcgcccgtgaatgggcggaggctcttaaaagggaaaatgaagagctcgatgttcgtgtcgtcgaaggccgctcggaagacacttgtcacaaatcagagttggtcaagaaggtcgcgaagctcggtggcggggtgagtcatcacctttgccatgacgaaaggaaagatcaaagctgtgagtactggggcagctgtccttggtcgactcagaatcccaatgacgcaaacgcgattcggatcgtaacgcacagccaactgaagctcgaacggcctgagaacttccctgagccggacatcatcattgtcgatgagggtattctttccgaacaggtggtgcctgaagagatccactttgaacgcctcacaagtatgctgggctacaagcagaccctcggtcagaagaacttctacggccccgcactggatggctccggcgataccctgctcgaccatcgcgatcaggagcaagttctccgcgtcggcgagttgatttctgccggccttaatgaggcaacccctctgctggcatacctccgttcgaaacaggtatgccctcttctactcgagcgctgtcgcaaaacgatcagcgccttttctccgttccctcggatttcacccgccgatagcgccgaccgtcaaagttcatctctgaacaaggcgaaatccgaacaagtcgccgaaattcggctcctgagtcggctgttcgggcttttagccatcgaaatggagactggtcgcaacgacagtcgaactatcaccaagaaagatggctgggttaagatcaggcaccgtcagaacgtgaaacgcttggaaggtatccccacattgttcctggatgccgatggtgagattgaggtgttgaaaaaatccgtccctggcctcacagaaatccggatctccgtccgatacaatgcggagatttggcaagtatcagacaggtctttctccaagaactgtttgggtatcggagcagaggctttcgaagacgccctcatagatgaggttgaaaggtttgtcgccaagcgccctgccggtcaatcgacgctcatagtcacatacaaggactttcaagaggtcctcaccggaactggcgaaggcttttccaaaatgtccgatggcgtcacagtgggacacttcggaaatattaggggaaccgatgactacaaaaacttcgacaatattgtggtcatcggccggaacaggcctccggaagatgtcatcggtctgaccgcggctgcgcttgactttgacaatgccgacgagatctccaacgatctcaaagcagcggtctacaggtcaaaggtcacgagtgaaaccaaccaagctgtcgcgcgtcttaggcttgtttggaatgatacgccgaagaccgttcatctgctttccaacgaagaagtcccttttacagttgactatagcgttacatggcaacaactcttggaagacaaaaaccggatgtatcaactattccagcgttataatgtcgtaccgttgagtgccgattggttggctaaaaacgcccccacccttttcgacacgaagaaagctgccgagagatggatcgaagacaactaccccaaaggaaccgaagacggcactttccgcccgaaaggcgcccagggcccccacaagcgcttcctgatgcaccttgatacccttgtgccaatcgatgaattgatagggttgtttgggcctctgagcgcctatgagggaccaagtccaggcatctttatggatggccgtctctggcggcatgcttatactgatccggaattcgcgtccttgtatgccactggaattttttggcagagcccgttgctcgtacccaagtgaaattcattcgaaacgtctctctgaattttaagccaaatggtttagaataatcaaaagatcggatacaaatatgaacaaatgtttgggatctagcctattcagagacagctcgacttggccgaccatgccaccgtggtggttgctctcttccccacaggtggcagccttgatcaatgtgacctcagccacgctacatgtgtggcgcgtcaggggcttgggccctccatttgtcccgccgatgtttctgaagccaactcaaggcgacccggttttctaccaatacggtgccctgcggagttgggctgctcagcgcatggggctggtcttggaatttgaggaacaagttcatgacttcttaaacgaggcggcccacagcgtagccgctagccatggttcattgagagcgaagatgaacatctttgacgattttttcgcaaggaaccgaacgcggatccggcgtggtgacaatcctttcttgatgtctaaagagaccgtgctgaaaatcgatgttttctttacgcgtcagccaaagtggctggtcgataaatccaccgcattttcctctgagtgaaacagccaagttccaggattatgcctcccacataggctccgatgaacctcagatcgagcgcacgccgttcagcaccctggtcaaggcgctggcccgtgcgttccgctggaagaggatgctggactcgggcgacttcgccaccatcgccgaactggccgagcgtgagggcatcgcatcctcctacatgacccgcgtcctgcgcctgacgctgctcgcgcccgacatcgtggaagcgatcctggacgggaagcaggggccggaggtgtcgctggtgtgcgtgctggagccgttcccgctcacatgggagcaacaaacctctgctcttgggctcgaaaacaagtaggggcaggccgcagcctgccccaatggtgtggtctaaaccttatcgcgggaaagaccacgccgcttcttctgctaggaatcgcaccctactctgggatagcctgccatggcaagtggcagcaggtgcagtatgaagcgtttcgctttcgatattggttcaggttctcttgggtgggcggtcttccatgtggataatgctggacgctcgcccacggagttgatcgatcttggtgttcgcatttttcccacggggcgcgacccccagtcgagtgaatccaatgcaatggggcgtcggcagccgcgccagcaacgccggcagatcgatcgccgaaagaagcggagagtggaactcgaagagcggctccaggcccatggtctgatgccggcggcgggcgaagtagacggccgcgcggtcttcttttcaatcgatccctactgcgcacgtgatcgcgctgccgggggccgcgcggagttgcaagacctcggacgggccatctggcacatgtccaagcaccgcggattcaagagtaaccggaaagccgatcggacaaacgaggacgatacgggcaagattgcagatgccgccaaggcgctacgcgagaagctggcgaatgccggggcgcctacttacgggtcttggctcgcagggcgtcatgcacaaggcgagcccgtccggatcaggccggtgggtgaaggcgccaagacgagctatgacttctatccgacgcgcgccatgctcgaagccgagtttgatcacatctggcgtctgcaatccaagcaccatcctagcctgactgaagaggcacgagagaagatccgcgacacactctttttccagcggcctctgagaccggtgaagccaggccgctgcactttttttccaagcgacgaacgcctcccgaaatggcatccgctggcgcaggagttcctgatcctccagcaactcaacatgctgcgatttctggacgagagaggcgagcgccctcttgataaagacacacgcgatctggtgatgaaccacctcatggcaggcgagaagctgacctgggccagattgcgaaggacactgaagattcccgcgggaaccgagatcaaccttgaaaagggcgggctgaaggaaattgcccacaacgcaacggcctcgcggctagcgggaacggcaaaaaaacccggtccgctgtccgatctctggccacactggaaagaagaagcgcggaatatgctcctgtcggtcctcgacacggcggcatcgccagaagaggctatcgaccggctgaccggtgaattcgacctgccgcgcgatatagctgagcgggtcgagaagatcgccctgccaagtggccatctgatgctcgggctgcgtgccacgcgcgtgatcgttcaggcgatgcgggacgaggttgtcgtatacagcgatgcaatagagcgcgcgagcgggcgtggcttgttcggcgatggagtcgttgttcaccattccgacctgcggccgcaaggcgatccgggcctcccgcgtttgccgcgatactacgaactgccagccctccagcgcatgatcggcgcgggcaccgggaatccggacgatccgccagaagtcaggttcggaaggatcgccaaccccacggtccacatcgcactcggtcagtttcggcgggtcatgaacgctctcattgaccgctacggcaagccggatcaggtcgcgatcgagaccacccgcgacatggcaaaatctgcgcgcgaactgaacgagatcgacgccgagatcaggaagaacaccaaacggaacgacgcgtggcgcgaggaactggaggaaagtggcatcctctccccaggtgcacgggcgggcgaccggctcatgcggatgcgtctctgggaggaactgggcagaacgcctgccgaccgtttatgcccctattcgggtgtgccgatcagcctcacccagctccattccgatgcagtcgagatcgaccacattcttcccttcgaggacaccttcgatgacagctcgaccaacaagaccgtctgcttccgtgccgcaaaccggatcaaaggcaagcgcgcgcccggcgacgcttggtcaggcgaagaactcgaagccatcatcgagcgtgtgaaaggtgcgccgggaatggcaaggaaactatggcgcttcctgcccggagcgctcgagaagtggcaggcgcagaggggctttgaggaccggcaactgcacgcgaccggatatctggcaaaagtggtgcgcgcctatgccgaggcgctgttcccaaaggacggaacctcgaatatctggatgcctacagggcggatgacagcgatgctgcgcaagcggtggggattgcacctgccggatcacaactcgaaaacccgcaacgatcaccgccatcacaccctcgatgccgctgtggtcggcgtgatcgatcggcgcacgatccagattttgcagacacatgcacgccggatcggggccaaggaactggaccggctccttccggacccacccgaacccttcgccggatatcgcgatcaggtgctggagagggtcgcaaagatcaatgtcagccaccgtccggaccatacaagtggcggcaagctgcatgaggacaccgcctatggtctggtgcaggacctgccggagaaccgggcggcaagaacgatcggcaacctcgttgtgcgcaagccggttacagccatgacagcaaaagagatcggtcaggttcgcgaccagaagctgcgcgaggagttgctcgccgcaacggagggtgttcgcagtgacaagaaaaagttggctgaagcgctgaaatcgtggagcgagcgcaccggccatctgcgcctcaggatcctcgttgaggacaagagcgcgcgacctgtacgcgctcatgccggcaagccacacgtaggcaaaccttacaagtggatgatccccaacgagatcgcctatatcgatgtgctcgaggatatcggcggtcgttggttgcatcatgcgaccgacatatggaccccacaggacgccgagccggaagattggcgaaaggtgcatcccgaggccacgtttgtcatgcggctattcaagaacgatacggtgcaggtcttcgagcttgataatgaaggcagtccgataccgggctcgaacatggtgaagcgcgttgtccggatggagccgagcgccaatcgagttcgcctcgcgtcgtgccgcgacgctgggaaccttgatcagcgacacaaggacgaggacgacccgtttcgttgggaccttgcgacaatcagcaagctcaaggcccgccgtgcgcgacgggtgcgcattgatgaattggggcgggtacggatcgtgccgcatgggatgatctgacgaaaagggcagcctttcgggctccaccaaaaggaggtccgtcatggttggacgcattgtggaactgagccgcacggggcttgccgtgcacaagcgccgcgggtttctcacggtcgatgaaagcggaaacgaagcggggcgaatcggccttgacgacatagaggccgtgctggccgccagccctggggtgatgtggtcgaacgccgccctaagcgaactcgcgagaaggcaagtgcccgtcatggttctcggggccgccttcaagccggtggccgttgtcttgccgttgaacggtcatcatgctcaggcggagcgatttcgcgctcaggccgacgtgacactgcccatgcgcaagcgggcctgggcctcgatggtccgtcacaagatcgccgctcaggccgaggctctggacaggatcggccaaccctcggaacgcttgcgcagactcttgactgcggttcgctcgggcgacccggacaatcgcgaggcgcaggcggcacaagcctattggcccctcctgatgggacgggatttccgccgaaaccgcgaggcggatggtgttaacgcggtgctcaactacgggtatgccgtgcttcgcgcttcaacagcccgcgccatagtcgccgccggtctgcacccgtctttgtcggtccatcaccgctcaggcggcgatgcgctggcactggccgatgatctcatggagccgttccgccccacggtggacctgattgtccaccgccttagggcagaggggcgcgactgtgtggaggatgcccgcgaggaccttgtcgcgtgcctctcggccgatttcccgacccgaaacggggccacgcccctttcccaggtccttgtccgcctcgcgcaaagcctcgcgcggtccttcctcgatcacaagctgaagctggattttccatcccgaccgctgccggacatggtgggcgagtccgatcatgcctgaacgctacaaggaactgtcaggatatcaggtcatgtgggtctgggttctcttcgatctccccgtaggcacaaaggccgaacgcaagcgcgccacgcggtttcgtaacgatctgctcgatcttggcttcgagatggtccagttctcggtgtatcttcgccatgcgtggagtcgggaaaaggccgaatccttcgcccgacaggtcggggacttcgttccggaggcgggccatgttcaggtgctcttctttacagacagacaatacgcgcaaagccatgtctttcgcgggcggtcccgaccggcaactcctgatgaaaaaccgcgtcagttggccctgttttgaccgccctgcgttcaattctctgcaaggggaaggcagaaaaacaccccgcgcaacagagggttgcgcggggtgtatcctagcagaagaagcggcgtggccaaacccggaccagttgggcctgtcgggcgttccgcaggagatcctagcagaagaagcggcgtggccaaacccggaccagccgcgtcagatcccacttgccgcgctgatcctagcagaagaagcggcgtggccaaacccggactaaccatgtgttcactttgaaagcggttgatatcctagcagaagaagcggcgtggccaaacccggactggcgtgccgtgaaatagttccccccgctggatgcattgtcctacaatcacctacccacggcgtgagaacttccgaacctggtcgcggcagacgcaaacgcgacaccaatccaatcaatttcggaggctggatttttttctatcttacagaggcttataagaaattcaccaaaatggcgcagtcatgaggtccggagaatatcggcctcgagagaccgcttccgggccacttggcgcaggggccagtgctcagcccctcccacataaccctcgaaaacaacgggaaaatccggccgcagccggatcgggagaacgctttcgctggggcaagtggcggaggggatgagcttcgaactgtcgagcaacaaaaagtgagtcaatgatttcggacaccagccggacacagcatttgaggctgacactagaactccgcctaatttattgattccagtggtgagccgtgcaggattcgaacctgcgacccactgattaaaagtcagttgctctaccaactgagctaacggcccactcaagcgcggtgtctagaaagaggtgcgcggggggtcaaccccgaaaacgcggcccgtgcgcggtcggtgctggaaatccgctcgccgcacgcgtatatgcgcgcgcatggacgatgcgcgcgataccgggctgcccttcatgaagatgcacgggctgggaaacgacttcgtcgtgctcgacgcgcgcgcgcgcgccatcgtcctgtcgccagcgctggtcgccgcgatcgccgaccggcggcgcggcatcggcttcgatcagctcgcggtgatcgcggcgggcgagaacggtgccgacgcgcatctcaccttcttcaatgccgacggctcgacctctgccgcctgtggcaacgccacccgctgcatcgcgcgtcacctgatggacgagaccggcaagacggcgctgacattgaccaccgcgcgcggcaacctgagcgcggtggacgcaggcgacggcctcacctcggtcaacatggggcagccgcagttcgactggcaggacatcccgctcgccgaggcaatggagacgctggagctgcccatcgagggcgggccaacggcaaccggcatgggcaacccgcactgcacctttttcgtcgaggatgcagaggccgtgccgctggaccggttcggcccgcgctatgagcatcatcccctctaccccgagcgcaccaatgtgcaggtggcgagcctcgtcggccccgaccatatccgcgtgcgggtctgggagcggggcgtggggcttacgctggcctccggctcgtcgtcctgcgccgtggcggtggcggcggcgcggcgcggcctgacggggcgcaaggtgcgcatcacactggacggcggcagcctcgagatcgactggcgcgaggatggcgtgtggatgaccggcgagacgatgcatgtcgcctccggcgtgctgacacccgcattcctcgcggggctgtcatgagcacgccgcgctttgccactcttggctgccgcctcaacgcctacgaaaccgaggcgatgaaagacctcgccgggcaggtggggctggaaaatgccgtcgtcgtcaatacctgcgccgtgacgtccgaggccgtgcgcaaggcgcggcaggaaatccgccgcctgcgccgcgagaacccgggtgcccgtctcatcgtcaccggctgtgccgcccagaccgagcccgagaccttcgctgcgatggacgaggtcgacgccgtcatcggcaataccgagaagatgcagcccgatacctggggccgcctcgccgccgatttcatcggggatagcgagcgtgtgcaggtcaacgacatcatgtcggtgaccgagaccgcgggccacctgatcgacggcttcggcacccgttcccgcgcctatgtgcaggtgcagaacggctgcgatcaccgctgcaccttctgcatcatcccttacggccggggcaattcgcgctctgtgcccgcgggcgtcgtcgtcgatcagatcaagcggctggttggcgctggctataacgaggtggtcctgaccggcgtggacctgacaagctggggcgcggacctgccggggcagcccaagctcggcgatctggtgatgcgcatcctgaagctggtgcccgacctgccacgcctgcgcatctcctcgattgattccatagaggtggacgacaatctcatgcaggccatcgccgccgagccgcgcctgatgccgcatctgcacctgagcctgcagcatggcgacgacctgatcctcaagcggatgaagcggcggcacttgcgcgacgacgcgatccgatttgccgaagaggcacgccgcctgcgccccgacatgaccttcggcgccgatatcatcgccggattcccgaccgagaccgaggccgcgttcgaaaactcgctgcggctggtcgaggagtgtgacctcacctggctgcatgtgtttccgtattcaccgcgccccggcacccccgccgcgcggatgccgcaggtagacgggcgggcgatcaaggaccgcgcggcgcggctgcgcgcggcgggcgccgcgcaggtcgcagcgcatctggcggcacagcaggggtgtcgccacgcggtgctgatggaaaacccgcgcatgggccggaccgagcaattcaccgaggttgccttcgacagcgaccgccccgagggcgcgatcgtcgccgccaccgtgaccggccataccggcacgcagctcaccgccacctgaaagccacgtcgcgatgcaccccaaccccgcctttcgcaaggccgacaaggccctgaacatcgcctttgcccgcgaccagggcttcggcctcctggccgtgaccaccgacgatgcgccgctcgttagccacatcccgtttctgctttcggaggacggcacgcgggccgagttccatctcgtgcgctcgaacccgatcgcgcggcttatcgcgacaccccatcgtgcccggctcgcggtgcagggaccacactcctatgtctcgcccgattggtatggcgtggacgatcaggtgcccacgtggaactatgtcgccgtgcaccttgtgggcgacatcaccttgcagccgcaggagcggatgcgcgacctgctcgaccggcagtctgcgcagttcgaggcgcggctcgcgcccaagccggaatggcgggcggacaagatgacacgagaggtgcttgaccggatgatgcgccagatcgtgccctgcgagatgcgaatcgacgagatcgcaggcacttggaagctgggccagaacaagcccgacgacgtgcgcctgcgcgccgccgacccgctggaggcggcagggctgggacaggaggtggcaacgctcgcccggctgatgcgcgcgccctcgtcgtgaggcggccacccggttcaacgtgacgcgtcagccgatccccgaagagtcctgcgccccgccctggaggcgcccttccagcgacgccgccagcagcgtacgcgcatactcggtacgcggttcggtaaagagcgcctcggctgtgcccgcctcgaccacgtcgccctccttcatcaccagcacccggtggctcatcgcgcgcaccaccgcgagatcgtgactgatgaacaggtaggccagcccgtatttcacctgaagatcgcgcagcaggtccacgatctgcacctgcaccgtcatgtcaagcgcactggtcggttcgtccaacaccaccagtttcggccgcaggatcatggcccgcgcgatcgcgatcctttggcgctgcccgccagagaactcgtgcgggtagcggtccatcgccaccgggtcgagccccacctccaccatcacctcggccaccagatcccgctctggccgtccgccggggttgccgtgcacgcccagcccctcggcgatgatctgcgcgcagctcatccgcgggctgaggctgccgaacgggtcctggaacacgatctgcatctcggcccggcgtctgcgcaattgcttcgtggaccagcgatgcacgtcctcgccggcaaagcggatgccgccttcagaggcaatgagtcgcatgatcgccagcgcgagcgtggtcttgcccgaccccgattcgcccacgatccccagcgtctcgcccgcacgcacgcttagagtggcgtcattcacggccttcacatggcccaccgtccgcttcagaaaccccttctggatcgggaaccagacgcgcaggccctcggtttcggccaccacctgcgcgccctcgggcaccggcgcgggcacgcccaccgcctgcgcgcccagcagcttgcgggtatagggatgctgcggcgcgtcgaacacctcggcgagcgtccccgcctcgacgatctcgccatccttcatcacgcagacccggtcggcgatgcgccgcacgataccgaggtcatgggtgatgaacagaaggcccatcccctcgtcgcgcttgagattcgccagaagctcgagaatctgcgcctggatagtcacgtcgagcgccgtggtgggttcatccgcgatcaggatatcgggcttgttggcaagcgccattgcgatcatcacccgttgccgctgcccgcccgacaattgatgcgggtaggcccccagacggctcgccgcctcgcggataccgacccgctccagcagatccacgatgcgcgcgcgcgccgcctcgccggtcagcccctggtgcaactccaggctctcgcgcaactgtttctccagcgtgtgcagggggttgaggctggtcatcggctcctggaagatgaagctgatatcgttgccgcgcacctgccgaaggcgccgctcatccgcgccgatcatctcctggccatcataggtaacgctgcccgtcacctccgccgatgaccccaggagcgataccgtggacagcgcggtgaccgacttgcccgagccgctctcgcccacgatcgcaaccgtctcgccccggtccaccgagaacgacacaccacgcacggcgggcaccacctgcccgtcctgccggaacccgacgctcagatcgcgaacctccagcacgctcattgaaaggtctttctcggatcgaacgcgtcgcgcacgccctcgaagatgaaaacgagcagcgacagcattattgcaaaggcaaagaacgcggtgaacgcaagccacggcgcctgcaggttctgcttggcctgaagcgtcaattcaccaagcgagggcgaagacgacggcagcccgaagccgaggaaatcaagccctgccaagagcgaaatcgtcccggtgatgacaaagggcagcatcgtcagtgtcgccaccatcgcgttgggcagcatgtggcggaacatgatggtgatgttgcccacccccagcgccttggccgcgcgcacgtattcgaggttgcgcgcgcgcaggaactcggcgcgcaccacgcccaccagcgccatccagccgaacagcacggtgatgaccaccaatagccagaaacttcgcggcaggatcgcgaacaggatgatgatgacgtatagctgcggcgtggaggcccatatctcgatgatgcgctgaaagaacagatcggtcttgcccccgaaatacccctgcaccgctccggcaaagatgccgatgaccgaggacaggaacgtcacgatcagcgtgaacatcacggacaacctgaagccatagagcacccgcgccagcacgtcgcgcttggtgtcgtcggtgcccagccagttctgctcgttgggcggcagcggcgccgcgccgtcgcgatccacgatcgtatcgtagctataggggatgggcggccagatcgaccaaccctttacgatctcatcaccgccgacaacgccatcctgcgcgtccgccatcacgccctccgggtcgtcgaaacaggtatcgagcccgccgctcgcgatcaggcactgcacctccgggtcacgatagatcgcctcggtccgaaaatcgccgccgaatgccgtctcgggatagaaacgaaagatcggcatgtaatactcgccgcgatactgcacgagaatcggtttgtcattggccacgaactcggcacagagggtgatcgcgaagatcaccgaaaagatcaccagcgaccagaacgcacgcccgttgcgccgaaaattccgccagcggcgctggttgagcggcgacagccggatcaccgtgcccctccttcatcttgccggaaatattccgggggagtcgcgccaaaggcgcggcgggggcagcgcccccatgatgcgccacccatcctcagccctcccgcttctcgaagtcgatgcgcgggtcgaccagcacatacatcaggtcgctcagcaggcccaccagaagcccgatgagaccaaacaggaacagcgtgccgaacatcaccgggtagtcgcgccccaccgccgcctcgaacccgagccgtcccagcccgtcgaggctaaagatcgtctcgatcagcaccgatccaccaaagaaaacgccgatgaacacggccgggaaccccgcgatcacgatcagcatggcgttgcggaacacgtggccatagagcacgcgtttctcgctcagccccttggcccgtgcggtcatgacgtagtgtttcttgatctcgtcgagaaagctgttcttggtcagcagcgtcagcgtggcaaaggccgaaatggtcgaggcaagaaccggtaggaagatgtgccacaggtaatcgacgatcttgccgaagatactcagctgttcgaaattgtccgaggtcaggcccctgagcgggaagagttggaaatagctgcccccggcaaacaacaccagcagcatgatcgcgaacaggaaggccgggatcgcgtaggccacgatgatgacgccggaggtccaggtgtcgaaccgcgacccgtcgcgcaccgccttggccacgcccagcgggatcgacacgatataggcgatcagggtggaccatagccccagcgagatcgacaccggcatcttctcgagcacgaggtcgagcacctccaccttgcgaaaatagctctcgccgaaatcgaaacgcatgtagttccacatcatgttgaagaaccgctccaacggcggcttgtcgaggccgaactgttcctccagctcggcgatcaactcgggcggcaggccgcgcgcgcccagatactggtcgttgcccccgcccgacaggtcctgcccggtatcgctccctgacccggcgaagctctcgaaaacgtcgccctgcccctgcatctgcgcgatcatctgctcgaccgggccgccggggacgaactgcaccagcgcgaagttgatcaccatgatgccgaaaagcgtcggcacgatcagcaacagccgccgcaggatataggcccccatctcagacggcccccatggcaacaaccggcatcaaagcgcgcccgcggcccgcagcgctgcggccttttcctcgtcataccaccagaaatcgagcacaccggtggcgtaatccggcaacgggtcgggatgggcatactgatcccagtaggcgacccagttcttgtcgagataccatgtcgggatcatgaagaactcgtagcgcaaggcccggtcgagcgccatcagcgccacgtcctgctcttcctttgaggtcgattcgagcgcctcgtcgatcagcgcatccaccagcgggctggccagccctgccgggttgaacaggctgaattccgcctcgcgcgagccataacgctgatgcaggccggtacctgcctcaacgaaggggatatagctgtcaaagacgatgtcatagtcccggtcgcgctcgcgggcggtgtattgcgcggcgtcgatcttgtcgaagcgcgcatcgacccccatgagttgcaggttcgaaacgaagctttcgaccaccgccgacatggtggccgagcccgaggccgagatcgggatctcgatgctgagcaattcgcccgtcgcattgcgccgcttgccatcgtcgcccactggccaacccgcctcgtccaggagccgcatcgcgcggcgcaggttgcgccgatcgttaagccggtcgggatcggaggaatgcgcccgcaccgccggttccgtcagcatctcgccgggcaccagatcgcccagcgactccagcaattgccgttcggccccctccggcacgccctcggcctgcaaatgcgtgtcctgcacaaaggaatgccgctgcttgaacagaccatattgcagcgactggttggtccattcgaaattgtagcccagcgcgatggcgcggcgcacgcgcttgtccttgagcacctcgcgcccaaggttgaagacgaagcccgcaggcgtcggcggcagcccgtcgggcaattcggccttgacgacatggcctttcctgacggccggaaaatcgtaaccggtggcccatgtcttggaatttccctcggggcggaaggtgtagatgcccgccttgaacgcctcgaaagcggcgttgtcgtcggc

SEQ ID NO: 3215 - DNA, 14212 bp, synthetic construct
  source 1..14212: mol_type = other DNA
  misc_feature 1..14212: note = Synthetic
tctgtctcatctccactccttggtggttacgatgtgccagaaaccctctcttatcaaatcaccctattctgtcccattggcgctgacgtcagacaaggccagacggtgctgaagcacggcgctgggtcgtgcccggtgggccgcgtgcccgcggccgagatcgaggccgcggttatcgatcaattgcgggcggtgttccgcccgcccgagatcgtggttggtacgtggaaggcagcgcgcgcccacgccgccgacatcaccgaggccgatgcctgtatcgccctgcaacaactcgatccgttgtgggacgaactcttccccgcagagcaggcgcgcatcgtggcgctgttggtcgagcgcgtagacatcgccagcgacggcctgaacgtcaggctgcgcttcgacggactcggcggtctggcccgcgagatgctggccggtggcatagaggcggccgcatgaaccgcggagtcccgatcccggagactgtgacgctccatgtcccgttccggatcgtgaagcgcggcgggcgaaaggaaatgcaattgccggatggcgccacccagccccgcaagaccgacaacacgctggtcaaggcgctggcgcgcgcattccgttggaagcgcatgctcgagtcgggtgagtttgccaccatcgcagaactggccgagcgcgaggggatcgcgtcctcctacatgacccgcgtcctgcggctcacgctgctcgcgcccgatatcgtcgaggcgatcctggacgggaagcaggggcctgacgtcacgctgcggaaggtgcttgagccgtttccggtagagtgggcccagcagcccgccgccatcttcctcctgaaagaataggggcaggccgcagcctgccccaatggtgtggatctttcaccttatcgcgggaaagaccacgccgcttcttctgctaggaatatcaggctatcctggaatacgctggcttggcaagcacttcggagggctcatgtatcgtttcgcctttgaccttggaacaaattcgctcggctgggcggtctaccggctcgacgatcgctcgcatcccgcttcgcttgaaaagctcggggtgcggatattcccgaacggccgggatccgcagtcgaaggaatccaatgctgcgggccgccgcggtccgcgcggttcgcggcgacgacaggacagaacgctcggacgacgcagacggttgctcgacgacctgatcgaattcggcctgctgccatcagatgcagatgcgcgcagcgcagtctttgctgcaaaccccatcgaagcacgagcgaaggccgcacgcgagcaggtggctctggaacaactcggccgggcgctctggcacatgtccaaacaccgaggcttcaaaagcaatcgtcgtgccgacaaggatgcagatgaaaagggcaagatcgcaacggcgtcgaatgctctcatggagcgtctcaagtccgaaagtcacccgacctacggcgccttcctccacgcccgtctcgcgcgtggcgaagggactcgcatccggcctacgggcgaaggcgcgaaactgtcctacgcgttctatccgacccgtgccctactggaaacggagttcgatcacatctgggccacgcaggctgcctttcatccgacgctgacggatggcaagcgggaacggctgcgcgatacgatcttctttcagcgcccgctgcggcccgtccggccggggaaatgcaccttcttcccggatcaggaccgcctgcagcgctggcatccggccgctcaggaattcctgatcttggctcaactcaaccatttacgcatcgtcgatgaccatggcgaacagccgctggacatcaccacccgtgatcttgtcgcgcggaccctgatgagcgggaccaagctgacctgggcggcgttgcgaaagaccctgaaattgccgacgcaggctgagttcaatctggaaaagggcggcctgaaggagcttgcgcgtaacgacgtggccgcacgattgctgggcagcgcgaagaagccaggccccttggcaagcctctggccaaccctcgacaatgccatgcaggtggagatgcttggccggatcgcggatacggccgacccagaagagttgatcggttggctgatggaccggcacaacctttcccgcaacgcggcggaaaaggtcgagaagatcccgctgccggacggtcacctgcggttctgcctggaggctacgcaggccatcgtggaagagatgcgcaaagacgttatcacctatgacgaatccgttcggcgtgcacccgagttgggcggcgcggggctagaccattccgatttccaggcagtggagggcgtggacaccctgccaccctacaaccggctttccgtcctgcaacgcatgatcggcaatggtaccggcgatccgaacgaccccgaactcgtgcgctatggccggatcaccaacccgacggtgcacatcgcgctgggacagttccggcgcgtgatgaatgcgctgatcgccgaatacggcaagcctgcgcaggtggtgatcgagtctgcgcgcgacatggcgaagtcagtcaaggaactgaacaagatcgagggcgacatccgcaagaacaccgcgcgcaacgatcgatggcgggccgaattgcaggcggagggtctgctggcggaaggcgcgcgtgtgggcgaccggtttcttcgcatgcgcctgtgggaagagatgggcaagggtccggcagatcgcctctgtccctacaccggccagcccatcgcgctgcaccagctgcattccggcgagatcgagatcgaccacatcctgcccttcgaggacaccttcgacgacagccccgctaacaagaccctgtgttttcgtgaggccaaccgtatcaagggcaagcgtgcgcccggcgatgcctggtccggcgaggatcttgccgccattatcgcccggacgaaacacctgcccgccaacaaggcttggcgattcctgcccggcgcgatgcagaaatgggaagagacgcgcggcttcgaggaccgccagctgaatgccaccggctatcttgctagcgttgtgcgcgcctatgccgaggcgctgtttccgaagaccgatgacgaagggaagcggcgcagccatgtctgggtcctcccggggcgcatgaccgcgatgctgcggcaccgctggggcctgaacctgggcgatcacaaccgcaagtcgcgcgacgatcaccgccaccacgcgatcgacgccgccgttgtcggcgtgatcgaccggcggatgattcaggtcttgcagacccacgcccggagaatgggggtggaacgactggaccgcgtgttgcccgccccgccggaacctttcgagggcttccgcgctgccgtcctgcgcgcggtcgagaaggtcaacgtcagccaccgcgcgcagcacggcagcgccgacccgtccgacccctcgcaaaccagcggcaggttgcatgaggacactttcttcggccttgtgcgtgacttgccggaaaatcaggccgaccggaccatcggaaatgtcgtggtgcgcaagcccgtccttgacctgacggaaaaggaaattggccaagtgcgcgacgtgaagctgcgcctgagccttgagaaagccacaagatcagcgcgcgacaggtcgctgccggatgccgaacgcaagaagcgcctgcccgaggcactggcgaaatgggttcaggacaccggacaccgcaaactgcgcatcctgagagaagaaaaaagtgtgcgcgctgtttgcgaccgtgatggcaaaccctacaagtggctggtcccaagtgaaaatgctttcatggacatcctcgaaacccccgacggcacctggttccagcacgcgaccgacatctgggcggccaattcgggcggggccgagccgtggaacgtcgcgcatcccaacgcgcgtttcatcatgcgcgtccacaagaacgacacgatccagctgttcgattgggacaacaagaacaaatgcgtggtggagggaagcaacaggatcaaacggatcattcgtctgtctccaagcaattcggtgatctatctcgtcggaacaaatgacgctggcgacttccagaaacgccataatgacgccgacgatccctttcgctgggatttcgcgaacgtcggcaaattgaaactccgccgcgcccggcgcgtgcggatcgacgaactggggcgggtgcacacgatcccgcatgggacgatctgacaggcaagccaacccttcgggcacattccatcaaggaggctctcatggttggacggatactggaactgacggcacccgggctttcggtgcacaagcgccgcggattcctggcggttgatacggacggaggggagaccgggtgcatcgccttcgatgacctcgaggcggtgctggtcgccagccccgggatgatctggtcgaacagcgcgctggtcgaactcgcagcccgccaggtgccggtaatggtgttggggcatgacttcaatccggtggcggtggtcctgccactgaacgggcacttccagcaggcgcatcgcatcagagcgcaggccgatgcgtccttgccgtttcgcaaacaggcctgggctacattggtccgccataagatcacggcacaggcggaagctctcgagcgtgtgaacgaaccgtccgagcgcctgcgacgactggcaacagccgtgcgctccggcgaccctgacaaccgcgaggcgcaggccgcgcaggcttactggcccttgatgatggacaaggcgttccggcgtgaccgcgaggcctcgggggccaatgccctgctgaactacggctatgccgttctgcgggcagcaacggcgcgcgcgatcgtgtccgtagggctgcatccgtccctgtccgtccaccaccgctcgggcggcgatgcactggcgcttgccgacgacctgatggaaccgttccggcccaccgtcgatctgatcgtccgcggcctgtgtgccaagggaatcaccgaagtcgccgaggcacgcggcgcgctcgtggccagccttgccgccgacttcccgacgccgcagggcgcaagcccgctatcacaggtcttggtgcgcctggcgcaaagcctcgcccagtcctgcgagtcgggcaaactgcgcctcgtctttccggaccggccaatcccgatagccgccgaggagcaagacgatgagtgaaaacggcttcaaacaactttcaggatacaggatcatgtgggtatgggtgcttttcgacctgccggtgctgaccagcgccgaacgcaagtgggccacgcggttccgcaacgatttattggaccttggatttgaaatggttcagttttcggtctatctccgtcatgcttggagcaaggagaaggccgaaagttatgcccgacaggttggcgacctcgtacccgacgccggccatgtgcaggttctcttcttcaccgacaagcaatatgcgctcagtcaggtcttccacggcaagcgaagatcgaaagcgcctgcggaaaaaccggctcaactcgtgctgttctaggcttgccgagggcgtttttctgcggcgcaactcaataaaaaaccccgcacaacaagaggttgagcggggtcaatcctagcagaagaagcggcgtggccaagcccggacaatgcgggaaagatggacgaggtcagcgtcatcctagcagaagaagcggcgtggccaagcccggacttcttccagacaatcatccgctccacaatgatcctagcagaagaagcggcgtggccaagcccggacacaggagccgcgagttcatccgtttcccatatcctagcagaagaagcggcgtggccaagcccggactgcgtcataaaccgcgagttcgagttcgatatcctagcagaagaagcggcgtggccaagcccggactggtcagaaacagtgctcggcgtgaatgcaatcctagcagaagaagcggcgtggccaagcccggactacagcgacccacgtttgagtgatgggcctatcctagcagaagaagcggcgtggccaagcccggactctgattttgagagtgtccgcgcccgcccgatcctagcagaagaagcggcgtggccaagcccggaccatgtgcttcatgaaatcagaggccgatgtatcctagcagaagaagcggcgtggccaagcccggaccgatgccacgctgatcaaacctctcctgaaatcctagcagaagaagcggcgtggccaagcccggacgacgaccgccagcgggtggaagatgcgctcaatcctagcagaagaagcggcgtggccaagcccggacgtggtctgaatgattgcggtgataagggttcatcctagcagaagaagcggcgtggccaagcccggaccgagaaatcgaacagtatgaggccgaaaatgatcctagcagaagaagcggcgtggccaagcccggaccttgccgttttccatgccttgagggctggcatcctagcagaagaagcggcgtggccaagcccggacgatggcgttcatcgcgtctccggtgtgataatcctagcagaagaagcggcgtggccaagcccggacacgtagccgagcagcgtgtgatagagcgcgtatcctagcagaagaagcggcgtggccaagcccggacctgtttcgcgtggccgaccagctggcccacatcctagcagaagaagcggcgtggccaagcccggactgatcgagggaatgacagccgcccagagcaatcctagcagaagaagcggcgtggccaagcccggacgcagattgaactcgggcgtttccggcccaaatcctagcagaagaagcggcgtggccaagcccggactggccgacttagatggccatcgcagaggtcatcctagcagaagaagcggcgtggccaagcccggacagcctcgaactggccgaataaatcacaaatatcctagcagaagaagcggcgtggccaagcccggacagcaccgtcttaccccagccgccatcgatgatcctagcagaagaagcggcgtggccaagcccggacctcacccgcgtgcaggcgcatgcgcttcctatcctagcagaagaagcggcgtggccaagcccggacgacagaatcgcgtgattgcaatgcaggaagatcctagcagaagaagcggcgtggccaagcccggacaacgggggcaagatggacaaggtcagcatcatcctagcagaagaagcggcgtggccaagcccggacatggtatcggcactggcggtgtcgccatgcgatcctagcagaagaagcggcgtggccaagcccggactgagcttttcgtcaagcgcatccagaagatatcctagcagaagaagcggcgtggccaagcccggacccggcgcgggacagcgcccgcaggccggcgatcctagcagaagaagcggcgtggccaagcccggacgctctccagcatccaatcatgcaacgcggcaatcctagcagaagaagcggcgtggccaagcccggacgaaattaccgccggtgcgcgggcgctgaaaatcctagcagaagaagcggcgtggccaagcccggacagcggcgcaacgctgttgtaaagttggttcatcctagcagaagaagcggcgtggccaagcccggacaggcgctgcatgcggcaaagcgtgtcgatcatcctagcagaagaagcggcgtggccaagcccggactgaagttcgagaaggacctgacgaccgcctatcctagcagaagaagcggcgtggccaagcccggacacgaattgccgtgaaatcgcccccccgcgctggatgcgtcgtcctacaatcacccagccacagcctgagagcttccgaaaccagtcgcggcagacgcaaacgcgactccaatccaagtaatttcaacggcttgaatttcgtcaatatctacatgggcttacgagaaattcaccaaatcagcgcagtcatgaggtccggagaatatcggcccggagagaccgcttccgtgcctcttggcacgagggccagtgctcaggcgatcatctcgcggccatgcagcccgtaggccccacggacgtccggcttgccggtcttgtccgattgcgcctccggctggcccttgcaccactggaagcagagccgccccgcgacggtgatcgagtcgatgaagaccgtgtcgtacttctccagcacctgcggatcgccgtacttctggcagatcgcctggtagtggtcctcgctgtagggctggtccttgcgcagcgccgggttcgggccgccgatgaacaccgcgaagtcgcggcattcccgccaggtgcgtgggcggatcgtgtcgattgccagcccctcgatggcgagatcgccagcctcgagatcgaagaacagcgaggtggtggaattgagcgtgcgcaggagcgtggtcttgccgatgcccggcggtccgaagatggcggccttcacgccgcgcacctcggccagccgctcgtcggcggtgatgatcgggaggctcatgcatcgcctccctgcggccggatctcgaccttcagcgcgccggtcttcacggtccgcgcctgctcgaagccctggcggatcgcgtcgggccaggccgcgtatttgcgctcgggcaccttgaaggcgatctcgacatactcggcggggtcgtccccggcgtcgcggatccgctcgaccatggcgcccagctgcgactggtcccactcgacccgtttcggcaggtcggcaaccacggtgaaatcgccgtcatcgaaccggacggtgccggtatccttggcctgcgcctgccgctcctcggtggcgcgggtggcgtagcgaaaggtcagcgcggcatcgagccgggtcttcgcggccttgtcgcgtttcaggcgctcgtcgatctcgcgctggaggatggccagcagttcgacgggcagcccggcgatcacctgcgggctgaggtccggcaggtcatcgggcgtgggggtgttctcgggatagggcatcggggtctccgggattgggaatgggattcaggcggcctcgagcaggcgcatcgagagcgccgcgccggacgggccgggcttcgggcgggcgacagcgatgtaggcgaaagcgtcggggccgagccgggactgtacgaggtggacgaggttctgctccgccgcgcgccgggcggcggctgccaccagctgcagcgtgcgttggcgatccgccggcagcttcgagatgaccgacgtggcatcgaccgcgaggaacccgcggtgatagaccagcgcctcgccgggttcggcctgcgcgatccaggcggcgagtccgatctcatcgagcgccggctcgtttgcgccatgcagctgcacgacctcggcctcggtgatgggcgacacgcgtcccatcaggccgctcccgcgcgcggctgggtgtccatggtgtgctggagctggtcccgctcgaaggcgacgatgtcctcgagccggtagacgacccgtccgccgatcttcatgtaggccgggccttcacccgcccaccgccagcgttccagcgtgcgatgcgagatcgtccagcgccgggcgagttctttctggttcaggcaatgcttctgctgcatcggctctctccgtttgcgtgtgcttcggagagagattgcgaaatcccgctatgggatgtcgtcaggatcgcagggggatgcggagggggatggatatggccttgcaggacaggcttggacggcttggagggggatcgtcatccccttccatcccccagccgatcccacaccgagcgtgctaaggaacagcgcatagggggatgagaggcgagtcagtcgatgttcagacggtagccgccgcgacggtcggagcggatcagctgccgccagtccttctgcgacttgaagacgtcggccatgcgcaggctcttcgagcccgccgacgacaagatggccttgccgctctgccacggctcgccgcgctgcgcggcgtcgtgcagggcacggacgacctgcgcctggatcgggccgagccggaagcggtagccgttgcagcgcacctcctggtagtcggccgaggcgatgaaggtgctctcctccatcgccgagccgccggaagagaacccggactgaagctcgaaacgatcgcgttcctcgcgccttagcaggaggtcgccgatcatcacgaagaccggcttggcctcgccatagagcgacgcatagtccgcgcgcggcgtgcggaactcgctgacatggagctcgccgcagcggaacagctggaagacgtcacaggcgtgcaggtcgagcagcccgctgaagggcttctgctcccacggcacgcggaaccgctcgccgtcctggccctcctcgtagtcgccgaactcgaccggctcgccgaagacgcgcaccgacagccggagcttgtcgttctcggccaggtagacgaggtccgtctcggagatccgccagcgctcgagcacctcggggagcgtgaaatacagcttgtcgatgtgcacgcgcccctccgattcccctgcctgatgtttaccttctgttcttattcgcttgacgtccgtcgatcaatccgattttatcctatttcatccacaattgggtggggaaacatgaacgagcaccacacgcttgccgaccgtctcagggcccgggccaaccagctcggcctcagccccgcccatgtcgccgagatggccggagtaaaccgctccttcgtctacgacatcctgcgcgggcgatcatcccgccccggcatcgaccggctggccgaggttgcccgcgtcctgaaggtcgaccgcgactggctgatccacgggatcggcgatgtcgagggcacgccccccttcatcgagaacccggacgaagccttcgtctcgatcgcgcatgcgagcccgcgcccgtcgatgggcggcggcgcggtggttcaggagcacgacgatcctgccggccgagcctaccacttccgtcgctcttggatccgccacagcctgaaggccagcccctcccaactgcggatcatgcatgtggaaggcgacagcatggcgccgacgctgctcgacggcgacacggtgctcgtcgacatggcgcgccgcgcgccgaacccgccggggatcttcgtgctggacgacggcatgggactggtggccaagcggctcgagcacatcccgaacagcgacccgccggccgtgcgcgtcatctcggataacggcttctacagtccttacgagcgaacggccgacgagatccacatcgtcggccgcatccgttggttcgcgcgggagatctgactgaacaaagcgcgaacgatcacgactcgactcacagtctcgcctacgatatattgcggaggacagggaggcagaccccaccagtagaggagacgcctatgctcttaaacattttcaacgtagatcatggcgcatgcgcattggtcaccactagcaacggtcgccgagtattgatcgattgcggtcaccatgccgaagagcgttggttgcctggagctgctttaaactccatgggcatctacaatatcgacaggcttttcataacaaactttgacgaggaccattgctctgggatcggagatctcttgagtcgggtattcgtacaagcactcgtgaccaacaatacaattacatcccaagccgttcgtgaaatgaagtccgccaatggcatgggtaacggtatccgtcgcctcattgaaagcatggagcgaacattcacgggtggacccgtctccgcagttgatgacgcgaatttcggggatgcctctttctcggtattccgaaacccgtatgatccctacttcgggttcagcgacaccaacaatctgagtttggcaatattcatccgctgtggcccgcacaagatagtttttcctggcgatttagaagtccgaggctggaaagcgctaatgcagaatccggcattcgcgagagagttgcgagacgtgacccttttcgtggcatctcatcatggaaggctgaatggctactctcgtgaagtcatggaagcttgcccgaacatccaagcggtcatcttctcagacgatggcatcgcttatcagacgcaggagactgttgatctataccgtcagcacgcaaacgggatcatttttgatggtaaactccgtcgggttctgacgacgcggcgcgaccggtcgatgatattccatttgaatgaagccggaggcggcaccgtgtcgctcaacgttgcggcgtgaacatatcgttcgatttctatgagtatgccggaatcatagtgccgggctcggttttagctttcggcgcaatgtttttgatgcctgagttccgcgaacagctagggccagacggcttcacattcggggaacttggtcttttcgtggtgctttcctacgctcttggacaacttgttcaaggtatcgggaatgccgtcgaatggctcctttggtggcctctaggcggcctgccaaacaagcgagtcttggatggcgaggcacttaccgaacagcagcacttgcgtctgttggacttactacggaacgagaaaatcataggcgaagagggtctttcaaagcaggacgccagagcagccatgcgagaggtctatgcccgagttgcagctgcaggccagtctgcaagggtagacaaattcaatggaatatacggtatgttgcgtggtctttcggcatctctgctgctcctgaccattgccttcgcactagttgagacggagagagcaacgctgctgctcgtcggcttttcgacgttggtttcacttcgcaggatgcaccggtttggctggcactacggccgggaactagtagtcgtgtatctcgcgatgcatgctcgaccgaccaagccgtagtactgcatcatcgcttcgctttgcgctctttcgcgcgaatacgacaaccctctgttttcacttgaattcctttgccgatcgcggcgaacacggagcaaaccgtctcacgaggttcgctccccatgccagacgatatcgccttcgcgccgcccgccgacacgctcaccacagatgagcggctggcggaactggccgccatcctcgccggcgccatcgtgcgcatcaacccacgggaaacgaacgaaaaatctccgctcgacggagacagttcgctggacattctcgccctcagacgccgtcgtcggagacaggttcgcaaccgagttggagacgacgcatgaggaaaaacgcaaggaaatcaggcgcgcaggccgcgcccgcaggccaggcggagaggatcgacgtcctggccgaactgacggcgatgaaggcgatgacggtgcccgaattgcaggagaagtggcaggccatcttcggggagcgcgcgccgaacgccagccgcggcaacctcgagcttcggctgggctaccgcatccaggaactggcccatggtgggctgcgccgggagacgcgccgcacgctcgatgcgctggccgacgaggtcatgagcggcaagctgggcggcatggtggcggatcgcccagttcgagcgcgaggtgatcggcgagcgcatccgcgacaaggtcgctgcctcgaagaagaagggcatgtggatgggcggctatggcacatggaacttccgggagcttctgaaggaccacgattatcatcgcgggatccctccacgatttctgactgaggcatcattccttgtcagcgagacagagctaggtatcgcccactttcaggacaaaaaggtacagatgaagtatcgtgacttcgttgatcgcctcaaagcattcgtagattatttcggcatgcactcttctccggagaggtttggcagcgtcacattacagtcggtaatccccgcaagccaattcgacgagatgaatattgcgcaacaccatcaatccgagatcaacgaggtgaaccgactggcgaccgaagcttggaaggccctcgttcctctgatttcagagataaaggaccgcattcctgaagtttttgacgaaccaatcaagggtggctggataaggagccctgaagaataggcccgtgacggttcaacaagaatcctttgaatggtcgggctcaccattacgaggcgatcaaacctcggcagcgttccacgagactgtttaattaaagctggcctgaaacgacgtgggggtcagcgagacatgcgcatcgagcggcgggtaaagctggaacgccctcggctcgcgcgagaaattccacatccggaacaggcaccactccgcacgccgttcgtcggcaacggccagctcgttgcgcgtgatgtgg

SEQ ID NO: 3216 - DNA, 13746 bp, synthetic construct
  source 1..13746: mol_type = other DNA
  misc_feature 1..13746: note = Synthetic
catcaggtcggtgaaccgcatcagaatgccgccgatccaaccaccgaaatagcctgcggtaatccccacggtcgcgcccagcaggacggcgatgccattcgccagaaccccgatgatcagagaggtctgggtgcccaggatcaaccgcgaaaacagatcgcgccccaacaggtccgtacccagccagaattccgacgagggcggcaacggcgcgccctccaggctgaggccgtcgaacatctggttgtttggattatagggcatgatccacggcgccaggacggccgcccccaccatcgtcaggatgacgatcagcgcaaaggccgagcgcggccggcgcagcagccggaccaggactgaaccgcggccgccgcgcgacgggtcggatttaaccggtatgcttgcgtcgctcatgcccggccttccgacatacggtcaccgcgggcgttcagcaccagcagggccgcgtcttccagggcgacgcgttcgaccatggccagggtccgcagtttcttcagcgcgcccatctcgtccacatcgtgggaggccatgatttcgatcaccgcctgcaccagtacatggcgcatgccggcccggcgggcggtctctgcatcgcgctcgcgctgtcgctggcgctcggcccacttggccgcggcgatgaccagcgacgaatagaccagttccggcgcggcctcggacaggaaggcatccaggttctgacgcagcgcccaggccagccgcccggggctttcggaacggaccacgccgatcaccggcgtcggcgcgtgtcccggttcccagggcaattgcgcgtcatgccccatgtcgatgtccacgaagaggacatccatgggggcctctggcaggtccggccaatggccctggaccgtcagacccaacacatccaggcgggcggccaaccgcgcgcgcacggtttcggtcgggtgcagcaccaccgcgcggcgaccggtgaagttcagatcaagcatagctgtcatgacacgatcctcaggtcgggtttgcgttccctcggtccgggcgggggcacgcgggtcaggtaggggtccggatccacctggatcgtgctgccgggaatgatttcgaacgtcccgttgcgtagccttgccatgcgcggcacaagactggtgtgacgcgttacggggtcgatccgggttggccccaggaccgtgttcagctcgcgcccggatacggcgtcgaaaaccgcccgcgggtcgtcattcccgacctcagcgatcccttgcgccagcagccgaatagccatgtaggcggtcgcgaaattgcaagacgcccggtaatccggcccgaaggtctgggcgatccggctgcggaaagcgatgttctcaggggtttcgatcccctcgaaccacgcggaaatcgacagcatgccgtcggcggcatcacccagttcgtccagatccgcttcggtctggttggcgctgaccacctggcagtcggcccccgacaggcccaaagcggccagccgatgcatgaaggcatggttggagggcccgatcaggctgttgacgatgacatccggccggcacgcctcgatttcctgtatcagatgcgcgcactcggtttcgcccaagggaacgaaccgctctgccgcgatgtccacaccggccgcggccagcctttcgcgggcgacgcgcagcgtttcccagccccagacatagttcgacccgaccagcaccgcacggcggggccggtcctgcagaacgtgatcgacgagcggcaccagatgctgatttggacaggcgcctagatagacgacatggtcgttgcactcgaacccttcataggggcaaggataccacagcatcgccccgtgccgctccagcaccgggatcatgtccttgcgcgaccacgaggtgatcccgcccacgatatgccgcaccccgctttcgcgcagcaggtccagcgcacattgttcatagagattcggaacgcccttgggatcgcgtatcaccggctctatgaaaacgctgccctcggcattgatctcctcgatcgccatcgaggcgccgtcccatgcggaccggcccagcgccgcgtaggggcccgtggtcgagaagagtagaccgatccgatgtagagaagctttgtgcatcttgcccccgacccgatcaacaaaaaaggccccttgcctcaccgaaggaggctaggggcccaattgccgtcatcacgtttgaaccaaccgtagcgacgaaatccgcatggcggcaagcgcttcttgcgccggcgggatcagcacagacactcgtgcacagaaaatgcacacggcgcctgctttgtgggcggttccgggatttccgtgcagcgatccggtcatccaagcccagattcccaccctgcgcatcacagccagcaggggaaagcggggcgggccgcgccctgctctatgtcgcacaggcggcggagcaagaacgaagagtcacctgacgaaagacgtgatcacccgggcttcgggccggacggtataggcgacccgctgcccatcggtctgttcgacgaggaggtcgatgtaatgggtccgaacaacaccatcggcgtcatgccgcgcacctcgcgggcggtggggatctctctgcccgggcgggcgtcgacgaagggaattcgggccatggtatgtcctttccagcagcgcggtgccgccgccagcgcgacggcaccgcgcgaccgccttgggggcggccggtggtttcgtgaaaggacccgggtcttgggcagagaggaagcaggagcggggcggcccgtcaatgccccggcccggctggtgggcgcccaagggcgccccgaggccacgattcagcaaggcattgtttttaggttatattttcgaaagcacgcgcgccagtggcaagcaatcgtgtgtcaaaatggcagataacccccgaaatggcagattttcggtgggtgggacagacagtgtccgacccacgaaaacgctgccatccacaccagagggcggcgcacagggaattgatttatatggattatttatcaatccagcccgcagaacccatcagaacttccattttacacgcggttgtctgccatcgattttctcaaaaaaattgccgccagatggcggcggcaaagatatgggcctgggaaagggtcaggcgcgggttcgggcggctcagcaaagccgaggtgattcccctataaagccgaggtgattcccctatatctgttccggtaggcagaaatcgccgtgtctttcggaagatcggtctccgacggccccgcctccagcatgccgggccagttgagattgcccgcggcggctttcacctcttccggatccacgagaatgccctcgaacccgcgggtgccagccagtcgcacgacgcgccggagatagccatcgagcagatcgggcaggatgaacctgagttccttgtggattctttcggcacatttcgcgagggttagcatccccgggggcgcaacctcgacttccgggccgatccgcgcaagacgcgccatcagcgcctcgacgtcgtgaaggtgtaccgcctttccaagtcgcccaaccgcccgggcatcggcctcgctgagaggcacgagaatgcgcattgaaaccagacaactcacgatgggccgtgatgcgcgtagataatccggcagggcggacaccggtaccgcgtccttaatctctttggcgacccgcacggcaacatcatggtcgaggacgatcgagcaggccgggacgtctttcatttccggcttgatgagtcctttggaaaccaacaggttccgaagcgtgcgcgtatcgacgagctcagtcttggcaatgcttgcaatgctcgatttgcgtggctgcaggatcacctcgccaagcaggttctggccgggcatcaagtccatgttttcgataatgaatgcgcgcagcaggtcccgaatggggccgggatcgttgcgcaagttgctgctggaaagccagaggtagagcccgccgaacacggcccgccgcgacgacagcgccgtgccccgggcgatcgcattatccaggaggtcctggaacgccgcgcagaccccttcctctccgtcccgcatgtggggccacgctacggcgatcgccgcctcgcggtcatcgggtgtcatgtccgcgggtttccgtctcgggccgtaagcgcagacaagacccagcatctcggtggcgcgggcgacctgatcgatcccctgccgatcaagccatgcaggaccagcatcgccttccaggcgcgcgaggacataggactggagttcggacggggcgcgcggcgggcgggatttcgccagggaggcaagggcggcgccggtttcggggaccagcgcctgcagctcgtgggtgacgtcgtcccaagccccggccttgcgctccaccagggccaggccatgccgggggcaggtccgcaccggcgcgagcatccaggccagccgcaagcgtcgggcagcgtgcggcggcaggtccgacgcctcgtcctcggccaggcaggccgggcagaagcgggtcgcctttcccacggtgatatccgcgtagaattcttcgccacgcaggccgaagcgacggttaccaagacgggtgatgctgttgcgacggaccggttcggggtcctgcccgacgatctcgcacaggcgggtgatcgcgtcatcggccccgccccggagcgccatgaggtcgatcccgaggtcattgagaaaggggaccagccggcccccggtgtggaacgccgccaggcgcgccgcccaggaaagcggggtctcgtcctcggcgaaaggcaggaagggggaaagccgggccatggtcacccccgccgcttgcgattgtggaccccagcgggggactcttcaccgtcgagcgtgatcgcccgccagtcctccacgaggaagatgttgcggtctggcgggcacccttcctgcatggcccaggcctgcgcgaaggcctgcacgtcgacctgcggtgccccgtcctcgagcgcccgttcgatcgccgcgacgatcaattccacgcagcggccgaaccggtaccgcgccccgtgaaacagccgatccatgatgtcgtcctcttccgggggctccagatcggcgcggcggcaatagtcctccagcaccgaggtgaagaggtcccgatcaacttcggacgcgatgggcggcaggtggattgcggagaaccggcgcttgacctgggggtcgctgcggatgatctcggacagctgctcggtgcccgagaggatcacgatcacggcatgctcgccctgcatcagggtcttgatggcccgcaagatcaggttccggtccgcgcagaagaggtcatgcgcctcgtcgatccagagcaccgatacccccagcatccgcagccggttgcgcagaacctgccacatgttccaggcttcccggcgccccgacacctccgggtagccgctccgctcgagcagttcgagggtcatgcacttgaacgtggcagggctgggcacgatgccggaaagatagaacggcgcctcgcgcccggtgcccgccagcaccggatggcgggccaggctgcggtccacgagggtggattttccacccccgggtccatcgacgaccatgatgccgcgggtttcgccggtccgcgtgaaacggcgtgcctcaggcaggagattgccgtccacatcgcgcttcagcagccggtcgaggtgggacgcgaattccgcgtcccgagaggtcttgatgtgcaggttccgcagggtggcgaggatttgctcgatttcgcgaggggtcttcacgctcagtcctcctcgatcgagaaaccggtctcaccgcccttgcggcgcttgcggggcgccggccgcttggcctttgccttggcgggagctgcgggctccaccgggtcggggaggatgctgccaacgccgttttccgccttgcggggcttggggctgtcgccgacctcgaagccgatgaacaggcgcttttcctcccgctcgatccgctcgtggctccagtcctcgaccagaaggccggtcagcgccatcgcgccttcgttgcgccgggtgatgtccttgatcgccgcgtgcacgatctcacgctcgatcagcttgcccttcggcttgcggctgcgcgcggtgcggcaggccgtcatccaggtctgcgccggaacaccgtccagcccgtcttcgacggcgggcaccccgaaccactccttgccaaggcagacctcgatcgtcccgatatccttgggatgccagcggaccggcacggtgtgcgggcccttggcgatcatggcctgccccaggcgttcggaatggtaccggaccccaaggatggtgatgccctccttgtcgagaacgcgggccatgcggcgcccgaagaccaggcgcatgcggcgcatgtccggcggcggctgaacgccccattgcttttcgagacgcttccagcatgcggccggggtttccccgccgaggccatcatgcggcatgttgtgatagatatcgaccacccagcggaccagggcgaaggtcagatcctcgaccgtcaacgcggcccgcttggccgggtcgctgtcccccttggtggcgacatccgagaaggtccggccactgagacgcggaagcagatgcatcgacatggtgttgaacacgcgctcgatccgcccccggagttcgggaaagccggccacggtgatttccgacgcgatacccaaatcactgcaggcgaacctgaagagctccgaattgaaggcgcggccggcatcggtaacgatcagttcgggcagccccgacatgctccagaacccaagggccccgacggcgtcggaccagcgtcccttgtccgagacgaccatctcgagggtctggagcgcggcctccgcgccaggagtacggctcatcgtcatcccgacgatgcaccgggtcgtcgcgcacatcgcaacggtcaggaaccagcggctcttcttcccgtccagccccagggcctgaagctcctcctccgacagcaggtcgaccagcccggtcgagtgcatgagggagatcaggtcgatcgtccactcgtcgatttcgacgcgctcgaggggacgggtcaactcgatcccggcaccaactgggcggaactttttgcgcgctgcaccttcccccttccgcgcccgctcgaccgcgtaggcatcgaggctgtggatcgcacggcgcacggtttcccggctgggaatggtcaggggcggacgcccctctttctgccgctcggcattgtgcaccgtgaaggcgccgataacgttttcatggacctgtttctggctcaggcgttcttcgccgaggtaccggcgaacctccttcatcatcagcccctgctcctcgggggccagctgacgtccgcgattacccttccggtgcatggcgtcgacaagaccgccttcaccaaattcctcgtaggccttgacccaggcacgcagggtacgggccgaaggcgcattggcgagattggcggaccaaccgggcttgtccttgcccgaagggttgaggttccgggccgcgtagcccatcgcggtccctttcagggcaagcgtgctggccgtgatggacgcatcggtgcgcttgagcagacctttccgctccagctcgagaaacgcctgcacataggcgctccgcttgaccagacgcgcgcgctgcatctcgccgagcgtcgcgatcagcggcgcggccaccctcaggcgacgagccgcagaatccgggtgatagtagcggtgatcgacgcgaatgcgccccatgttacccaggcggctgagctgttcatgcgagaagtcctgggacaactgcgcgccatccaccatcgtgagaacatagccgtcctccttctcgtaggtcatgcgccaggcctcgccattgatggtgatgcggtcgaacgcaccgaaggcatagcgcgcgccttccgggttgaattcgatatccatcagacaagccctcccttgaagacctgcgcagccgggcggatccgttcatggttcaccaaccgcagatggcccgaccggatgaggcgcacgagggcgcggaagccacgcgcctccagggcgatttcgtcggcgagccgcgccagcggggcgatcccgcgcaggtcgccgacgatcttccgtgcagctgcatccgcctcggggtcgggctgccgcaccgagtggagaagcttggcgttgaaccgctcggtctggtcgaaatccttgtcggtgagcaggcgaaggtcgtttgcgaacccgctcgcacggatctgccgtgccacctggcgtacctcgtcgagaaaccgctccgaaacccgtgcttcgggccggacggtataggcgacccgctgcccgtcggtctgctcgacgaggaagtcgatgtaatgggtccgaacaacaccatcggcgtcatgccactcgaacgcgacctgctcatggatcttcgcagtttccgggcgggacgccaggcacaggcagcaagtgaactcggtatggctttcggtccgcacgacccggccgggaccgtccccgagaacgatctggccggtgaagtggaaccgcgtgccccacggcaccttccgctgtgcgagactgggatcgggcagctgaatgccctcgatcagattgtgagacatggtgttctcctcatcagattaatccgcctgccgcccgggattgggcggcggcaaaaatcgtcagcgcgccggaatgatgacgtgtggcagccgaccgcgacgcgatccggcaggccggtgatccggcacacgccacccggatcccggttgcatccgggacctgggtgaacggtctgtgagggcagtcggcgttgaaatccggagccggatttgctatatcccgaacagcttagtggggttggttccgacctgccctggttttgaagcactcggtccgttggagcggatcgagtgttttctttttcggctctaactcgtcatcgatatcctcctttcgcgcgcttgcctgcgccttggtccagatcgccgggtcccttcacgaccggctgtcgggacttagcgccaaatgttcggcatttaaagtttttcgccatatttttcatatgtttgcgaaaatagcctattctttacctcttcgctcttggaaggacgtgccgatagccatagatatagccccccgctttttctcaccccacaaccactcccggatctgcggccccaaacgccttctgacgcacacggcaaaaaagatgcgaaaacgcgtcccagccggatcggcgtcaagaaatctcaccgcgcatgacgcatccggcccgagaatcactcggctccaagaccgcccgcagggctttgcccccgactcggttcgatcgattttctgtgtgggagtcgtgatcccgcgcagccgatacccgatccggaacggatcagcgtatcggcgtgcctatcaaccgcagggcggtgggcgtggtattcaggatcaacttcatgccgaaccacatgggtcatcgaaaggcggccttcaacacgctgacaatgcaaaaaactgtgtcaggcggtcgcaggggcacaaaaggtagcgggagggaccgggatggccctgcggcgtgtcaggacgaggcgcgggtgtagattggggtcactcgcgccaaccttgttgaggataaccacgaacgtcgtggaggtcggcaaggccgttcgccattgaaaggtttcaagtgcggcccatcgcgggcagcctgatttagcatctcaaggttgtctcggagccctgctcccgacccatgaggaatccccgaattgcatacaagaagctcttagagatcagcatccgccacggcctgaccaggtccagatccagatggcattcccgctcgagcggcgctaacagcctgtcattctttaaatatctcaagaattggggcaggccgcagcctgcccctatggtgtggtctaaaccttatcgcgagaaagaccacgccgcttcttctgctagggctatagaataattcagtgtaacatgccatgacaagtctaaagtgatcgtgtgtgcgttatgaagcgttttgcatttgatattggttctggttctctcgggtgggcagtcttccgcatagacgacaaaggccgaaccccaactgagctgctcgacctcggagcacgcatcttcccaacaggccgagatcctcagtcgcgcgagtccaatgcgcttggacgtcggtatccgcgccagcaacgacggcagatcgaccgcagaaagaagcggggagtcgaactggaagggcggctcgtggcgcacgggctgatgccgccagcggacgacgtcgaagggcgcgcccgcttcttccggatcgatccctaccgcgcacgcgatcgcgtcgcccgagaccgagcagagctgcacgatctcgggcgagccatctggcacatgtctaagcacagagggttcaagagcaatcgcaaggccaatcggacgaacgaggacgacgcaggcaagatcgcggatgcggcaaaggcacttcgtgagaagctggccgacactggcgcgccaacgtacggcgcatggctcgcagagcgtcatggaaatggcgaccccgttcggatcaggcccgcaggcgagggcgccaagatcagctatgacttctacccgacgcgcgccatgcttgaagccgagttcgatcatatctggcgcatgcaggcccggcaccatcccaatctgaccaaagaggcacgagaaaagattcgggacacgttgtttttccaacggcccctgaaacccgtaaagccaggccgctgcaccttctttccagacgatgaacgcctcccgaaatggcatccgctggcgcaggaattcctgattctccagcaactcaatatgatgcggtttctggacgagaggggagagctccctcttgatcaggaaaagcgcgatcttctgatgaaccacctgatggcaggcgagaagctgacgtgggccggcttgcgaaggacattgaagattcccgcgggaactgagatcaatcttgaaaagggcgggctgaaggagattgcccacaacgccactgcagcgcgtctcgccgtcggcacgaaaaagaaccctgctcctctggccgatagctggcacaagatcgatccacgacgccggttgctattgctcaagatcttggcggtcactgcaaatcccgagcgcacgcgcggcaggctggaaaactgggttgggctggctcctgatgccgccgcaaatgttgaaaaggtcaccctcccgcccggccacctcatgctcgggctgcgggccacgcgtgcgattgttcaggcaatgcgcgaggaggtcatcgtctacagcgctgcgatagagcgagctagcgagcgtggtctgttcggcgatggcgtcgccctgcaccattctgacctgcgatcggaaggcgatcccgggctgctgcgcctgccacgatattacgagctaacggctcttcagcgaatgctcggcacaggtaccggaaatcccgacgatccgcccgaaatcaggttcggtaagatcgcaaacccgacggtccacatcgcactaggccagtttcggcgggtcatgaacgctctcattgaccgctacggcaagccggatcaggtcgtgatcgagaccacacgcgacatggcaaaatccgcgcgcgaactgaacgagattgacgccgagatcaggaagaacacaaagcgcaacgacgcgtggcgcgaggagctggaggaaggtggcatcctcgccccgcgggcgcgagcgggcgaccggttcatgcggatgcgcctctgggaggagttgggcaagacgcctgccgaccgcctttgcccttattcgggcaaacccatcagccttacacaactccactccgacgaggtcgagattgaccatatcctgcctttcgaggatacgttcgacgacagccctgccaacaaaaccgtctgcttccgtgccgcaaaccggattaagcgcaagcgcgcgcccggcgacgcctggtcaggcgaggaacttaacgctatcatcgagcgtgtgaagggggcgccggggatggcgaggaaactgtggcgtttcctgcccggagccctgcacaagtggcaggagcaaaggggcttcgaagaccggcaactgcacgcgaccggatatctggcaaaggtggtgcgcgcctatgccgaggcgctgttcccgaaggacggaacctcgaacatctggatgcctacagggcgaatgacagcaatgctgcgacgacggtggttccgaaaccttccaggccacaacgcgaaaacccgtgacgatcaccgccaccacgccctcgatgccgctgtagttggcgtaatcgaccggcgcacgatccagatgttacagacccaggcgcgccggcacgggacagaagaactagaccgcctccttcctgacccacccgagccgttccccgaatatcgcgatcaagtgctggcgagggttgccaagctcaatgtcagccaccgtccggaccggcccatcacgaaacgcgaggcaatggcccgacgggagaggggtgagaagcacattcctagcacagtgaatggacgccttcacgaagacaacgcttatgggattgtccaagacaatcccgagaaccaagcggctcggacaatagggaacctggttaaacgcaagcccgtgatcgatctctcaaaggacgaaatcggacaagtccgagacgaacggcttcgacaagagctcctgaatgccactgaaggcaaacgcgatgacaaaaaggcgcgcgaagctgctttgagggagtggagtgatcgtacgggccatcagcgcatccgacttctagttatggacaatacagcaatgccggttgatggcaggatgggccacccccgcgagaatgaaccttacaagtggttgattcccggagagaacgcctttgtcgacattctggaaagcccggacgggcggtggtttcaccatggaacgcgggtctgggaggccgcgtcttgcaaagataggcaatggaaagaagtctacccagaagcccgcctaataatgcgactctacaagtacgacactttgcagttgttccagtgggatcccaaggaaaaggcggtgatccctggcacgaacacgatcaaggttgttcgctccattccagacagccccaccaacaagaatgtgcgtttggtcggcgcaaaccttgctatccccttcagcgatcgcgacaagcaacgcgacggagaacaaggatgggaagctgtggcctatgatgttttgcggaaacgccgtgcgcgacgggtacgcgttgatgaattggggcgggtgaggatcgtgccgcacggagtgatctgatcatcaggccagcctgtcgggctccaccaaaaggaggtcgtcatggttggacgcattgtggaactgagccgcacggggcttgccgtgcacaagcgccgcgggtttctcgcggtcgatgaaggcggaaccgaagcgggacgcatcggccttgcggacattgaggcggtgctggccgctagccctgggttgatgtggtctaacaccgccctgtccgaacttgcagcgcggcaagtgcccgtcatggtgctcgggcccgccttcacgcccgtggctgtagttctaccgttgaacggtcatcatgcccaagccgagagatttcgcgcgcaggccgaggcgacattgcccatgcgcaaacaggcttgggccgtaagcccccggtttttaccgcagcggctggtccttgacgcgggcgatgatgtcgggttcggcgacgaagtcttcgaggaagctgtgccactctt

SEQ ID NO: 3217 - DNA, 12135 bp, synthetic construct
  misc_feature 1..12135: note = Synthetic
  source 1..12135: mol_type = other DNA
atggcatcagaaagttgaagatagcgaatttacccaatttgctgtcgaacttcgggtatctgatgttcaacggctggtcgacggcgatgaagtggtgtcattttggccttattcccaagcattgcatttttgctaagcgtttctcaggtttcacgcgttgttaacagcgacgagaaacacccattgcttaggcgaggcgcgcagtttggagcaccaacatgaaggcacataaaaaattagcactttgtgggttcttgattgcttccagcgcgtctatggcagcagcggctccgtgtgattggaggcccagccagttcttcgggactactaccgctgcggttgcaggcggtagtgctttggccataggcagtggcatgaaggctgcgggattctatacgcttatacacgctgggtcggggctcaccatgcttggctcgaccatggcaggggcctcggctgcgggaaccgtcgggattattgcggggaccggcggcgtaattggcacgatcagcgcaattcttatggcccccgttactgtcgtaattggcggcgcgatagctgtgggcggtgcaggtttcgaaacggtttgccacttcagcgacgagcgcatcacagagtattccgaggttttggccataatgcaacacctcgacgagcatcacgatgcagagcgcttccaacttgttacgggcataccaggacggcaagacgatgccatccgcatctggaatccggagaccgaggagcttgaccgttacttggtcgccgacctttacttggtgaacggacggctttgggcgacacgctcttggcggttcgatcaggatctagggatgctgctcttcgtgcaaccatctgagtaaacgtgtgcgcgatggcggggcgctatgcggcgaggcttaatgggtgcatgtatcggctcaacgttccacgctaaatgagtgtatggtcgtttcgaccggatggaacgactttgctgtcgcaccggcatccgacggtcctcagcagacttttccttaccctcccttccgcactttccacgcctcgaattgtcgccgcctgatcccgaaccggagcgcattcccctcatgcaggctcgcgacctcggtatcgacgatctcctggatctgcgtcagaacacccggatcggtgccagcagcaacatagtcgctgatattcgcgtgcccctccaccacgaagtcccgaaccatcgcgcgaattgcgtcgcgatagcgcaggcgcagcgggtctggctcgggcagggacttcacgatggccgcatagcgctggcaggaccgctcgtaggcggcgagatagacatcagccagcaactcggtccgattgaactcgtagaccgcctgtgtgccccggaaataggtctcttcgggcatgtcaatgaacgagagtggcgagagattgttcttgatcagcgggatgttggcgccgagccgtgagacccgtttgttcacgtcctcgaagggctggagatagggaatgtgcaccatcagaaagaacgaggtctcgaacggatcgtcgatctggctggccttgtcgagaagcgtgtggaagttcgcctcgatccgctgcggtattgccagcggcgtgtaaacgctgccgccgatatccaccggtctgcgacgcaaccgcccgctggcgctcggatcggccagcaggttctcggaaaggagcgcgtgaaggttcaggaaggtgtagctgtcatagcccacctcgtctggcgcctcggcgatcaactcgatcgcggccttgtggttgaggatcatctgcgcgtagatcagatccttcccctcggccgctgcgccgaaacggatcaggttctcggtatccaggcggctgtaggagttgccctctagcttcgaggatgcccaagaaagatcgatcatcaaccgcccgatcacgtcgcgcagatgggtgcctgcaggccgtgtgctgtcgccggtccggcccatgtcatgcaactggctgcgcatggtctcaggcaagtagaaggtctggtttgggatgtagccgtcgaggaaatcctggctataggtcaccggccgcttggcgatgaccggctgtaggacgaggttcagaaccgcgcgaccagcctctgacaggacgagcccagtcgcatcggccgccgcaggctgcgcaagccgataggtgatggcaacgctgcgcccctccctgacaacacgccctgcgctctccagcgcgccgagatgacgctgcagggtccgtcgactggcagagacgccccgcgcactcagccgctcttcgatccaggtgagcgaaacagccgacaggtcggcaggaagtagcgctagtagctcatcgcggaggccctgatccttccgggtcatcgtcaacgtcctgtctgtggcgcgctctttgtcgcgctaaatggcgcgcaatatgtcgcgcttttgtcgcgcaattcggggtgagctgtcaatcgagggctgacattcggaaccgatgatcttctccccatcccagcgaacaaaacctccacctcggcctaaaggagacgcatcacgaccggagaaagacccatgctgacccagaagcgccttcacgacgtcctgcactacgatccgaagaccgggatcttcacctggcgccgaggcaagcgcaaaggcaagcctgcgggtgtcgtgcatgatgcgcgcggcttcctgaaggtccagatcgacaacgaacgccacttcctccatcggctggcctggctctggatgaccggcatgatgtcgcgctggcggatcgaacacatcaatggcgatcatggcgacaaccgctgggccaacctgcgccagggcgatcgactgcagaatggggccgatcgggcaccgctgcctgttccgaccggcgtgcaaggtatctggcaggtcaacgatcgctatgaggcgctgatcgccaccgataccgtgacgcggaacctgggcagcttcgccaccctggaagaggcgcgcgaggccctggcgcaggcggccatagcggcccgcaaaaggcagcgaaagcgattgcgtccgaccgcctgagacgtgacatcgggtccagttcgcgtcgttttttctgtccacatgtcaaccagatctgtccacaagggtaagtttcgggccggaaatccgcctgctatgtcaacatatgtcaacttatagctcaccgaagttgacaaacgagccgccggccgccggggatgtcaacgtccgatcccttgttttattggggttttcgggcccagctttacgctaagttgacaaccaccctcccaaaaagcttttttcgcccgagaagacggacgcaggacgggccatcccaaatcgaaagccgtgcgaaatggatcgagcggacgacggctcggagcaccaaagcatcgtcatgacgtccatacaggacatggcgcatggcgcaagcgatcgaccggagatgactgtcatcctctgggacaactcgtcccaatccgtcttctctaatagtatataactcttacttcttattgttcttcacatagagagaacacggatcgggataaggctgtctccggcagaccgcgccacccgctggggcgctcacaggcaggtatcctggttcggccgcaccgctgacacctcccgaaccacggatgcacctcagcgctcgccccagcgcgcctggcaagcatgctgtcagcagagcgtcggttgcgcgtcgcaatgtgcgtggtcatcgcacgaaacaagcatggaagtctggcacagcgcgagcgttcatcgggctgcgacaggaatgccggcggactccggcaaacttgccgttcggcctcaggctgcttgaccaaattccgcgccatcgcgaatgacatgtaaccgccggacgtagatagtgggcagtcatggcgcctctggcaagcttcatctcttgctactttgttcgctgcactgcggtcgcaagcaagatgcaccatgcggtcggcccagctagcaatggcgtcctggctgcttgcggcccgttgttggtgcgagtcgccggatatctggttgaaggccaagtgcccacccaaacgttccgattcccgccgcggtccatttttcttgacgcgcacgaaggtatccggttcgtcgacgaggtcctcgaggacgtcgcgcctgtgcagcgcggacgcctcttgttctggagcatgtggtgcaactcctcggtgtcatggcctcgccaaacatccccgcgtgtgcgaagaacagctgataacgaatagaccgcgcgtcgacaccgtgatgatcgagcacgttgtggcctatagggccggcaaatgcggctaggatagagcttctcgtctatccgttggtaacgacattctagcggttgatgtggccaagacactgttcggccccggctgattttcacagccagcgtaaacgcaatcagtaaagagcgcagctctctcgtaagaaggggcaggccgcagcctgccccaatggtgtggatctttcaccttatcgcgggaaagaccacgccgcttcttctgctaggagtttcacgatatcgtggaatatactggcttggcaagtatttcggaggaccgatgcatcgttttgcttttgaccttggaacaaactccattggctgggccgtttatcgcttggccgcggacatgctccccgcatcccttgaaaggaccggggtgaggatctttcccaacggtcgtgatccgcaatcgaaggagtccaacgctgcaggccgaagaacccctcgcggagcaaggcggaggcaagacaggagcttgggacgacggaagcgattgctcgatgacctgatcaagtttggtctgttgccatctgatgcggaatcccgaaaggaggtcttcgccgcaaacccccatgaagcccgggcaaaagccgcgagagaccaggtggagctgtatgaacttggccgagcgctttggcacatatcgaaacatcgcggcttcaagagcaaccgccgtgccgagaatgatggggatgaaaagagcaagatcgcgattgcttcggccgcacttctgaagcgactgaggtcagaagggcacccgacatatggcgattttctgcacgcgcgcctcgcgcgtggcgaagggacacgtatccgaccgaccggtgaaggcgcgaagctatcctatgcattttatccgacacgcgaccttctcgaaggagagttcgatcatatctgggtgacgcaggccgcatttcatccgtcgctgaccgaagacatgcggcggcggctgcatgacacgatcttctttcagcgccctttgcgccccgtccgccccggaaaatgcactttctttcctgatgaggaccgacttccgcgctggcacccagccgcacaggagttcctcatcctgtcgcaactgaaccatttgcgcatcgtcgacgatcacggcgaacagccgttggacatcaccgcacgggatcttgtcgcgcatacgttgatggctggaacgaaactcacatggtcgggcctgaaaaagaccttgaaactgccgtcgctggccgagttcaaccttgaaaagggcggcgttaaggagcttgcacggaatgacgtggcggcacgactgttgggtgatacaaagaaacctgggccgttggcaacgctctggccgaccctcgacagtcccacgcgagaggaaatcctgtggcagatttcggaggttgcagacccggacgagctcatctgctggctcatggaaaggctcggactttctcgcgaggtggcggaacgcatcgaaaggatcccactgccggacggtcacctccggttctgcaagatggctactcaggcgattgtcgaagaactgcgtcttgacgtcatcccctatgacgaagccgtccggcgcgcgcccttgctcgggggcgcgggcctggaccactccgattttcaggccgaggaaggcgtcgatacactgccgccctacaaccggctaccagtcctacagcgcatgatcgggaacgggagcggggatccgaatgaccctgacctattgcgatatggtcggatcaccaatccgactgtgcacatcgccctgggtcaattccgtcgcgtgatgaacgcgctgatcgcggaatatggcaagcccgcgcaggtggtgatcgaggctacccgtgacatggccaagtcagccgaggaactgaagaagatcgagaacaccatccgagataatgaaaggcgcaatgatcgctggcgggccgaattgcaggatgcgggacttctagcagaaggagcgcggatcggtgaccggttcctgcgaatgcgtctttgggaagagatgggtagaggcccggcagatcggctctgcccctataccggtcgtcccatcgcacttcaccaagtgcattcggacgagatcgagatcgaccacatcctccctttcgaagagaccttcgacgacagccccgcgaacaagacgctctgtttccgagaggccaaccgcaggaagggcaaactatcgccggccgaggcggccgtgcgtcagccggacttcttcgatctgcctgcgatcatcgcccgcacaaaacatctgcccgccaacaagtcctggcggttcctgcctggtgcaattcagaaatggcaggagacgcgcggtttcgaggatcgtcagttgaacgccaccggctatttcgcccatgtcgcgcgcgcctatgccgaagcgctgttcccgaaaaccgacgacgaaggcaaacgccgcagtcatgtctgggtcctgcccggccgcatgaccgcgatgctgcggcatcgctggggcctgaatctcggtgatcacaacagaaagtcgcgcgatgaccatcgtcatcacgcgattgacgccgccgtggcaggcgtgatcgataggcggatggtgcaggtattgcagacccatgcgcgaaatatgggggttgagcgtctggaccgcgtgttacccgctccacccgagcccttcgatggcttccgcgacgccgtcttgtctgccgtcgaaaaggtcaacgtcagccatcgcgcgcaacacggcagcatcgacccgcgcgatccgtcgcagaccagcggcaggctgcacaaagactttgcctacggcgaggtgcgggacgtgcccgagaaccagacagacctgaccatcggaaacgtggtcaggcgcaagccagtgatcggacttgaaaaagacgacctcgacaaggtgcgcgacgtcaagctgcgtgaatcccttcgagcagcgaccgagggcgtcaaggatgacaaagccaaattgacggcagccctgtttgagtggtcgcagaaaaccggccaccgcacgttgcggatcatcaaacccgcatcaacggctcgacctgtatatgggcgaccgggaaagccgcgtgcgggagaaccctacaagtggttcatcccggatgagaacgtctggatcgacatcctgcaatcaccaaacggcaagtggttcggcttcgggatcgacgtatgggcggccaactccggcaccgggcaaacttggcaagagttgcaccccgacgccaagttcatcatgcgccttcacaagaacgatactattcagcttttcgactgggacgacaacgagaagtgcatcgttccgggttcgaacaggatcaaggtggttaacagtatcccgaacagcccgaccaacaagaatgtcaaactcgtcggactgaacgacgcaggcaagttcgctggacgtcacaacgacaaggacgatcctttccggtgggattggccgccgtatgacaggttaagactacgtcgcgcccgtcgcgtgcggatcgacgaattggggcgggtgcacacgatcccgcatgggacggtttaaaaaatgggctgacaggcaggccaaccgctcgagcgcattccctcaaggaggctctcatggttggacggatattggaactgacaaggcccggactttcggtgcacaagcgccgagggttcctagcggtggatacaagcgacggcgaagccgggcggatcgcttttgatgacgttgaggcggtgctggtcgcaagccctggaatggtctggtcgaatacagcacttgccgaacttggcgtccgccaggtcccggtcatggtgctgggccatgacttcaaaccggtgagtgtcatgctcccgctaaacgggcatttccagcaggcgcatcgtttcagggcgcaagcggatgcgcccctgccctttcgcaagcaggcctgggccaccttggtgcgccacaaaatcacagcacaggccgaggcgcttgagcgcatgaacgagccgtccgagcggctgcggcggttggccatggccgtaagatccggcgatcccgacaatcgcgaggcacaggcggcgcaggcctattggcccttgatgatggacaaggcgttccgccgcggccgcgactccttcggagcaaatgccctcctgaactatggctatgccattctgagagcagcgaccgcccgcgcgatcgttgccgcagggctgcatccgtccttgtccgttcaccaccgctccggtggcgatgcgcttgcccttgccgatgatctgatggagcccttccgccccactatcgatctgatcgttcgccgcctgtgctccgatggtatcaccgaagtcgcagaggcgcgcggtgccctggtagccagccttgccgccgattttccgacaccgcagggcgcaagccccctgtcacaggtcttggtgcgactggcgcaaagcctcgcccagtcttgtgaaagcggaaagttgcgccttacctttcccggccgaccgatacccatagcctcggaaggccaggacgatgactaagaatggcttcaaacaactctcaggatacagaatcatgtgggtatgggtgcttttcgacctgccggtgctgaccagcgccgaacgcaagcgggccacgcggtttcgcaatgacctcttggaactcggcttcaatatggttcagttttcggtgtatcttcggcacgcatggagcaaagaaaaggcagagagctatgcgcgacaggttggcgacctcgtcccggatcccggccatgtgcaggtgctgttctttacggacaagcaatatgcccttagtcaggtgttccaaggcaaacgaagatcgaaagctcctgcggagaaaccagctcagctcgtcctattttgagcagacaaagagcatttcgctacggctcaacccaaggaaaagacccgcgcaacaagaagttgcgcggggtgtatcctagcagaagaagcgacgtggccaaacccggacaaatacggggggcgcatgttccaactggcgatcctagcagaagaagcgacgtggccaaacccggacccgccgaacagaacccccgtcgatacgacgatcctagcagaagaagcgacgtggccaaacccggactggtcgagcatcattgagcgctatcgcagcatcctagcagaagaagcgacgtggccaaacccggaccatggcgaggcggtcctttcgggggccgctatcctagcagaagaagcgacgtggccaaacccggacttggtatcgttccagactaggttctgattaatcctagcagaagaagcgacgtggccaaacccggacgcgccgatcagacctgtcagacccggcgatatcctagcagaagaagcgacgtggccaaacccggacacagtaagatactccgtgcagatcggtttgatcctagcagaagaagcgacgtggccaaacccggactcgttcgtcaacaaccaccccgacatggcgatcctagcagaagaagcgacgtggccaaacccggactgccacaccttgacgccatccatcgacgtgatcctagcagaagaagcgacgtggccaaacccggactgcaggcggttgggggcgttcatggcttccatcctagcagaagaagcgacgtggccaaacccggacgatcgggatggcgtcgtgcgcggcgccctgatcctagcagaagaagcgacgtggccaaacccggactgtcgatgcgttgcggttgatcgcgcgcacatcctagcagaagaagcgacgtggccaaacccggactggtcgagcatcattgagcgctatcgcagcatcctagcagaagaagcgacgtggccaaacccggactgtcgatgcgttgcggttgatcgcgcgcacatcctagcagaagaagcgacgtggccaaacccggacagcgcgttggtgccgccctcttccttcgggatcctagcagaagaagcgacgtggccaaacccggacgatctcgcgctcttcccgctggcattcgatatcctagcagaagaagcgacgtggccaaacccggactccttgcccttgaggacgcctacgacgacgatcctagcagaagaagcgacgtggccaaacccggactggtcgagcatcattgagcgctatcgcagcggatcctagcagaagaagcgacgtggccaaacccggacctggcgggcggcttcggtcgcccgctttccatcctagcagaagaagcgacgtggccaaacccggacgatcgggatggcgtcgtgcgcggcgccctgtatcctagcagaagaagcgacgtggccaaacccggactggtcgagcatcattgagagctatcgcagcatcctagcagaagaagcgacgtggccaaacccggaccggtgcggggctggcgtcttggccgcccatatcctagcagaagaagcgacgtggccaaacccggaccgacccgacttcaagggcacccgcgtttctatcctagcagaagaagcgacgtggccaaacccggaccagcgccgatgtgatgctggccggatcgtcatcctagcagaagaagcgacgtggccaaacccggacgggaggataacaaacacaaagaaccgaaggatcctagcagaagaagcgacgtggccaaacccggaccccaggcccttgcccccaagcccgacgagcatcctagcagaagaagcgacgtggccaaacccggaccaacgcaacgacgcgctcgcagccttcgcgatcctagcagaagaagcgacgtggccaaacccggacgcgggctgggtgcttgagcgcaccgggcgcatcctagcagaagaagcgacgtggccaaacccggacggtgtatcaagatggggcttatcgagacgtaatcctagcagaagaagcgacgtggccaaacccggacaactgtcgagcaacacggccctgtccatctatcctagcagaagaagcgacgtggccaaacccggactgatcaagcattgccagcgccacctgccagatcctagcagaagaagcgacgtggccaaacccggaccccccgctgcattgcgtagatccacttgcgatcctagcagaagaagcgacgtggccaaacccggacagtgagggcggcaaagatgtgtcactgaagatcctagcagaagaagcgacgtggccaaacccggacattattccgttgcggatagcgtgtgatcttatcctagcagaagaagcgacgtggccaaacccggactgcttgcgctggcgttcgagatgcgcctcaatcctagcagaagaagcgacgtggccaaacccggacgatgtggtctgtcacatcaacccccatgccatcctagcagaagaagcgacgtggccaaacccggacaaccgagcgtgatacgccgcatggatggaatcctagcagaagaagcgacgtggccaaacccggaccggccccgccatcagcacgcggtgcctttcatcctagcagaagaagcgacgtggccaaacccggacgacggactgcgcatcggcgcatccggaaagatcctagcagaagaagcgacgtggccaaacccggacgcgggctgggtgcttgagcgcaccgggcgcatcctagcagaagaagcgacgtggccaaggcggattttgctaatgcgcaggttgccgacggcgtctcataccgtgcccatccgggtttgctaatgcgcaggtgcttcttagcacccgaatataccttgtgctaatgcgcaggcagggtattgataacgttggccgaaacggctgcatttactcaccccaccacagagcctctataccatgagcaatagcaacaactaccctgagaaggcagtaggatacatgaactggcccctttttcgagcggacacttgggcatagccatggaggcttaggta

SEQ ID NO: 3218 - DNA, 10637 bp, synthetic construct
  misc_feature 1..10637: note = Synthetic
  source 1..10637: mol_type = other DNA
cgcgcctggccccggctgcgcgcggcgctgacccccggcgggcgcatcttcgtcgatggggtcgaaacgacggggccggagtaggggcgccgcggggatagtctttgttgagaggagtgcaggaatgatcttcaagggaggttgtcattgcggtcagatcgccttcgaggtcgagggcgagatcgcgcaggtggtggaatgcaactgctcgatctgttcgcgcaaggggtcgcttttgtggttcgtgccgcgcgaccggctgcgcctgtccacgccggaagaggccatgagcacctaccgcttcggcaagcaggcgatcggccaccgcttctgcccgacctgcggcatgcatcccttcgccgagggggccgacccgtccggcaaccggatcgccgccgtcaacgtccgctgcctcgagggcatcgacctgtccgcgatccccgtcgcgcaggtgaacggccgagagcgctgaccgggcatgaggatcgcgcccttcgccgccgccgataccgccgcctggctccgcctgctgaacctgacacggcccgtgcccctgtcggccgaagacttcgccgcgcgcgaggcgcagggccccgagggcgagttcctccaccgctgcctcggccggaccgggaccgcgacggtcgccatcggccagcttgcggccgcgccctatgccccggcggatcacctggcgctgctcatctgcaccgatcccgaatggcgcggccggggctgcggcacggcgatgctggcccacctcgaaggcgtcgctgcggcgcagggctacgcgggccttgcggccacgctgccggagacggcacagggcgatatcgactggatgcagcgtcgcggctacctgcgccatgccctgcgcttcgacagccttctcgaccttgccagcctgccgcttgccgcgattgaggcagccccgccgccagatctctgcctgcaggacatgaccggcgcgaccgaagcccgatggcaggaggtctgcgaccttttcgccgggcttctcgccgacgcccccgacatgcgcgggctgccccgctggagccgggcgcgctgcgagaccgtcctgcgccgcagccccagcgcttgcgaccgctgggtgatcgtggcgcgcgccggggaccgggccgtgggcctgaccgtcggccatgccctgggggcggagatctattccttcttcaccggcgtcgcgcccgacctgcgcggcaccggcctcggcctcgcgctcaagcggcggctgatcgccgtggcgcgggccgagggtattacccggatgcgcaccaccaacctcgagggcaatgcgccggccctgcgcctgaacgccgccttgggcttccggcgcgtccccggcagcgtcgagctgcgccggcggatcggctccgcatctcaggcgtagggggtcgacgcgggcctgccggcgaggtccgtccagacgtcgtcgggctgggagcgatcgcggtggcagatgcggtcgtgacccggatagacgatgcgatccaccggggcgcgcgttccgacgacgaggcatcgcgtcggccggtcggaccggtcctcgaggcaatgcgcgacgggcacgccggccttgaacgcggcggcatcgccggggcgcagaagggtctcgcagtcgccctcgaccagcgtgatctcgccctcgaggacgaggatcatctcgtcctcggcctcgtgccagtgcgcgagggcagagcgggatcccggttccagaacctcgacgaaggcgccgaactgcgtaaggccggcagcttcattgatccacagcgcgcgtcgatgggagagcaggcctcgccctacaccgatcccagagacagtaatgcttcagatccagttccggattgttaggtctgacgggcagatcgcgttctattacgcaggcgcgtcacgcagcagccacaaaggctgggcagggcgataaggctgtgcctgcgctttccacaggaggcgaatgctggatatagccgagttcgtcagcgttgcctgacgggtagcgcgccaaaggatcgcactcgacaacgcgactcgcatcctgcagatgacgcagcttgcgcaggtatcgtcaaggcgctcttgggacatgggctctggggcaggtgatggcaccatcctttgtggagtaaggccggcagcccacgaccagctttcttccgaaagcttccgaaagaagaggggcaggccgcagcctgccccaatggtgtggatctttcaccttatcgcgggaaagaccacgccgcttcttttgctaggaatttgaatgtatcccggaacaggctggtatggcaagcatttcggaggggctatgcatcgttttgcttttgaccttggaacacattcgcttggctgggcggtctaccgtctggacgctgacttgcttccagtttcgcttgaaaagcttggcgtgcggatattctcgagcggccgggatccgaagtcgaaggaatccaatgctgcgggacgccgtgggccgcgcgctgcgcggcggcaacgggacagaaggctcggacgacgcggaaggctgcttggcgacctgataaatcttggcctgctgccgcaagacgcccaagccagaaatgcggttttcgcggcagatcctcatgaagctcgcgcaagggccgcgcgcgagcaggtttcgccagagcagcttggccgggcgctgtggcacatgtcgaaacaccgtggtttcaagagcaatcgtcgggccgacaacgacgcggacgagaagggcaaggtcgcaaccgcgtccaatgctcttctcgagcgactcagatccgaggggcacccgacatacggcgccttcctccacgcccgccttctgcggggcgaaggaacgcgcatccggccgaccggcgaagatacgaagctgtcttacgaattctatccgacgcgcgccatgctggaagcagagttcgatcacatccgggccacccaggcggcctatcatccgtcgctgaccaatgacaaatgggaacggctgcgtgatacgatcttcttccagcgtcccttgcgcccggtccggccgggaaagtgcaccttcttccccgatcaggatcgcctgccgcgctggcatccggtcgcgcaggaattcctgatcctgtcgcaactcaatcacctgcgaatcgtcgatgagtatggcgaaagtccgctggatattaccgctcgtgaccttgtcgcgcgcacgctgatgggtgggaccaagctttcatgggcggcgctgcgaaagaccctgaaattgccgtcgcaggctgcgttcaacctggaaaagggcgggttgaaggagcttgcgcgcaatgatgtcgccgcacggctcttgggtgatgcgaagaagcctggaccgctggcaagtctgtggccgaccctcgacagcgccacgcaggtgcaaatgctcggccggatcgcggatactgccgacccgaacgagttgattggctggctgatcgaacggcacgggcttacccgcgaggtcgccgaaagggcggagaggattccgctccccgatggccacctgcgcttctgcctcaaggccacacaggccatcctggaagagatgcgcagggaagtcatcacctatgacgaggcggtgcgccgtgcgccactgctgggcggcgcggggctggaccattcagatttccaggccgagaagggcgtggatatcctgccaccgtataaccggctgcctgtgttgcagcggatgatcgggaacggcacaggcgacccgaatgaccccgaccttatccgctatggccagattaccaacccgacagtgcatatcgccctgggacagttccggcgggtgatgaacgcgctgatcgtcgaatatggcaagcctgcccaggtggtgatcgaggccgcgcgcgacatggccaagtcggccgaggaactgaatcgcatcgaaagcgaaatccgcaagaacacgcagcgcaacgatcgctggcggaaagagttgcagcaggcgggtctgctggtcgaaggcgcacgcgtcggcgaccggtttctgcgtatgcgcctgtgggaagagctgggcaagggcccggcggatcggctctgcccctacaccggccagaccatcgcgccgcatcaactgttttccgatgaggtcgagatcgaccacatcctgcccttcgaggagaccttcgacgatagccccgcgaacaagacggtgtgctttcgtgtggccaatcgcatcaagggcaagcgtgcgcccggcgaggcctggtccggcacggatcttgccgcgatcatcgcccgcacgaaacaccttccgcccaacaaggcctggcgattccttcccggcgccatgcagaaatgggaggaaacgcgcggtttcgaggatcgccagctgaacgccaccggctatctcgcccgcgtcgtgcgcacctatgccgaggcgctgtttgcaaagactgatgacgaggggaggcggcgcagccacgtctggatcctgccgggccgcatgacggcgatgctgcggcatcgctggggcctgaacctgggcgatcacaaccgcaagctgcgcgacgatcaccgccaccacgcgatcgacgccgcagtggtgggggtgatcgaccggcggatggtgcaggtcttgcagacccatgcgcggaagattggtgcagacgggcttgaccgcgtgttgcccgcgccgcccgagccattcgagggctttcgcgatgccgtgctgtccgctggggaaaaggtcaacgtcagccatcgcccgcagcatggcagcatcgacccatccgacccctcgcagacgagcggtcggctgcacgaggataccgtctttggcattgtgcgcgacgtgccggaaaatcaggccgaccgaaccatcgggaatgtcgtggtgcgcaagcctgtccttggcttgaccgaaaaggaaatcggtcaggtgcgcgacgtcaagctgcgccgcagccttgaggaggccacccgatcggcccgcgacaagtccttgccgaagaaagagcgcgacaagcgccgggccgaggcgctggcagcgtggagcaaggaaacgggccaccgcaagctgcgcatcctgaaacctgaggccgcggtgcggccggttcttgatcgcgagggccggccctacaaatggctggtccccggcgagaatgcctacatggacatcctcgaaggccccgacggcacctggttccaccacgtgaccgacatctgggcggccaattcaggcggggccgagccgtggaacatcgtgtatcccgacgcgcgtttcatcatgcgcgtgtataagaacgacacgatccagctgttcgattgggatgaaaagaacaaatgtattgcggaaggcagcaaccggatcaagcgggtcgttcgactgtcgccaagcaactcggtgctttacctcgtcgggatcaatgacgcgggcgactttaagaaacgccatgatgatacccaagaccccttccgctgggatctcgcaaatatcggcaaactcaggctccgccgtgcccggcgcgtgcggatcgacgaactggggcgggtgcacacgatccgacatgggatcgtgtagacaaatgggctgacaggcagggcaacctttcgggcgttttccttcaaggaggctctgatggttggacgaatactggaactgacgacacccgggctttcggtgcacaagcgccgcggatttctcgcggttgatagggacggaggcgaggccggacgcatcgccttcgacgacctcgaggcggtgctggtcgccagccccgggatggtctggtcgaacaccgcgctggccgaacttgcggcccgccaggtgccggtcatggtgctgggccatgacttcaatccggtggctgtcgtgctgccactgaatgggcatttccagcaggcgcacaggatcagagcccaggcggatgcatccttgccgttccgcaagcaggcttgggccgcactggttcgccacaagatcatcgcgcaggcagaggcgctggagcgcgtgaacgccccgtccgagcgtttgcgcagactggccacagcggtgcgctccggcgacccggacaaccgcgaggcgcaggctgcgcaggcctattggccgctgatgatggacaagacgttccgacgtgaccgcgaagcttcggggatcaatggcatgctgaactacggctatgccattctgcgggcggcgacggcgcgcgcgatcgtggccgccggactgcatccgtccctgtccgtccatcaccgttcggggggcgatgcgctggcgctggccgatgacctgatggagccgtttcgtccgaccatcgatctgatcgttcgtcgcctgtgtgctgaaggaatcacccaagttgcggaagcacgcggtgcgctcgttgccagccttgctgccgactttccgacggcgcagggcgccagccccctgtcacaggttctgctgcgcctggcccagagccttgcccgatcctgcgagacgggcagactgcgccttgtttttccggaccggccgatccccctcgccaccgaggagcaggaggatgagtgacaatggcttcaggcagctttcaggatacaggatcatgtgggtctgggtgcttttcgatctgccggtgctgaccagcgccgaacgcaagcgggccacgcggttccgcaacgacctgttggaccttggcttccagatggttcagttttcggtctatcttcgccatgcatggagcaaggagaaggccgaaagttatgcccgacaggtgggtgagcttgtccccgaagctggccacgtccaggttcttttctttacggacaagcaatatgcgctcagtcaggtctttcatggcaagcgacgctccaagactcccgcggaaaaacctgctcaactcgcactgttctaggcgtgcaggggccagatttattcgggccaagtcacgaaaaaaccccgcgcaacaagaagttgcgcggggtcaatcctagcaaaagaagcgacgtagccaagcccggacggggcatgctgagtctcattgagcgaggcaatcctagcaaaagaagcgacgtagccaagcccggaccgaaactgtgccgaccgctgacttcgaccaatcctagcaaaagaagcgacgtagccaagcccggacgtgccgaggccaagcgtcgctatgagcagatcctagcaaaagaagcgacgtagccaagcccggactagtcacacagcacggtgcgcaggactttgatcctagcaaaagaagcgacgtagccaagcccggaccaagattgccgcgaaatcgctcgtcacctaacgcaagaaatgaaatgcgttttgcgcaagtggcggaagcggtgggattcgaacccacggtggagtttcccccacgctggttttcaagaccagagccttaaaccactcggccacgcttccgtctgcttgccgcgcgggacggtaatggggtcagataagtggtcgtgaggggtggggcaagggaaaatcgacgaccttgaaggggttgcggcctgctggcttgcgaaaggtcatgcgcgggactggacaagcgccggggcgggaagctctacgcgcaccgacaggcccccaagccgcgcccgatcaagcgatatcctgccgccatgcagggcgaccaggtccgcgacgatcgccaaccccaggccggcgccgggggggccggtctcgtccaggcgtgcgccccgcgtcagggcttgtgccgccttttcgggcgcgaggcccggaccgtcgtcggcaatctgcacgtgcaacagatcggagtgtgtcgatgcggtgatcgccacgcgccggttggcccatttcgcggcgttttccagcaggttgccgatgacctcttcaagatcgtggcgttcacccgcaaagattgccgagggctcgatcctcgactcgacaagcaggtcgcgctcgcggatgatcggacccagcaccatcagaatgtcctgcacgaccggcaagaccgctgtgcgctgtcccagaacccgcgaggcggctgcgctgcgcgcgcgccgcaaatgccagccgatctggcgatccatacggccgatcagggcctgcgccgggtgatccgcgggcaaggtgtttgccagagccgccagcggagtcctcagcgaatgggcgaggttgccgacatggtcgcgcgcgcgggtcagcaggatgcggttctgatcaagcagaccgttgatttcacccgccaacggccgcaattcggcaacggccggcaagggcagcgtctgggaacggccctcgcgtatcgcgcgcagatcctgccccagacggtcaaggctgcgcaagcccgcaaaaacctgcaccaggctggcgagcgccagggcaaacccaagcaccacaagcgagatccgcagcggttggcgcacactcgcaagtgcggcgtcgatttcggccacgggcatggtgacggtcagtgtgaatcgctgttgtgtgtcgggcagggtgaaatctgtctgcatcacccgcaacccttccatctgcgggcctgtccccgcaccgccccggatttcaccgggtggggatttcagcacattgtcgaacagcgatggcgatttggccaatacctgaccgtcctgagcaacctgccagaaccagcccgacaggggcagttcgaagcgcgggtcgcgacctgcgggcgcaaggacaaggctgccgtcgctttgcgccgctgcgccggcaatgaggctttccgccacagcctgggcctcggcatcgaaacggtcagtgatgaaatcctcgaggatcgcagcgatggccagatagcccgccaagagcgcggccccggtcaatagcgccgccagcaggatcaggcgggcgcggatggaatcgcgcggccagatcatgaccgcgtccgaagcagatatccctctccacgacgggtttcgatcaggccgtccccgatcttgcgccgcaaccggccaatgaccacctcgatcgacttgaaatcgcggtctgcagcagcgtcgtaaagatgatccgacagttcgctgcgggtaatgacgcggttctggtgatgaatcaggtaggtcagaatcctggtctcgaacgcggtcaatcgcagcgccatcccgtcgcgggtgatgatgccaagctgactgtcaagttgcagcggcccggccttgatgatcgcgcaggcatggcctgcggcgcgacggaccagcgtctgggcgcgaatgacgacctcgtccagccggaacggcttgacggcgtaatcgtcggcgccagcgcgaaatccggcgaccttgtcggaccagtcgccccgtgccgtcaggatcaggaccggcatggtgatgccgccatcacgccagcgcgtcagcacctcgatccccggcatgcccggcaaacccagatccaggatcgcgaggtcgtaggtctcggtcgcgcccaggaattcgccgcgcggcccgtccgctgcaaggtcgcaagcaaagccactgttctgcatggcagcaagcaattgctcacccagggtggggtcgtcctcgacgatcaggcaacgcatgctcaatcttctcctgtccggcgcgcggccgtcagcccggccccggcgacctcaagaaaggcgccgctgaatgcgtccagccgcaatcgaagcacattccgatcgggggtcaacagccgcagttcgtgcacaagtatcgtgccgcgcgcgcgttctgcagggtttgccggcagcagacgcgcggcgataagccgccctcgaaagcgcgcctcggcaatccgcagcgcgcgttgcaggggcaatggctgggcatgatcccgctcaagatccctgaactggccgttccaatcctcgtcctcggtccatgcatccttcgggtcggcatggatcatgaccgcagcagcaagccatagccctgcaagaacgggaaggaagatgataaccgcgcggcgcatgcgacagatctagtgccggaaagggaaatgaaaaccaaacggcgcattaaaccgccattggcgcaagatgtcctatcagcgattcgcaagggcgcaaatcctgcgtccccgaagaaggaatgaacagagatgagcagattcaccccaaaagcttttacgctggctgccatggtggcgctgatcgcgcagccgggccttgcccagcagagcccgcagcagccccagccgccggcccctgtcgcggccagcgcgatcaacgtccccaaggcgctcagcgacgccggactggccgaaatcaccagcaagccggccaagcgaggcgatggcatgcggattcaggggcgcctgcctgatggcacctggatcgaagccatggttgacgggcaggggcagttgcgtggtttgcgcggcaaggatgacgcggcgctgcccgctgccctggtcgagcctctggtgccgcaggccgtgcgcagcaatgcgctttatgccgaactgggtcaaatccgtgccgtcgcatccggtccgcgcggtgtgatgctggcagggcaggatgcgcaaggaaacaaggttcatgcccgattttctgtcgacggcaccttgctgcgtttcggccggtcggatggcgatgacgaccatgacaaggatcacgacgaccacccgcgcggcaagcatggcaagcgtggcgacgatcatggccccccggcatcgcgaccgcgaccgccgacgacccgcgcggccggctggcccg

SEQ ID NO: 3219 - DNA, 7923 bp, synthetic construct
  source 1..7923: mol_type = other DNA
  misc_feature 1..7923: note = Synthetic
aaaggggaaagcttggccatctgctcgtcgctcagccagtagaggtcgtccatgtcaccgctccgtttttcgggccgtgaatcacgccgaacagcaacaatcaatgcatcctgaccctagcaacctgtgctgaaccagtgttggagtcttttggcccagagctattgctcgaacgatccgtctcacgcgtttccgaccgaagcgcacgattgactgacgggggtcgccgtgttcgagcgcgctctcgccgcatcgccgaaccgacgctcattaagcgccgtgcggatggcatccagggcttcgcgcagctgatccgatgcttgcgccacgccggccgcgtcgccgaagatcatgtcgtcgatcgcgcgaagttcttcggcgcgcacatccattatcgccccgatctccttcatgcttgagacccacccgcctcggtgcccgtgtcctcccggtccagccgatccagcaggcgcagcccctcctcgggatcgcccctagcggcgcgggtccggaaccgcgtttccagatcgaactcagtcagcgcgcgtgtcgctagctcctcgatcaccttgttgatgctcacgccacgcgtacgggcgagctgacgcagccgctcgtgctgggcgtcgggcagtctgatagtcatgacgctcatgatcgtgtctcccatgcgttcaaaaaatctccggccgtgccggtcgtcacattgttgaagcgcagctcgccgcgccacaggtcgcgcaggttggtcgtgacgatccagtccgcgcctccggcaaccgccagttcgaccaagtggtcgtcgccgggatcgggcaggttcggccgccagaggtaatagaccggcgtccaggtgctgaccgacatcagcgcgtcgaacaaaacatcacgctctgccgcatcgagtgcgcagcgcgcgaacagatcgctgcgcccgaggacgtcttcgtattccgcgaacagcgccgcaccgatgagcggcgtcaccttccgttcgaggcaaaggcgcaggatgcgtcgcgacgccccgcccccggacagaagggcggcaacgacgatgttagtgtccagaacgactcgcattagtttagatagcatatgtgctatctttaagccaccgggttccctgcgcgccgcagggtgcgtcagccccacattctggctgcgatgtcttgctcttcgcgacccacggcgtccgcgtagatcgccgtggtgctcagctgagcgtgtcccatccacttctggaccatgtgcaaagggatgccgttcaccgtggcattgatcccgaagccgtgccgtaaccctttggggctgcgatggggcgcgtccgggataccagcctcgatcatgatgcgctttacgatctgccagagccgcacgcggccgatgggccagatcggtgcattggccttcttgcgcgacttcgcggcctcgcggagcccatgcgcggtgttcagagtatcgagatactccggcggcaccggcaccgcgcgatagacgatccgtggactgcccttggcatccttgcgctttttcaggctgcgcaacgtgaccgtgccgcccgacagatcgacgcgcgcgggggtgatctccagaagttcggacgcacggcagccggtgtagtgcagcgtctcgcacagggtgcggtcgcgggccgactgacgccgggcggctgcaagaaaagcggcacgctcctcggcgttgagataaagccggtttccggcagcgtcgtagaggcgcatttcgctcatgtgaacagcatgcccgaaaactgttaagcgcggaagcgggaaagccccctgccccatgcgtgagccgtccggcggcaacccggatacttaacactatggccaatagtgttaaggccgcacgttcgataaaccaaatgaggcgggcctcggcccgcctcaacgtcgtggatatttcaccttatcgcgggaaagaccacgaggcttcttctgctagaagatgtaccaatcctcctctactctccccgaaaggtcaaggggttaaggaggttgtgacatgcccgtccggtttgcattcgatctgggaacgacatccatcggttgggcggtctacgacctcgacccggccctttggaagaccgttcacaaggccaggctgaccggcctgcgcaagttgggcgtgcgcctcttcgatgacgggcgcgacccacaaaccggcgattcccatgccgccaaccgccgcctaccccgcgccatgcgtcgacagcaagatcgtcgccttgcccggcgcgaccggctggaacgtgatcttatggaaactggtcttctcccgccgcccggcctggagcgtgaccgcctgttcacctgcgcccatccataccagacctgcgccgaggccgatgacgccgactgtcgcaacccctaccgcctgcgcgccctcgcggcgacggggaaaatttccctgcacgatctgggccgggcgctctggcatatctccaagcaccggggcttcgccagcaatcgcaagaccgacccggatgaggacgataccggcctcatcaaatctgccgcgcgcgccttggctgaaacgcttaccgaaaccggccacgccacctatggcacctatctctggtcccgcctgaaagccggcgagggtgtgcgcgtccgtccgcagggcgagggcgcggagaaacattacgacttctacccgacccgccagatgctcgataacgaattcgacgcgatctggacggaacaggccaaacaccattccgagctgaccgatgccgtgcgcgaccgactgcgcgaaacgatcttcttccagcgccccctgcgccccgtcgatcccggccgctgcactttctttccccaaaagccccgcttgccacgctggcatccctccgcccaggccttcctgatcctgcaacagctcggccacttgcggatcatccgcgaaacccacgaggaacgtctcgaccccgacaaacatcgcgtcctgttcgacgcgctgaacggcgggcagaagatgacctggacgcaggtccgcaagacacttggcctgacatcgcaggacgacctcaatctccattccggaggtctcaagcatctccatttcaaccaggtcgccgccgccctgctcggcacgaagaagcctggccccctcgccgagcaatggcccggctatgataccgcgacccgagaacagatcctcgccaagctggccgacaccgaaaaccccgacgcgctcagggactggctgaccggcacgcttgccctcgacgcccataccgccgctgccgtcgaaaaggtcaggctgcccgacggccacctacgtttctgccgcgaggcgaccgaggcgatggtcgccgaaatgcgttccggcgacgttctcacgtacaacgaagccgtcaaccgcgccccactcctctccggcatcgatttcaccgacagtcgcccggaaaaaggcgtctgcaccttaccctactacaacgagctggatcacatgcagcggcttctgggcaacggcaccggcaaccctgagcacccccacgacatgcgcctcggcaggatcaccaacccgaccgtgcatatcgcgctcaaccagtttcgccgggtcatcaacgggctcattgccgagtatggcaaacccgcccaggtggtgctggaagccacccgcgatctgggcagatcgccacgcgaaaaggccgagatcgagaagacaatcaaggccaacgaaaagcgcaacgaccgctatcgcgcggatttggaggaggcgggttatctgaagcccggccaacgcgtcggtgacctgttcctcaagatgcgcctgtgggaggaactcggccgcaacgaggcggaccggtgcagtcccttcactgggcgcccgatcggtctgcacgacctgcattccgacgccgtcgagatcgagcacatcctgcccttcggcgaaacccttgacaattcgcccgccaacaagaccctcgccttccgggacgagaaccgccgtaagggcaagctgtcacccggcgaagccgccgagcttggcatcttcgatcaggaggccatgatcgagcggacaaaacacctgccccgcaacaaggcctggcgcttcctgcccgacgcgatggaggttttcgaggaacagaaaagcttcgaggatcgccagctccacgccaccggctatctcgcaaaggtcgtacggggttacgccgaaaccctcttcgacaagaccgatgtggacggaacggaacgccgccatatctggatgctcccgggccgcatgaccgccctgctgcgccaccgctggggcctgaacctgagcgatcacaaccgcaaaaatcgcgatgatcaccgccaccacgccatcgacgctgcggtgatcggtgtgatcgaccgagccataataacacaacttcagaaggccgccaaacagcacggcgccgacgccctgtcccgcgtcctgcccgccccgcccgagccgttcgagggcttccgcgatgcggtaatgaccgccatccgcgatgtccgcgccagccatcgcgcacggcatgtgaccgccgatgccaccgatccctcgcagaccagtggcagacttcatgaggccactgcctacggccccgtcagggacgttcctgagaaccaggccgacttaacgatcggcaatgtcgttgtccgcaagccggtcaccgccctgaccgccaaggagatcggcctggtccgcgatgtggccatccggcatgacctgcaggaggcgaccgcgcccgcccgcgccccggatctgcccaagaccgaggccgataaggtccgcgccaagctgcttgccgagtggtccgcccgcaccggtcaccgccgtctccgcctgctcaaggcggaagcctccgttcgcgccgtgcatgacagcaacggcacagcctacaagtatcacgcgcccggcgagaacgcctgcctcgacatcatcgacgtcgacggcacctggagatgccatgccttgactctctgggatgctaattccggccagaacacccactggcgcgacctctatcccgacgccagcttcatcatgcggctccacaaagaggacacgctgcaacttttcgattgggacgatgaagagggaactgtgattcccggcagcaatgcgatcaaacgtgtcgttcgtctctcgccgagcaacaacgtggtctatcttgcaggactgaacgaggccgggaaactacaacagcgacatggcaatgaagaggatgactttacttgggattttgctaatatttccaagctcaagttccgccgcgcccggcgcgtgcggatcgacgagttggggaaggtgcacaccataccgcatggcaaggtgtgacgtttgcaggtgacctgtcgggcccgagtgggagggttcgatggttggacggatactggaactggcgcgggacaacctcgccattcacaagtcacgcggctttttgtcagtgcgccacgatggcgcggaaatcggcaaggcggagcttgacgacatcgacgccgtgctggtcacgggccagggcgtgacctggtccaacaccgcgcttgcccacctcgcagcgcagaacgtgcccgtcaccatcttggggccaaacttcgcccccgttgccgtcgtcatgcctctgaacggccattgcgaacagggctaccgcatggccgatcaggccgccgcccccaaaccgctccgcaagcaggtctgggcgcggctcgtccgccacaagatcgccgcccaggccgccgtgctcgatcgcctcgacctgccctcgcaacggctgcaccggctgaccgccgccgtccgctccggcgaccccgacaaccgcgaggcgcaggccgcgcaggcctactggccgcccctgctcggcaagggctttcgccgcgatacccgggcggagggcgccaatgctcttctcaattatggatatgccgtcctgcgcgccgcgaccgcccgcgccatcgtttccgctggcctgcacccctcgctctcggtccatcaccgcagcggcggcgatgcgctcgccttggccgatgacctgatggaaccctttcgccccaccatcgacttgaccgtccatgccctgcttcagtccggcgtcacctccgtcgaagacggccgcgccgacctcgtcgaaactctctccgcgcccttttcaaccaatcaggggcgctcgccactctcccaggtgctgttccggctggcccagagcgtcgccgcaagtttcaccgcccgaaaggccgatctcgccttcccgcgacagccgatccccgaagacgaccccgccgatgcctaaccttcctgccctctcgaagtacaagatcatgtggatttggacactgttcgacctccccgtcctgacgaagacggagcgccgccgcgccacgagattccggaatgacttgctcgatctcggtttcggaatggtgcagttttcggtatatctgcgccatgcctactccaaggaaaaagctgatgttatcgccgccaaggtcagcgagttggtccccccggccggtcacgtccagatattgttcttcacggataggcaatatcagctcacacagagtttccacggtcgcgcccgtagcggccccgagcgtaaaaaacccgatcaactcaccttattttgacgaatcttggtctgttttttcgacacgcgcgacaagaaaatgccctgcgaaccaagaggttacgcagggcgggttctagcagaagaagcctcgcggccaaacccggacgccttgacgcggtaatgagcggcacggtcggttctagcagaagaagcctcgcggccaaacccggacagcccgcattcgccgattgggcgccgagaggttctagcagaagaagcctcgcggccaaacccggactgcccgcgtcggtgccgcatttcgcgaccgttctagcagaagaagcctcgcggccaaacccggacgaccgggaacgacgaaatctcgtcgagaaaggttctagcagaagaagcctcgcggccaaacccggacgatatccgccgccgccaagcggcctcgggagttctagcagaagaagcctcgcggccaaacccggacacaaggagccataccatggcaaacaatgagttctagcagaagaagcctcgcggccaaacccggacggttcagggctttggcggccgcattgcgaagttctagcagaagaagcctcgcggccaaacccggactcgcagcgcatgtgctggaccggccgtgaggttctagcagaagaagcctcgcggccaaacccggacaaacgtcttgctgttgatatctgtcagcagttctagcagaagaagcctcgcggccaaacccggacgatccattccgacaccacgtctccgacgatgttctagcagaagaagcctcgcggccaaacccggactaggcccaacgcggcctgcgacgcatgatcgttctagcagaagaagcctcgcggccaaacccggacggcctcgcccagccgcttttgcatggccacgttctagcagaagaagcctcgcggccaaacccggacgcaccgcggccttggtcacgtcgtcggtgtgttctagcagaagaagcctcgcggccaaacccggacgctcgagacttggcaacgttcgacagactggttctagcagaagaagcctcgcggccaaacccggactgcccacgatgcgacccaccgccagaaatgttctagcagaagaagcctcgcggccaaacccggacagcgcgaacaggcgcaggccaaggcggcgggttctagcagaagaagcctcgcggccaaacccggactagtggttccagatggcgatcttgacgatagttctaggctcaggacccattgattttagcagaagtgcatgattcaccgcgcgaaaacagagcggtgatatgtctgatctcttctggctgagcgatgcgcagatggcgcgtctggagccctact

SEQ ID NO: 3220 - DNA, 4166 bp, synthetic construct
  misc_feature 1..4166: note = Synthetic
  source 1..4166: mol_type = other DNA
gccgctggacttggccaatcccgatctgtcccgcgtctggcgtttcgaattgcgcatggggtcgcgacagttgcgcaaccgttgggaaatgcgcagttggagcgacctggacgccatgatcggcgacgcctatgccgaattttgtcagaaacttcggtattgcattgtgtcggcagaccgcaaccgcgcacgctggccggttcatgagctttggcgattggtgactggccagatcgacagcgcaatgtccgacctgcggtccggcgtgttgccggacacggtcaaaaccgtcaatcgggaggcacacaagcgcaagttggacattctaatcctcggcctgattttggcgcgcttggcaatggaagaagaaagtgacgaagacagtgcgcaattcatgaagcgtcacgcgacggtgatcggtgcgttatcgcgcgagcacccgatccccgaaagcgaacggctgcaaaaggcgaaggaaaggcatttgtttcgatagcgcagattgacggccagcgcataagaaaccaactcgggattgccatcatcaagagttggggcaggccgcagcctgccccgatgttgtggtctaaaccttatcgcgggaaagaccacgccgcttcttctgctaggaattaaatcgtattccggcgtattgtcagatggcaagcaaattcggagtcaaaatgtttcgtttcgcatttgacctagggtctggttcgcttggatgggcggtttttgaactcgaggaaataggtcacaaaccgattgcgctggcggatatgggcgcgtgcattttcccgactggcagggaccccaagtcaaaggaatccaaagcagctggcagacggcagccccgacaacagagacggcagacagatcgacgaaagaaacggcgcgtcgaactcgagaaccgattagttggcgctggcttgatgccgcctgccgatgacgaggaagccaggcgcgctttcttcgatttggatccttatctggcccgcgaccgcgccgctcggggacgggctgaattgaacgacctcggccgcgcgatctggcacatatccaaacatcgaggcttcaagagcaaccggaaaaccgaccgcagcaacgaagacgagaaaggcaagatttccgaggcatcggccgcattgcgaaggttgctggcagagcgtggtgcgccttcctatggtgcctggctcgccgaacggcaccgagcgaagcaaccagttcgggtcaggccggtcggcgaagggatcaaaaccgcctacgacttctacccgatccggtcgatgctcgaggatgagttcgatcacatgtggcgggtgcaggccccgcatcactcccatttgacacaaaatgcccgcgaggaaatccgcgacacggtcttttttcagcgccccttgaagccggttaagccgggccggtgcaccttctttcccgatgactatcgaatgcccaagtggcacccgttagcgcaggagttcctgatcctgcaacaactcaacatgctccggattattgagggcagcgttgaacggagccttgacctgaccgcacgcgatttgatcgcgcgacatcttatgtccggcgaaaggctcacctgggcgggtctgaaacgccaactcaatctgccaagcgacactaagttgaatctcgaagacggcgggttgaaggaattgccccacaatgcgaccgcagcgcggatggtcggcacaaaaggcaagtccggtccgctggcagttgtgtggccgggctggcgtgatgaagaccgtttgcgggtgctcgaggtgctggacgaggctatgacaccgcaggctgcaattgaccgactcgtttcgcattgttcccttgaactggccctcgcggagaaggtcgaaaaaattccccttcctgacggtcacctgatgctggggaaacgcgcaataaatgcgatccttactgtcatgcgcgaacaggtcgtggtctattccgatgcaatagatcgtgccagcgaacgcgggctgttcggtgaaggcgtggtggtcaaacactcggaactgcgacctgaaggtgacccgggcctgccaaacttgccgcgctacaacgaactacaggtcttacagcacatgatcggcacgggaacgggcgatccgcgcgatcagcccgacatccgctttggtcgcatttccaacccgaccgttcatgtcgcgcttggtcagttccggcgcgtcatgaacgcgctgatcgtgcgctacggcaagccagcgcaggttgtgattgaaacgacccgcgacatggccaagtcggcgcgcgagttgaatgagatcgagagcgaaatccgcaagaacacaaagcgcaacgatgagtggcgggcggagctggaggcagaggggatcgtcgcgcccggcgctcgtatcggcgaccggtttctcaggatgcgcctgtggcaagaacttggtgcatcaaatgccgaccggatttgcccgtactcgggcagaccgatttcattgcaccagctgcactcggacgcgatcgagattgatcacatccttccgtttgaagacacgttcgatgatggtccctctaacaagaccgtctgttttcgtgccgctaaccggatcaagggtaagcgcgcgccgggcgacgcctggtctggcgaagaactcgccgccatcattgcgcgggtaaagggtgctccgggcatgaagcgtaagctctggcggttcttgccaggcgcactcgaggaatggcaggagcaaaagggctttgagaaccggcaactccatgccaccggctatctcgcccgcgtcgtgcgcgcttacgccgaagctctgtttcccaaggatggcacttcgaaactctggatgccaccgggtcgaatgaccgccatgatgcgtcgtcgctggggcctgcaccttcccgatcacaacgccaagacgcgcgatgatcaccgccaccacgcgcttgatgccgttacggttggaatgattgacccacgaatgatccagaggttgcagacatatgcaaggcggattggctccgaggaacttgaccgcgttcttccggacccgcccgaaccgttcgcgggcttttccgagcaagttcgcgaccgggtcgcaaagcttcatgtcagccaccggcccgatcatgctattggcggccggctccatgaagataccgcctacggcctaatccgagacgttccagaaaacctggcagcattgaccatcggcaacgtcgtagtgcggaagcctgtagccgatctgacggccaaagagatcggccaagttcgggacgaggcaatccgacaggaactgcttgccgagacgcttaaccggacatcggacaaaaaggtcctggccgaaaccctgaaagcctggagcaaacgtagtgggcacaggcgtcttcgcatcatcaagccagcggcgactgcaagaccggtacatgacaaggatggtcagccctataaatggatggtgcccggagagatcgcgtggcttgatattctggaagatggcgaaggccagtggtttcaccacgccgtcgacatttgggcggcgcagcaggcgactccggcggattgggaagcagagcaccccgggtcgcgttttgtcatgcggctgttcaaaggagacacggtccaattgttcgatctgggccaagacggcaatattgtccctggaagcaacacgataaagcggattgttcgcctctcaccgagcaactcggtactttatcttgtcggggtcaatgatgcaggtgactatcagaagcgccacgcggacaacgacgatccgttccgttgggattttgccaatatcggaaagctcaagtatcgccgcgccagacgggtgcggatcgacgaattggggcgggtacggactgtgccgcacggcacggcctgatctgcgggccaacccatcgggccttgtatttcaaggaggccaaaatggttggacagatattggaactgacgcgcacggggctggccgtgcacaaacgccgcgggttcctcgcggtagacgaaagaggtacagaggccggtcgcatcggccttgaggatatcgaggccgtgcttgccgcgagtcccggcctgacttggtcgaatgccgtgctcgccgaattggctgcgcggaatgttccggtcatggtactcggcccaacattcacgccagttgccgttgtcttgc

SEQ ID NO: 3221 - DNA, 23150 bp, synthetic construct
  misc_feature 1..23150: note = Synthetic
  source 1..23150: mol_type = other DNA
gcgaatttccggtcgcatggcatttgtgatcattgttgttttatcatcgataaaaccgcgttcgatctgataggcctcgtcggtcatgaacaagatgacatcgattttgccaatgacattgatccgcgtaacgatcttcttgaccggatgcgttggcatttcacgataaccatatcgcatttcgtcgatttgactgcccaccacaccaaaatccctgtcttcgaatacaaggccaagttgatctgtgaaataatcaggaatcccgatcccggccgcggcagcaacactgcacacccgtccttcgccgttcgacaatgccccgatacggcgccccttataaaggatcccgtatacgcgtgttgtgacggtttcgaacccgatctgctcttcttcgagtacgggcggttcattcgccaacggcaaggcaagcctgtcgatggccgccgcatccccaagatgatcaatgcatatatcacgggcaatctgcaacaatctcgcccgctcgggaccatattctgccatatgtcctgcattataggattgcgtcgtctgacacccgccaagcagcaaaaacgccatcgcggcaaaaccaaccgcaaaaactgtgggaattttgttttgtatcatgttccgcaaccgtcctctgtcattcacagacagaatgacgcaacaatcactggttgtctaaccttcgtattaacacgacaacacggaacaccgtttccaaacatccccgaagatttcacctaaaccggcatcgcatcgcgataccgttgcaacaaccggctttcaatccggttgcggccatcaacattggaaatccagacaatctgatacggggccagcggcaaaatgccgttgtaatcctcgatcacctgctgggacagcaaatcggtccagccaaccgtcatgatcagattgatcttggaaagatcaagatcctgcggcttatcggtcaggttaaagacacagaaaatgctttgatcgttcaaatggccctgccgccagacgcccagcaaattcggcccaagattaagggtatattgcgtcgcattgggatgaaatgctggctggcccatacggatcgacatcaacgcgcgcaattgatcaaaggccgatttggcaatgccgtcttcagacaggcgcgcttcggcatccggcaattgccagattttgcggttcaaacgccttgggataccggtttcctcatatcccttttgatcattttctgttgccagaatggattgcacataaatcgccggaaccccttccagcgacatggcaatcgcctggctcatgacaaaccgttccagaccgtatgtcgtgtcgccgtcaaagttttccgccaacatgctaaacagcgtgacgttaagctcatatgccttctgcccgccgcccttaagcgcgcgatagctgacctgcccgcccatcttgcgcgcatgttcggtcatggcatcaatttcgctatcggggatcaggttttcggccgggcgcaacccgatgccatcatggctggcggtgaaattgaaaaatgtgcaccccgccggggcgggcggcatcgacatgatgcatttgcgcacgcaatcactacgcccgcttaacaacgcatgaataatcaccggcggcaggctgaaattataaatcagatgcgcttcgtcctgatcgccaaaatacgacaggttttcaagcaacggcagattggtttcagtaataaacaaaacatccggatgcaccgccgttgtcgccagacgcagcgccttgatgattttatgggtctgttccagattgatcgaactggtcccggcttctttccagataaagccaatcgcatcaagccgcaccacccgaatgccgtgtttcaggtaatccagaacgattttcaggatttcaaaaaacacatccgggttgccgtaatccagatcgacctgatcatagctaaacgtacaccagacatgcttttccccattcgatgtcgtaaccttgcttaacaacggatggctgcgcgggcgcaccacgtcggaaaggtcatcatcggggctggcagttttgatgtaatccacaccgggcgcatcaccggccagaaactgctggaaccagacatgcgacgccgaaatatggttcgccaccagatcggccatcacggttgcatcgcgtgataaggctttgacgtcatcccaattgccaagttccgggcgcaacacactgaaatcactgaccgaaaaaccatcatcggatgtaaacggatgaaatggcaggatatggatccctgtcagccagtccttaagccaggtgcggtaaaaatcgccaaggctttcaagcccgtgatgcccgtcgcgtgaaatgctgtcgccataggtaatcagaaacgcatcacgctgatcccattttcgaagatattcctcgcagggctccgccccctcgccctcaagcggcaggttcagcgcctcaaaaacccggcgcaccaattctgcgtgatcatgttccggatagacatccgcaagcagattgcgcatggcacttgcgaacgcaatacgccccgaggttccgataacacgatccatactggctcctataggcaggcaattttgaaatactgtcgcaatcaaataatgaaattgcccatgatgcaagcaacgatttcaacgtgctaataaagcaggcagatgcattccagccctgccccgaacgtcaaacgcccggcacaagtttcacaacaaggccgggcgcaggatacacatcaaaaacagaccaccatcgccttacggcgcaatcgtcacctcgaccagcgcatgagtccgcttggtgtcgatatgcgctatcgcctgacgcagaatgcccggcaaatccgccgcccgttcggcctttgccgtccacgctcggctggcctcggcaaccttggtgaaatcggggctgggtttaagcccggtcagcggcatctggttggtttttgccgcatagccatcgggatacatccccgtcacagactggcgcaccgcgccccattcattattgttcagcaccaatatcaggatcggcagctccagcgcctcggcaatctgatggcacgcggttggattggcaaacatgtatgatccatcccccatcgtcgcgatcaccagcttgtctttgtcggccaattgatagcccatcgacgccgggaaagaccagcccaacccgccggaatgcggttcctgataccagcttccatgctttgatagtgaaagcggttctaacgggcagccaagctcggaaaacaccgtcgcatcgcgcccggcaatcgcctcggaaagacagcgcgatacaaacgccttggtcatcgggtcaactgccccggcatcagcggcggccaaagcctttgcccggttaactccgttgagtttcgccaccgcatcgtgccgcgtcgcacaaacatcgcgatgatcggcgtgatgacggtccaatacatcggcaagtgcgataatcacatcgccagtttccccggtcagcgaaacatcagcggcaaaattgcgccccggcacccgcgaataaagcgggttctgcccgatctggatcaccttgcaatcatcgcgcaatttgtgaatttccggcgaccagggcgccatgcaatcaatcaccaaaaccgcgtcggcatcttttaaccaaggtgccgggtccatgcccgccatcatcggatgatcggtgccaagcgcaagctggatcgcccaatattgcaccaccggaatgccccattgatccaccaaggacgacagccgatcaaacgcctcggccgtgcccgcgccgcgctgggcaatgatcaccgggtttttcgcattggcaagaatactggcggcttccgcaagcgatgcgggcggcggcgccacgcgaacgggctgcatccgaagcggcgcgtcaatccccgcaccggggcaaggctcgcacaaaacttcccgcggcaacgacacataaaccggccccttggggacggatgatgcaatcgcataggcccgatcgacaacatctggcacctgttcggggaatttaagttcatattcccatttcgaggcctcgcgcaccatcgcggcctgatcgcgcatttcctggccccagccaatcggcacggtgcgcgcccccagccgcccctgttccatcaccggcgttctgcccgacatcaggatcaccggcacatgttcggtcgcggcattgatcgcgccaatcgcgcaattggccagcccgacattggtatgggccattgcggcttgagttttcccggtcgcaaggtaatagccatgcgccatgcccatcgcggcattttcatgcggcatgatcaaggcatcgggaaggtcaatatccttggcattggcttcggccagcccttcgatgatcggcggaaaatcagtcccggaattggcaaagatataatcgaccccaatcgctttcatccgggccaaaacggccccgcctgcggtcagggtgatttgtgccttgctctttgccatgtgataccctatcatatttctatatttgaaatttaatttataatatagtttattccgggaaacgcgcccgcgtcaagacaccgcgcgggcaaaatcaccgcgccacataacaacacgcccacagccaaggaccccacccgccatgacaagccagcttaacggatcggtgcttaaggcctttcgcattctggaactctttgccgaaggccggtctgaactgacggcgggggaaacggcgacggcattggacatcaacatgatcaccgcccatcgttttttgcatacgctcgaacatgccggggcgttgcgtatggtggcgcgcggggtgtttcgactgggctatgtctttgctgatttgggcgaccgggtgcgccatgacggcagcctgccaaccgtgatccaaccggttttggatgatctggcgcggcaaaccggcgaagcctgcatggccacagagtttgatcgcgacatggcggtttgcattgccaaggccctgcccgaccgtgcgctttatgtagatatccgcatcggatcgcgccttgatgcgttttgcaccgcccacggcaaactctggctggccttcatgagcgcggccgatcaggaccattatttcgccaatgccgatctgaccggtatgacagaccgcaccatcaccgatcttgcgatgttaaaagacgaattggccaccatccgccaacagggcttctcgaccaataacggcgaacgcgaaagcgaaattttcgcccttgctgtgccggtcctgacccaacatggcaatatgatttcggccctatcggtgtttggtgcaacgcccagcctgatcaccgaaaaacgtgatgcggtgctgaccgcccttcgccaagccgccaatgccgggcaacaggcactttacggcaaggcctgaaattctctgaccatcccaaccgtcacaatcgttcaagaccgacccgcgcaaaatatggcacgctgcctgtcatgctttgccggacaatcgggaacatcacaacgatgataacggaaaatctgctactcctctggctggctgccctgcccctgatgggaagccccggccccgccaccataagccttgcggcaaccggctccgcctttggcataaggccaagccttggttacctgtgcggcatcatcgcgggcaccacaggtgttctgatcctgaccgcaaccggggtcgccaccgcccttttggcccatcccgttgctggcaatatcctgaccctgatcgcggcggcctatatcctttatcttgcctggaaaatcgccaccgcaccggtcagccccggcatatcatcccggctaacccccgaaagtacgaaaagtgcaaaaagccccgaaagcaccgcccccgatttccggggtggcctgatgctggccatcgccaacccaaaggcctttgccgcgattggcgcggtctatgccagccaccacatcatcctgcactctgcatggctgaacaacgcgctaaaactcgcggctcttgcgctggtcattgctatggttaacacaatctggctgatctttggcgcaagcttttcacgcctgctgtcaagcccgcgcgccgggcgggtaatcaatattatctttgccgtgatgctgattgtatcagttggctttgccgtgctttagccgcaggacctagccgcctgaacctctggcaatcaggccacgccgatttcgcgcatatcaccaaccggggaaacaacccgcatggcaccgggcgattttcccatggtgcgtttgaacgcccggctgaatgccgcctgcgacccatagcccagccgctcggcgacaatttcaatgctcatgcggtcgcgcccgatccattggctggcaaggcgcatgcgaagttcggtgacatagcgaagcggcgtcaccccggttgcggccaaaaaccgttcggcaaagaccgaccgcgaactgcccatttccgatgccatcgccgccaccgtccaattgcgccccggatcacgatgcagggcggcaatcacccgccccatgcgcggatcacgcaatgcctcgacccagcccgccgcatcgccacagccacattcaacccagtcacgcacaagggatgccgacaccacatcggcaagccgggtcagaataccggcatatccggcccgctcggctttgacctcacgtgccatggcttccagaatgggcaggatttccgggttgcggtcaatcagatcccccacctgcatcacctcgggcatcatcgccaccagcggatgcatactgcccaggtcaaattccatgcagccgctgaaaatcagggtgtcattgctgcggcatatctcggtcttgcagacatgaatatcatcaacccgcttgcagatcattctggcatcaaaatccgtcacatcccggcatggaatacccggatcagacaacagggaatgcagcccgccgcgcggcaaaagcacagcatcgccaccgcaaagcgtatgaaccgccccgccgtccgtgcgcaaataaaccgtgccacgcgcgataaaatgaaattgtgcccgccccggatcaaccccaaaccgcacgccaaacggcggcgatatctggatccggttgtaatgcaccccgtcaatccgcatccccaaaagaagctcgctgatcaggtcacttgaaagcatctgcatgtcatttttcccgaagtgttagaccccttctaaccagtttcggacgaatgatcaataatctcagagaaactgacatagcacgtccgggtcagaccctgtatcttcgctgcaacgcacaaacaccttttacgaaggacttccgatgacagatacagcaaataggtccccggccgcagccgcgcaagacgcgccggcctggtgggccgtcatttccatgacgctgggtgttttcgggctggtcacagccgaattcctccccgtcagcctgcttaccccgatggccgccgatttacacgtgaccgagggtctggccggtcaggccatgtcaaccaccgccgttctcgccctgatcaccagcctcctgaccgcgaccgtcacccgaaaactcgatcgtcgttatgttctgctcagcttttcggttttgctgattatctcgaacatcatcgtctcgatggcaccaaactttgaattgctgctggcgggccgcatcctgctgggcatcgggctgggcggtttctggaccatggcggctgccaccgtcatgcggctggtcccgcaaaatcgcattccgcgcgcgctgtcgatcctgtttagcggcgtttccgccgccaccatctttgccgccccgctcggaagctaccttggtgatgtcattggctggcgcagtgtgtttctgctagcgtcgcttttgggcgttctggccttggtcacacagtttttgaccctgcccaaaatggcaccacgcggccgggccagcctgcgcactttggttgaaatcatgggccgcccgcgcatgaaatttggcctgtttgcgctggtgctgatcattaccggccatttcgccctgttcacctatgtccggccgtttcttgaaaacgtcaccggcgttgcaacagccggtgttgcgggcattcttctcggctttggtgttgccaactttatcggcacctatatcggcggcgcgcttgtcgcacgctcgcttcgcatgacccttatcatgatgccgatgatcatgggccttgccgggatcggcatggtcagcattcagggcgcaattgccccgaccgccgtgcttgtcgccatctggggcatggcattcggcggtgttccggtcgcctggtccacctggatcacccgcaccgtccctgacgaagccgaaagcggcggcggccttctggtcgcaggcttccagctcgccattgcgacgggttcgggcgtcggtggacttgtctttgatgccagcggcgtacttggcgtcttcaccatcgccggtctgcttctggtcggcgcttcaatcatcgtcactctgggcctgcgaactgcccctgttccggcggaacagggataagcatcgccccttcccccaacgatgcacctcaacggcccagcccaccccggcagtcaccagattgccggggtgcttctttatccgcccaaccacaccccgccaccataaaccatgcatcaagcatcaagcatcctgccccaaccacacccccacgccatcattcccgcgaaggcgggaatccatgtgtcacaatgggttatgaatgatccgcaccgggcgataccttccggggcacggcttcgcaccgccgacatgatggttattggtacaattttccgaccatcgaaaaagcaaaaaaaagacgccctctttttcagaggaagtccttatttggaaaggcatccaaggatcgcatttcgttccgtttggaacgcgctctcactcaataaatttttcaatcaccgcatcggcaccgatcaacggaatgatgcggacgagaacttgttccatcacgcccgacatggccttggcaatgaaagcagccttccgatctttccacgacagagtttgaataaggctggccgccaccacagaaggcttatcaagattatcaaccggaacctccgttacgcccccgcgaatgcttgtgctgatcggacagaaaatcatcaggccggtttgcatattgtacgggcgcgacgatagcaccagcgccggtcgatatttgccaatctctttgcctttggtcggctcaaaatccagccagataatgtcattgcgctccggcacatacggccccgccatcacgcgcccgtttccaccgcagaaggctgcgcaagctcatcttcatgcgcaccatgggcatcaagcccaaccaaaaggtctgcttctgaaaaaggaagattgacctttcgggtcgttgtgcgggccgcctcgataatgatttttcccgccttgacgtcaatgctgatcggactggcaacatccagccgcgcctgcgccaaaatcttgctggaaagccgcacagcggcactgttgccccaacgcttgatttcactttgcataacattctcccggatatggcgtagctacatatgtagctactgtaaatccacccggtaaaagtgtcaacttttgtatctacacaacagacgaacttacacagcatcttttggggaaaataaatctgtccccttttttttgtcctgtccccttttgtttaaacgcgggaatccatgtgtcacaatagagggttagggattccggatcatggcttcgcaccgcccggtatgacgactattggaaaaggggactgcattttcccccttaaaaacaaaggcaggacaggccggagcctgccctgcaattttgtgctctaaagcttgttaacagccagaccacaactcgtcttctgctaaaagacaaattatcttcgaacaaaaccatcgctacgtcaacgcgatacatccccctctcttggataggaaacctaagccgaaagaagagcagacgccccccttcccctgccctaacatcaattactttgcacataaaaaaatgcgcatatttccaggggcattcacatgacgaaacgtcgcttttcttttgatcttggcaccaattcaattggctggagcatcctgtcacttgattcatcgggcaaaccaattgatctgattgattgcggcgcacgaatttttcccgatgggcgcaacccaaaggataaacaatcccttgccgttgcccggcgcgaagcccgatccgcccgccgtcgtcgcgaccgttatctgaaacgccgcgatgaattgatgggccgcctcgtgacctttggcctgatgccctcggatcgcgacggacaaaagcaacttgaacaccttgatccctatgccctgcgtgcaaccggtctggatgatgcgttgcatccgcatcatcttggccgggcattattccaccttaaccagcggcgcggatttaaatccaatcgtaaaaccgaccggggcaatgacgattccggcatcaccaaaatcggcatgaaaaatctgcaagatgccttaaaggccgaaggatgccgtacccttggtgaattgcaacaccgccaccatcaggcaaaccaaacccccgctgccgataccgccccccaatcggtccgcgccaaagtgcgcggcgaaggggccaaggcctattacgatttttatccctcgcgcgatgcgatcgccgatgaattcgatcaactgtgggatgcccaagccgcgtttcacccggatattttaaccgccgatgcacgtgaaaaaatccacgatacgattttctttcaacgcaaactcaaaacacccgatgtcggtaaatgcacgttcaacaatgccgaacgccgcctgccaaccgcaatgcccatcgtgcagcattttcgtattttacaatttgttggtgatttgcgcctgattgatgccggtcttgttcggcacccgctggatcgtgaccaacgcacattgctctatcgcgcccttttggcaaaaccgaaactgacctttaaggcaatccgcaagaccatcggcatcggatcggaatttaccttttcccatgaaaccgaaaaacaaaccgatgtcaaaggcgacttgaccgctgccatccttggcacccccaaatatttcggtcccaaatggcgcgatatgtccatggccgatcaaaccgaaattgtcgataaactgatccacgaagaaaacgaagaaatcctgatcgaaaccctgcacaatcgtttcggatttgatcgcaccaaatgcgaagccatcgccgatgccaaaatccccgatggctattcacgactgggtaaaacagcccttgaaacccttgtcgaaattatgcgcgatgatcatcttccctatgatctggcctgcaaaaaggccggatatgaccacgccttgctgcccgatggcgaaattctggatgaactgccctattacggtatcgcccttgaacgccacgttgcctttggcgatggtgaaagtgacaatcccgaaaaacgctacggcaaaatcgccaacccaacggtccatatcgcgcttaatcaattgcgccatgtgatcaatgccctgattgcccgatacgggcatcccgatcaggtcgtattggaaatcgcccgcgacctgaaacaaagcaaggccaaacgcgacgaaatcaacaaacagcaaaagaaaaatcaggataaaaacgatcaacgccgcaccaaattgcaggaactcggcattgccataaacggcgaaaacatgctgcgcctgcgcctttgggacgaacttgacgaacataatattgccgcgcgctcctgcccgttttccggcgaaaacatttcaatatcacggctgttttcccccgaaatcgaaattgaacatatcctgcctttttcacgctcgcttgataacagcccggccaataaaaccttatgtcttcgcggggctaaccgggcaaaaggcaacagaaccccatgggaagccttcgggcgcgatggcgaaaccggttatgactgggccgaaatcgccacccgcggggcacgtctgccccataacaaatcatggcgttttgcccccgatgcgatggaacgccttgaacgtgatggcgattttctggatcggcaattaaccgacacccaatatctaagccgtatcgcgcgggaatatgtatcgaaaatctgtgatccgaacgcggtttgggtgacaccgggccgtctgaccgcatggctgcgccgtcattggggccttgaaagcattctgtcgaccggcaatgccaccaaaaaccgcgacgatcaccgtcaccacgccattgatgccatcgtcatcggcgttaccgaccggggcattttaaaccgcatttcccgcgctgccgccatcgccgaggccgaagacctcgaccgtatcatcgctgatatgcccgaaccttttgccgattttcgcgaaaaagtgcgccacaaagtcgatgaaatcatcgtatcgcacaaacctgatgccggttttgttcccggtcatcgacacggggccgcaacccccggtgcccttcataatgataccgcctatggcattgtggaaaccaatgccaagggcatttcaactgttgtcacccgcaaggatgtcatgtcctttggctcaaaaaaggatattgaaaccatccgcgatctgaccatccgccaaagtcttgtggatgccgttgccgataccggtgcaggggcgccattcaaggatgccctgcgcaactggtcggtccaaaccggcacaaagcgcgtgcgcgttgaaaccaaactatcggtcatcccgatccatgaccgcgcgggcaaggtctataaaggatacaaaggcgacggcaatctgtgtgctgaaatctatcagcgcccggatggcaaatggggcgacgaaataatatcgcgctttgatgccgtgcaacccggattcaccccgcaatggcaacgcaattttccaaccgctcgccgggtcatgcgcctgttccgcgacgatatgttgatggttgacatcgacggcacaatgaccgtttgcaaagtggtccaattatcgtctggcatgatcacccttacccgccaccatgaagccaataccgacagccgcaaccgcgacaaggacgatccgtttaaatatacttattgttccggtgacgcccttcgcaaacgccgcgcccgaaaactgtttgtcgatcccttgggcaagctgcgcggcgatacgccagaggacggataatggaccgtattattgaaatcgccagtgatgaccgccatctggcggtcgcacgcggatcaatggaaatccgatccggcaatgatgtcatcggtcgagtaccgcttgatgatattggcgcactgatctgttccgcccatggcctgacctattccaacaatctgatcgccaaactggccgaacgatccgtaccggtcgtattatgcggccccaaccacatgccgattggctatctgatggcggcaaatgcccatcaccagcaatccaaacgcatcatggcacaggccgacgcatcaaaatcaatgaaaaaccggctgtggaaacaattggttcaagccaaaatcgaagcccaggccgctgtactgcaaacccttggcaaaccgcatgtgccggtcgggtccttaatccgccaggttaaatccggcgaccccgacaatatcgaagcccaggccgcccaacggtattggcaattgatgtttggcaatgactttcgccgggaccggttcggcagtggccccaatgccatgttaaattatggctatgccgtcctgcgggccgccaccgcacgggcaacgctggcggcggggttacatccctctcttggcctgcatcatcgcagcacagtcaatccaatgaatttggttgatgatctgatcgaaccctttcgtccgattgtcgatctgattgtctttcgccactgtgcacatcacacggacgacgctgattttgacctcgacagcgatacaaaacggcttatggcgaccataaccgcccatgatctgccaaccgatgccggggcatccccggtcatgcaatgcctacatcgcctcgccgggtcactggcgcaatgctatctgggcgacatcgaaaaacttacgctgcctcttgcccccctgccgcttgaattgggctgatcatgctatcgggatatcggatgatgtggatcatggtgttgtttgacttgccggtgatgaccaaaaaggaacgcaaggccgcaaccggctttcgcacccatttgcttgatcttggttttgaaatggcacaattttcagtctatctgcggttttgtgcaggcaaggaacaatccgaaagcataacccgcaaggtccgaaccaaactgcccagtggcggcaaagtcgatattttgtattttaccgacaaacaatatgaaaacatcgtttcttacaccggaagaacaaaacaggattcacgaaaaaatcccggccagttcgaactgttctgacacctgaaaataccggtttttgccctgtcaaacacgcaaaaaagcccctgaaatcaggggcttttccaaaggctattttagcagaagaagaattgtggtccaaccgcaacttttggtttttctgtgattggtgatgtgacattttagcagaagaagaattgtggtccaaccgcaacagtctcggccttaaggcccatcgggctgccattttagcagaagaagaattgtggtccaaccgcaactgggtcaactccgtattcctgcgcaaggtcattttagcagaagaagaattgtggtccaaccgcaacaagtgtcgaaagctcctgccctttctgcgcattttagcagaagaagaattgtggtccaaccgcaacgcaggcgaagatggcgttggcgaatacaacattttagcagaagaagaattgtggtccaaccgcaacgcatacaatgtgatgtacgaccatcttaccattttagcagaagaagaattgtggtccaaccgcaactgggtcaactccgtattcctgcgcaaggtcattttagcagaagaagaattgtggtccaaccgcaacaagtgtcgaaagctcctgccctttctgcgcattttagcagaagaagaattgtggtccaaccgcaacgcaggcgaagatggcgttggcgaatacaacattttagcagaagaagaattgtggtccaaccgcaacttattctggttatgatgtgctgaacatcaattttagcagaagaagaattgtggtccaaccgcaactaagtcctcgccatatagcgcgatgtattcattttagcagaagaagaattgtggtccaaccgcaaccaaacacaatcaaccccggcagaagttcctattttagcagaagaagaattgtggtccaaccgcaacaacacagcaacgcttatgtttcatcgggctattttagcagaagaagaattgtggtccaaccgcaactacaagaaggcggagctttctcggatcgaaattttagcagaagaagaattgtggtccaaccgcaaccggcaggccgccaatgatgatagccgccccattttagcagaagaagaattgtggtccaaccgcaactcgcgcaaaagccgaacgaccttctaagccattttagcagaagaagaattgtggtccaaccgcaacaaatatgccggtggtgctgttattactcatattttagcagaagaagaattgtggtccaaccgcaaccatctattgtgtctagtatccaatcagtgcattttagcagaagaagaattgtggtccaaccgcaacacgatcaaccgtttgatcggctggaaggccattttagcagaagaagaattgtggtccaaccgcaactattggatgcaatacaaaaaaggggattgaattttagcagaagaagaattgtggtccaaccgcaactgacatgagacgcggccagtctggcagcggattttagcagaagaagaattgtggtccaaccgcaatgcccccaccccgaaaacaaaaaaaaaccggcccaattgcttgagccggggagtggtcgctctggagggagacagggcttttgccccttgataaaatcttggtgtctcttgccgatcagatcgccttaaccgtcaccttgcgttccgcctgcactttaagccggttacgcagcgcacggccaaacggggcggcctcgatttcaaactgatcgccatcctgcgttgtaatgccatcggcaaagctcagcgttgccgtgccaaagaaatgcgcatgcacatcgcccgggcggcaaaacaaatcatatttgaaatgatggtattcaaggttcgccaagctgtgagacatattgtcctcgccactaacaaacggtttttcccaaatcaccttgccatcgcgataaacccgcgacatgccttcgacatggctgggcagatcgcccaaaagcaattccggccccatcgaacaggcgcgcaattttgaatgcgccagataaaggtaattctggcgttcggtcacatgatcggaaaattcattgccaatcgcaaagccgatccgcgccggattgccatagggatcaatcacgtaaatcgcggcaatttcgggttcttcgctgccatcaagcgcaaaggacgggctgggcatatccgcgccgggatgggccacaatcgatccatcgcccttgtaaaaccattccggctgcacgccgtgttcgccgggttttggcttgccgccttcaacgcccatgcgaaacattttcattgaatccgtttcgtcggcggccttgttatcggccttatgcatattggcgcgcgccgatgccgatcccaaatgggtcaaaccggtgccggtaaccaggaaatgcgccggatcggcatgggtaacgggcggcaataaacgcccgctttcgacaacctcgttataatcaatccgcgtatcgcccttgtgggtcttggcggtatccatcatggtgcccgccaatgaaatcgcaatatttgccaattcgcgcgtggttgaaaccccgacaagcgggatcagggtatcggcatcctcgacaatcgcaacatgctgtgccccggcagtatctgtgtattgaaccagtctcatgtaatccgtcctgatattcttggcataagaaaaacagccccttccgatccgtcgatcagacccagccgccatcaacaataaagttctgtgccgtcaccatgcggctttcatccgagcttaggaaaagcgccatccgggcaatatcatcgggcattaccctgtctttaaggcactgacgctcgtctatttcgcgctcggcggcgtcatccacccaaaggtcaagctggcgctgcgtcatgacccagccgggcaccagcgtattaacccgaatgccatccttgccaaggtcacgcgccatgccgcgcgtcaatccatgggtggcggcctttgccgtggtatagccgggcatcccgccctgccccatcatccagctgaccgagccgaaattgataatcgcgccgccgccggccttttgcatcatcggggcgactgcctgaatggcaaaaaacgacgggcggatattaatcgcctggcgttcatcccaatattccggcgtcacatcctgccatttatggcgggtatcattggcggcattgttcaataatgccgtgatcgggccatgcgccttggccgcatcggcaatcgccttatgcagggccgcaatatcggtaatatcgcatgtgataaacagcggcgtatgtttggcatccttgccaagcttttcaacaagcgcgataccggcatcctcggcgatatcgacaaaggcgaccttcgccccctgtgcgacaaaggcactgacaagcgcctcgccaatgcccgatgctccaccggtgataaataccgacgcatcggcaaggcttgtataagtcgtcggtttgcggtccggcatggtcaattctctcccgtcatctggtcttgatctggtcgctattcgtctgttcgttattcgtctgcatctgctctgtctcgcgatccgccggtaaacggcgcaatcacgatgtcggcggatcggtccatcggcaaacaccccgccggtggaccaataagatcatgattaaagctggtaaaaggtacggccgattgtggccggtgcattgcaacaaggcaaaaaaatttcatcatccgggatggcctggcaaacaaatgcccgatttgccgctacccccggtcgggatgatcctttgtcctgcacatgatgcttcctcctgacagctttattcttcattgtttattcttcatacaataacattaattagcaggatgtatcgccctgtcaagcgacaaaccccaaagtcattgcttccgctttggcgataactgggctatataaaatcaccttggacgcggggcaaccgggctacaatcagggcctgcacaaacccaccgaaataaatatatgcgttgcaacacaaggcattggtggtcgcacagaagttgccctaaaaattaattcatattatatgaataatatcagagcgcggtcacccttgacctgtcgccttcccacagaccgcgccggaggaagtccaatgtcgtcgtccatgtcgagaacctatgccaaacgcagcctgcacagcatcgttgcgcacgatctgggcgcacggattgtctcgggcaaactggccccgggcgaggttctgccgaccgaggctgccttaagtgaatcgcttgacgtgtcacgcaccgccctgcgcgaggcgatcaaaatcctgtcggccaagggattgattgaaagtcggcccaaaaccggcacgcgggttaaaccgcgcacaagctggaacctgctggaccctgatgttctgtcctggcatttccccgatcccgacccggcgtttttatacgggttgtttgaaacccgcatgattatcgagcccaataccgccgccatggccgccgaacgcgccaccgaagaacagcttgccacgatcgaggccgcctatgtcggcatggaaaatgccgaactcggcaccgatgcggtctatatgaccgatctggctttccatcaggccattttggatgcctcgggcaatgatttcatgaaatccttcggcatgttgatcgaaaccgccctgatcggctctttccgcctgtcttcgggcgggccaaaggcgcatgtcaaatccctgcccgatcatctggcggtttacaacgccatcggccagcgcgaacccggcgacgcccgcgaagccatgcgccgcctgcttcgccgcaccatgcgacagctccgtcagcaactcggcatgaaaagcgaacatgactgggatgtgatcgggctttgatccggtttgagatgatctgactggggatgatctgactggggatgatcaagctttgatccgggttaagatgatccggcgatagatgaacgggccacagatcaggctgtaacgttttcgatacacctgatggcaccaaaaccgatccgaacgtttgaccactccaaaaaccgatccggggcagccaatttggccgccccgttttgctatcctcataccatttaaaacagccccgaaatccggcaccgcccagcacccccgcccggcgcagtaaacaaaccccccattactcaccaaaaatgaataattcttaccattgcgtattttaagttaataaccacacccccgattacccctcaaaaacacccccgcaagatcgactttccgacctgtttccgggacagaaaatcagcttcctgacagactaaatcaggcccggaaactcacccaaaaacacgcaaatttcacccccgaaacaccccgccaaacaggctcaatccggcctcaaaacccgcaggcccaagtgaccaaaccgcacactcgcagtcccgcacacaacaagaccaaagcaagaccaaatcaagaaaaggcgtaacgattcaagctgctgccccattcacaaaaaccgctaaaaacggctactttctgcgcgataatcccgtcatgttgccccggcgcgcatccccgaaaatgaccgggtgatcaggcgttgcagcacgataaaaccaaacaaaagtgcgccgatcatgatcttggtccaccagctattaagcgacccgtcaaacgcaatcagggtctggatcacccccatgataatcccgccaaagaacgtgccgacaacaaagcccatccccccggtcaaaagcgttccgccaatcaccacggcggcaatcgcgtcaagctccaccccgaccgctgccagtggataagccgatgcggtgtaaaacgcaaaaacaacaccggccaaagcactgaaaaaccccgataaagtgtaaacccgaatgattgtgccatgcaccggaataccgagtaattccgccgattgccggtcgccgccaatggcataaacattgcgcccgaaccgggtgtaatgcgcaatcacaaccccggcaatcacggtgatcaacatcaaaagagccgccgcactgatccagccacgaccgggcagtggaattttaaacccgccgaaatccgacacgaatggatgatcaatcggcacggaatcaagattaatcaggaagcacatcccgcgcaggaaaaacatcccggccagcgtgatgataaacggctgaatatcgaatttggcgatgatcagccccataaacgcgccaaatgccgtgcccaccgccatcgaaatcaccacagcaatcaacggatgcaggccaaatccggtcacaagttcggccatcagaacaccaacaaaggcaatcatcgagccgactgaaagatcaatcccgcccgacagaatgacaaaggtcatgccaacggcagtaatgatcaaaaacgcattatcggtcagaagtgcgcccagaacataagtatctgaaaacgcccggtgttcgacaatgccgtaaccatacagcagcaccaaaaccgccagcgtcgccaaaagcgggtaatagcgttcattaattttcattggattttccccgcatcaacttaccccacgccgtgccaatcaactcacgtgatttcggtgcctgcaccagcaaaaccaccatcaccaccccggccttgacgatcaacgtgtattgcgacggcaaccccgacagcaaaatccccgtgctaagtgcttgaatgatcaaaaccccgatcacagtcatgccaaggaagaaccgcccgcccatcagtgatgccccgccgatgacaaccgccaaaatcgcatccagttcaagccacagcccggcattattggcatccgcgccgcgaatatcagccgcaataatgatcccggcaaaggccgaacacagccccgaaatcgcataggccaaaagcttgatcccgcgggcatcaatgcccgccaaccggctggcgcgggcattgccgccaaccgattcaacaaacaaaccaagggccgttttgcgcatcacggcatagagaatgccaataaccgccgccgcaatgatcacccgccagggaatgccaaggatatagccactgccgatgccttcgaaaaacgcaccgtggaaggtcacgatttggccaccggtgatcatctgtgcgatgccccgcccggccaccatcaaaatcagggtagcaatgatcggctggatatcaagataggccaccaaaagcccgttccacagcccgcacaaaaccccggccccaagggcggccagaatgataatcgccggatgcagatcggtatcgcggatcagaaccgccatggtggccccggaaatcgcaatcaccgacccgaccgaaagatcaatcccgcgtgtgccgataacaaccgccatccccaccgcaacaagggcggttgacgccccgcgatgcaccacatcaaccagcgatccatacagatgcccgtcaacaatacgaatattgaaaaagtccggtgatatgattccgatgccgatgataatcagcacaagtgccgcgaccgggccaaaccattgccggctaatcaaagaagatgcagacatggacatggtgctgctttcgcgtaatttgtttttgttttgcaagctggtcattgggcaatcgccgcgatgattttatcctgggtgatatcagcacccgtaagttcggaaaccttttcacgatcccgcatcaccgccacacggtcggcaaaggcgacgatttcatcaagctcgcttgacgcgaccagcaatgccagcccctcgtcacacagctctttgatcagcttgatgatatcggcgtgcgcgccaacatcaatgccgcgtgtcggttcatccaaaatcaggaagatcggcttggacaccagccagcgcgccagaatgactttttgctgattgccaccacttaactgcccgaccggtttttcactatcgggtgtcgcaatccccagcgccttgatcatctcgtcggcggttttttgttgttcggcacgcgcaatcgggcgcaaccatccgcgccgcccctgaagggccagcatgatgttttcacgcacgctaagctcggcaacaatgccatcctgtttgcggtcttcgggacacaacccgaaaccggcccggattgcatgacgcggggatcgtaacatcaccggttccccgtcaaggaaaaccaagccgctatcagcctttgtcgcgccaaaaatcaattcggacaattccgtccgccccgatcccaaaagcccggccaaaccaacgatttcaccgcccgaaagatcaagtgataccggctcaagcacgcgctttttgccaaggttcttaatctggatctggcggcccttgccggtaaaaccgctttcatcaagatgacggtgcgaactgacctcggccaattcacggcccagcatatgattgatcaaatcgatctgtggcaaatcacgggtgacaaaggtgccgaccaagcggccattgcgcaaaaccgtgatgcggtcggtaattgcgtaaacctgatccagaaaatgagtgacaaaaataatgccaagccccttggcgcgcaattcacccatgatgcgaaacagggttttgatttcctcgccgtcaaggcttgcggttggttcatcaaggatcaaaacccgcgcatcaagcgccaccgcgcgtgcaatcgcaatcaattgctggatcgcgaccgaatacgatcccagcggccgattaacatcaatatcaaggccaagcgtatcaagcgcggccttggcatcactttcggtttttttccacgcgataaacccgaatttcaaggtttggcgttccaacatcaggttttcggcaaccgacagcgtcggcaccagattaacttcctgataaaccgtggaaa

SEQ ID NO: 3222 - DNA, 15140 bp, synthetic construct
  source 1..15140: mol_type = other DNA
  misc_feature 1..15140: note = Synthetic
gggcataaagtctctgtgcgcataaaaaaacggcctgtcacatcatgtgatcggccgtttttgtgctgttctgtcttgggggcagatcagcgactgaaatcaatcagcacaaggaagcaaaccggaacaagtgccagggcgacataaatccagaaggaagcgacaggcacgccgaaatgcgccagaacgtacccggcaagataaagaaccaggcctgcgaccgcgaccagcagaatgcccagaaggggcagtgatactttgctatctgttttcatgttccgtcatgctccccaaacggatttcttaactcatggtgctgaagctaccattctttacagctttgcgttttgatccgtgtcaataagctgtccatatcgaccattgatccgccagtggggtcgtttggggccgttgcggacggaatgtggaatcgaagctgtgtgcgggcgttgaaaacacgattctggcgggtatcggttgcgggccgtcggggaatcggttgatttgtgcctggaatatggggtgattgctgcgttttgtggcctttgatattgtcgcgccggtttgaaaagacgcagattccgtgcggttgagttgggtaaaaaccgacccaaaccacggattatcgtcaaatccgctcggataagcgtttttgtcgcggttttcggttgatgaaggcttgacgacattggtcataggcagtattaacccgcttccaagcgcgggcctgcatgttcaggccaagcgtccttttgcgaatttatagaccaggagatcaggtcatggcacgtcgctgcccggtatccggcaaaggcgttttggtcggcatgaatgtgagccacgcccacaatcgtaccaaacgtcgtttcctcccgaacctgcagccgacctcgctgcttagtgagtcgctcggtcgttcggtgcgtctgcgtctgaccaccaatgctgtccgcaccatcgaaaaacgtggtggtctggatgcatatctgctcagcactgcaaatgcaaagctgccggcagatttggtgaaaatcaaacgccaggtcgccaaagctgttgaagcaaaagctgcctaattcaggcttctgctttacagacagattttacgagggctcgcttctggcgggcctttcgtttttctgatcactggcctgtcagaaggccacggaacaagctgtaccatcaccggtggtgcagctttttttgtgccgcgcacaagcatggttcccgcgctgttcgggggagatggtccggcatgacgccgataaaacgcgactcggcggaacacgggctttgcgcttttgctaaattggtctatactttgctctatcagtggtttacgtcgccgcgtcgcccggtttggtgaaacgtcatgatatgttcatcaccagcgattcccgaacctgctaaataaggcaagcgactcggtaaacacggtggagcggatgatatgcatttatcgcccaatgcgtgtccggcacttgttcttaacgccgacttccggccgttgagctacttcccgctgtctctttggtcctggcaggatacgctcaaggcggtctttcttgaacgcgtcgatgttctttccgaatatgaccgcgaagtacgttccccatcctttaaaatgaagctgcccagcgtcatatcgctcaaggaatatgtcccgcttaaaagcagcccggctttcacccgtttcaacgtgttcctgcgtgatgaattttcgtgccagtattgcggtgatcgtctgccgacaaatgagctgacctttgatcacgtgatcccgcgggcgcggggcgggcgtacgaactgggaaaacatcgtcacggcctgttctgactgcaacctgttcaagggtagccgatcggtccgcgaggcgggcctgcgactgcgcaggacgccgggacagcccaccatgcacgaactccagtcaacaggacgccgcttcccgccaaactatcttcacgaaagttggcgggattttttgtactgggatacggaactggaatacgacttctgatcgcgggttttgcgatacgctcaacaaaaaagccgacggaaattccgccggctttttgtctggaccgtttggtcattaatgttcggtgaagaccgtgtcctaccagcggtatttaaccgttgccaggaccgtacgaccctgaccgtaatagcaggtggtatccgagccggcgcacgaagcaacccagcgttcgtcggtcaggttggttgcattaagcgcaaacaggtacccatcaagctcataatggatcccggcatcaaacagggtggttgccggtacctggaaagtgttgctcttgttgccgtactgctcaccaaggtagcgaacacccccgttaaagccgaagcctttaagggcaccggtctgcagggtgtagtcagcccaaagcgaagccgtgtgctctgcgacgccatcaggggtgttgccctggttgccgtcattgtccttggtaatttcggaatcgttgtagctgtaagctgccttggcaacgagacccgcaaccggttcaattgtgccttcaagttccaacccgcgtgagcgtacttcgccggtctgaactttgcgtgcgctgtcgttggggtcggttgtcacgacattctggcggcgcaggtcatagatagcggcactgagcatacccttgaaggattgcggttcgtacttggcgccgaattcgacctgctggccggtttcgggttcgaagttctggctgccttggcttgcgaccggattaaaggattccgagtagctgagataggggacaagtccaaactcggttttatagacaagtccggcctgaccagagaaagcatgatcgtttttgctgctttctgcaccgtttttggtgttgtcgtatttcttctcgtccgaccagtcctgacgaccgccaagggtcagggtccagttctcgtcaaaatcgatctggtcctgtgcataaagacccagctgacgcagtgtcacgtcatcgtcataccaggtggtcagagcgccgattgcgccgccataactcggattatagacattcaggtccgccgccgaaccataggcggcataacggtcatagatgtaatgctgatagtcaacaccagtcagaagcgtatggtctacgctgcccgtatcgaaacgggtttcaagctggttatcaatcgtgatggcatgtgcattctgatcgctgcgcaatgtgctgcgtttcagggtgccggcattcacatcacgccaacccgtgccataggcggttttgtagtcgacatcgacaaaggcatagcgggcattctggcggaaggtgacgtcattggtgaagtcatggctgagttcgtaaccgacagatgtctggatacgctcatatccttcaaagccgggctcgccggtgaagacatcgaccggaatggcaccattcgggccggcatagatggtgccgaccgttggcagccagttgttggctgacccggtttcatcgtgctggtaatggctaagaagggtaagcgacgtgtcgtcactctgccatttaagggatggtgcgatgtaaacgcgatcgtcatcgaccatgttggtttgggttcctgaatcctgaaccagaccggtcaggcgatacagaacgctgccatcttcaatcgccttgccaccgacatcaaaagcgccctgtttgtggtcgaagttgccaagctgcagggcgacttcattgaccatatcttcatgcgggcgtttggtaacaacgtttacgaggccacccggggcgttttgcccatacatgacagaggtcggcccgcgcagcaattcaatgcgctccgcaccataggcttcctgacggaaggatgcatagcccgacgaacgaagctgcataccgtcacgatacagaccgacatcctgctgggaaaagccacggaccttgaaccagtcatagcgggtgtcaaagcccgactgatcggcctgaatgcctggggaatatttcagtgcgtccataacggtttcggcctggcgggcttcgatttcatccgtgccgatcaccgaaatcgaacgcggagtttcgacaatcggggtgctggtcttggttgcggttccgctttgggttgcaacaaaaccttctactggcgaggttgatgtctcggcctgtgcctcggcttcaatcatgatcgccggtgtttcggtcgcatcggttgcttcggtctgatttgtggcatcttcacccgattgcgcgcgcgcaaattgcggcgcagcaaagctcaaggcaaaggcagtgctaagcaaaagtgtcttagacaatttatgtcctgtaaaacgcatctgaattccctgtctcggttgtctttggcgacgacctgctgggcgggaacctgcgggccatcttcatgatgggcccttggttatcacgcgcgcgacgggaaaatattgaaccggattttggtggattgaacagattttggctaaaattaggcaagctgttccttgcgccaggcgccaggcgtggttccgacgattttgcgaaataccctggtcaggtgtgcctgatcagcgaaaccaagaccaacggcaaccgacgccaacggtgtgtcgccctttttcaaaaggttttttgcccgctcgacccgtgctttcatctgccattgctggggtggcatgccggtggattcccggaaggccgagcagaaataggactgtgacaatccggtcagttgcgccaattcatcaaggcggatcgtgcgaccgcaattctgttcgatatagtcgacggtcttgcgcaactgataaggggcaagtttgccgcgtttgcgttggggttcctcagtctggcttggtgtcagaagggccgcagtcaaggcggtgaccagtccttcgccataaatctggggcccggtcatgccgttctccaggtcgttggccagaagtcggaccagtgtattgatgcgcgggtcgcagaaacccatgcgcggtgtttcaagaacgctcaggtcaattgtattgcccatgctgttttcaagcgcatcgacatcaagatgaatatcaagatggcgtaaccggcatttgccgagaatttccgacgaaatttccatcccggctgggacgtaataaaggcatccctgttttcggtcggtggtgcatgtgttgtctcgtgatgttcggacattgacctgactgtccccgatacagtcgaggatcgcgacgagcaacggcgcacgcgaaacataggtgccaccggcttcctgttcgcattcgacatgccacaaatccgtgatggcagcgttccagcgacggaaacgcaaatcatcaagaagtgaaataccttcgatcctgctggtcatttgcggatggaacgtcatgtcgggcaatcctgggtcggtcctttgatctgcgagtggtccatgatgtctgatggcgattctgcatagggaatcgctgcgcaaatataaccgggaatttcgtgcaaacaataacaattctcattatcaaataaagaatcgttcattttgtggtcaaatgatcgcgttatgcgggtttgcgatcaaaaacaaacccgcccaggatgtgggcgggttcaagtggtgtttatgagggcggttcaataccgccagtttcaataccggcggtctgatgtgacttcggcctaagttatatggttactttttcatccagcgcgacggtgcgatcaggcaaaataccgtcagggctgccgaaaagaacacattgaccgtcggcatggtgatgccaaacagggtccagtcgatcttgtcacatcgaatgatcggctgggcgagaagctgcgccttgagctcggcaagggagcttgcaccactttgcacgccaccacacatggccgggccctgccaccacagttcctgtaccccgacatggtaaatcgcaatgccggtaccgaccgcaaaggtcagcccgcaaagatagacgatggcacgtgcagccttgggaaagcggatcagaaggagtgccagaacagacagcccgatcacgatatagaacggcttgcgctgataaaggcacaggatgcagggcagcaatttctgcacatattgggcatatagggcaaagccgatgcttccgactgacaccagaaatagcacaatcggcgcaaaggccggcatgtagtgcgggcgaagcaattttaacatcagtagatccgaatcccgtcttccttgaaatgtcttcatcgaactagccgtgcggaatcagtttgattgcggcaaatccaccaacaagaaccacgataaatatggtgaaaacgaggcccagacgcttttcgatgaaatcacggatcgccgggccgaatttccagatcaatgccgcaatgacaaagaaccgcaaaccgcgcgcggcaatcgatgccacggtaaagaccagcggatcaagggcggttacgccagacaggatcgtaatcaccttataagggaatggtgtgaccccggcgataaatacagcccaggccccccagtcattataatagtcccggaactggtcaaacttggcaccatagccataaagctcaagcaccgggcgcccgaccgtttcaaacagaaaatacccgatgccataaccgatcacgccaccaaggacggatccgacaaggcaaatcagcgcatagcgccacgcccgggtcggggcggcaatgatcatggggatcaaaaggatgtcaggcgggatcggaaaaaccgaactttcaatgacggcaataaaaaacaatgcccatccggcatggcgatggctggccagattcatggtccaatcataaagactgcggatcacggcaaatgcgccttatcttgtttgacgatggtttgacgggtggcgcttggcctggaaacttggcgcgatcaaagcgcattttcccgatgatcgcaatgacgcagttcgggatcgcaaaatcagtaacatttttgcacaaagccccattgaccccgcgaaatttacagctattatcccgcccgtcgatggacggtgcgcaacagcacctgtattgcctgcccctgtggcggaattggtagacgcggcagactcaaaatctgtttcacctagtgagtgggagttcgattctccccgggggcaccatcgcacttttcctagctttcagcgcttttataatcacgccaaaagatctcattccgtaaattcaaaaagcctcattccggaaatggcattcggaatgacccagaatttatgagctcttgtgcttaaatttacccgcctcaattcctcaaaatacctctaaaaattaaacctttgattgaatgtcttgattctggtcatggctggtctttggtgattaggagcaagctagttgatattgaaactgcatatttctgagaggattttaaccagttgacatcgcaatgacctcgctcctctgcgggcaatacaatactttgggtgtttgcattgttttgttggcataggactactgctatgccttttgcacgcttcaaccgtgtcctagtgtctagcttaatccgtcaaaatgctcattgcttgagtgttatcaggccccccaatcttggggataaaacacaggttttagtcccattcctgagttaatttgagaatctggcatggctcggaataaaaacggggaaataaagatgcagtcaccaaagcaaggaggttttttcaaagaaagccttgctgaggaaactcagcagggggtcagctatcgcacctcatttgttcgccacacttttacaatgtctgggctgccacatcgcaaacctgaagatgatagtgcgcccttcatgcgcaacatggacaatcttgtgttttcggcttcgccaatacctcttggggaagagtatggggaacataaggatctgaactatattggcgttccatacggctctaaagctcggatggccctgatatggctctcttctcaagtgaatatgccagggcgttttccaggaaaccgcgaaattgaaatacccatcatcaaggaatgggtctcgtctctcgggctttccgttaacggttattcgctttcgcagttgaaagagcaaatcctcagattgaccaaaacacacttttctctggcctatcaggatgaagacaaccaagaggttaagatattcaaccctgatggcatgattgagggcgcgacctactccagggacgatatcgagcattacctgaatggccatcctgaaaagatgaaatggccagcatcaattgttctgaccaagcaggcatatgaaggatttctcaatcactcggtcccgatacctactgaggccctgacaaatctatctgcctcatcaatggccatcgaccttctgatgttcttgtccttccgcctgccacaagtagatccaggggcaaaagaactggttgactggtctgacttggcctccctgttcggctctggcgaaacacctggaaagttcaagcatcggcacatcaaagcgataacagccgcttctgctgcatctggcaagggtgccgttaaagtgaccgatttaggattgctgcttcactatcgcgatccagaacagcttaaaaaagccttctacgtttcgacgcctgtagaggcgcgtcttcaagatcgcaaacgtcgagtcaagcttcaaaaggaggatgccgtcaaccttaacaaatagagaggcccgccttgcagggccgacctaaatctaacttacagtacgcgaagtccagcaaggcgctgtttgccatggttcccttctctttgatccagcgcttcgacttttcactatctggatatgggttgcttacagcctttgcagaatatgccaacacacaggtgtgttgctggccgagccaatccaccttggcaaaatataccggccgttcccgcgcttgggtcaattcgaccttgaagaagcttgctgagaaaaactccgatctgattcagctgcgcaaaagcctcaatgcggaagtgtaagttaactgaagagcgcgacaaaagtccaaatcttaaatgcgccggttttctgcggtctatcgggcatgcgcgacaaaagtccaagtatggctgaggtgatggttgtttgagggacgcgacaaaagtccaaatctcagatgcgccggctttctgcggtctatcgggcatgcgcgacaagagtccaagtatggctgaggtgatggttgtttgagggacgcgacaaaagtccaaatctcagatatgccggctttctgcggccttgggtgttgcgcgacaagagtccaagtgtggctggggtgatagttgttggaggggcgcgccaaaagtccaaacctcagatatgccggctttctgcggcctttgggtgttgcgcgacaagagtcaaggtgtggatgggctgatagttgctggagcagcgcgacaaaagtccaagcctcaaatgcgctggtcttctggggcttctgagcattacgcgacaggagtccaaatgttggctgggtcgtgcgttgttagaggccggcgataagagtccaagtttacgctgaggcgtgcattggcagagtggcgtgccgaaagtacgacaattcgttaatcaaatgtttggttcagtaagctttcagtcatgttctgtttgattggagctcttgtttctgagctttgaagtacactttgattgctcatgaggtgaactggttccggccttccagttcctttctacggtgttcaatttatctttcttatgaggccgttgatcggcctgaccacctttttgtgggctttctgccgatacagatagttctgagaagcgtctgcgcttcaaaccagcttcatttttcggttaacagaacaaggcaggccggagcctgccttgtaattttgtgctctaaagcttgttaacagccagaccacaacctgtcttctgctaaaagacatccctattgtctgcagaacagtttggaacgtcaagtcccagtcatactagctataagagtaatatgcctatctttttaccccaaaagaataggggacgttatttccctgctgctttagcatcaagaaatattaaacaagggatgcaaaactcgcggggaatcacaatgtcgtcttatcgtttttcattcgaccttggcacaaactcgattggttgggcggtttttgaacttgatcccaaaactcggcccgtcgcccttgcagattgcggcgtgcgcatttttcctgacggacgcaacccaaaagacaaacaatcccttgcagttgccagacgcgaagcccgcgcggtgcgccgccgccgcgaccgttatctcaaacgacgcagcgaactgatggaacgtcttgtcgcaaaaggtttgatgccggaatcacgtgacgaccaaaaggcactggaaggcctcgatccttatgccctgcgcgcagccgggctggacgacgccttaccaccccaccatttcgggcgcgccctgtttcaccttaatcaacgacgcggtttcaaatcaaaccgcaagacagatcgcggtgaaaacagtgaaaccggcattaccaaaatcgggatgaaaaaactgcatgaagcccttctttccgagggatgccgcacccttggcgaattgcagcatcgacatcacgaggccaaccagaccccggccatggataccaatccaaagtccgtgcgctccaaactgcgcggcgaaggagccaaggccgtctatgatttctatccgtcccgcgacgccgttgaggatgaattcaacaagttatgggacagtcagaagcgttttcatcccgaccttctgaccgattctgcccgcgacgccatccgtgacgccatattttatcagcgcaaactcaaaacacccgatgccggcagatgcagcttcaacccggcagaggagcgggtcgcccgtgctatgcccattgcacagcattttcggattttgcagtttgtcggtgatctgcgattgattgataacgatctggttcgtcacccgctcaacaatgatcagaaaaaggcgctgtatcgcgaccttctggccaaaggtaagctgaccttcaaagccatgcgtaaaaccatcggcatcggatcggaatatgccttttcccatgaaagtgaaaagcaatcggaattcaggggcgatgaaaccgccgcaagactggccgggccaaaatatttcggacccaaatggcgcgaactgtcattcaatgatcaaagcgaaatcgttgacaggctgttgcacgaggaaaacgaggaaaccctgatccaatatcttcaggatcgtttcggctttgatcacgaccgctgcgaagtcattgccgatgcgccactgcccgatggccacacacgccttggtaaaaccgcgcttgaaacccttgttgaaatcatgcgcgatgatcatcttccctatgatcaggcctgcacgaaggccggatacgagcacgccttgccgcctgatggcgtcatccttgacgaccttccctactacggcattgcgctcgaacgccacgtcgcttttggcgatggaaaaagtgaaaatcccgaaaagcgttacggtaaaatcgccaatcccaccgtgcatatcgcccttaatcaattgcgcaaagtcatcaatgccctaattgcgcgatacggccatccggatcaggttgtgatggaaattgcccgcgacctgaaacaaagcaaggccaaacgcgatgacattagtaaggagcaaaagaaaaatcaggacaggaacgatcagcgccgcaaaaaattgcaagaggcccatattgccgtaaatgccgaaaacatgttgcgcatgcgactttgggaggaacttgacgaagacaatgctgccgcccgtgcctgcccgtttaccggggagacgatttcaatggcccgcctgttctcgcccgaagttgaaatcgaacacatcctgcccttctcccgatcccttgataacagcccggccaacaagacactgtgcatggtatgggccaaccgtgccaagggcaaccgcaccccttgggaggcgttcggacgtgaccgcgaacccggatttgactggccggaaatcgccgcccgcgccgcgcgcctgcccaaaaacaaatcatggcgttttggccctgatgccatggaacgccttgagcgcgagggcgattttctggatcgtcaattgaccgacacccagtatttaagtcgtatcgcccgcgaatatgtcaccaaaatctgcgatcccaatcaggtctgggtcacgccgggtcggctgaccgcctggctgcggcgcaactggggcctgaatggcattttgcccaccggaaacgcgaccaaaaaccgcgatgatcaccgccaccatgcaattgatgcgattgttgtcggcctgacggaccgtggcatcctcaaccgtgtttcacgtagcgccgcccttgccgaggccgaagaccttgatcgcagtatcgccgaaatgcccgatccgtttgatggtttccgcgacaacatccgccacatactcgagcagattattgtgtcgcacaaacctgatgcaggatttgtgccggggcaccccaaaggtaatacaacaccgggcgcacttcataatgacaccgcctatggcatcatcaaaaccgacgccaagggcatgtccgaggtcgtgacccgtaaggatgtcctgtccttcaagggaacaaaggagatcgaaagcatccgcgatgcggcaacccgacaaagtttgctggatgccgttgccggtgtgccatccgggctggccttcaaggaagccctgcgtgactggtcagtccgaacagggaccaaacgagtgcgtgtcaccttcaatatgtcggttattccgatccaagaccgcgatggcaaggcctataagggctacaaaggggatggtaatctgtgtgccgagatttatgaacgcccggatggcaaatggggcgatgaaatcatttcacgttttgacgcggttcagccagggttcacgccgcaatggcaacgcgaccatcctgccgcccaccgggtcatgcgcctgtttcgcgatgatatgatcatggccgagatcgatggggtcatgacggtttgccgaattgttaaaatgtctcctggcaaagtcgtattcacccctcaccacgaagctaatacagatagtcgaaaccgggataaagatgatccgttttcgttccatacatgcagtggtgagagccttcggaagcgcaaagcccaaaaactgtttgtcgatccgcttggcaaaatccggggttatcgggcgaaggaaggataatggatcggatcatagaaatcgccagcgatgaccgccatcttgcaattgcccgtggttcgatggaaatccgatctggcaatgatgtggtcgggcgggtgccgcttgatgatattggggcgctgatctgttcggcgcatggcctgacctattcaaataacctgattgccaaactggccgaacggtcggtaccggtcgtgctttgcggccccaatcacatgccgattggctatctgatggcggccaatgcccatcatcagcaatcaaaacgcatcatggcccaggccgaagccagccgcgcgctgaaaaaccggctgtggaagcagcttgtccagaccaagatcgaggcacaggccgccgtgcttgggacattgggtaaaccacatgttccagtcggttccctgatccggcatgttaaatccggcgatcccgaaaatattgaaggtcaggcggcccagcgatactggcaattaatgtttggcaatgaattccgacgtgatcggtttggcagcggcccaaacgccgcgctcaattacggttatgccgttttgcgtgcggccaccgcgcgtgccactatcgcggcggggcttcacccatcccttggcctgcatcatcgcagcggggcaaacccgatgaatctggttgatgatttgatcgaaccgtttcgtcccattgtcgatctgattgtttttcgcctgtgggttgatgataatgatatcgaactgcaaggcgagaccaaacgcctgctggcaagcgttaccgcgcatgacctaccaaccgatgcgggtgcgtcgccggtcatgcaatgcctgcatcgcctcgccgggtcgctggcgcaatgctatcttggtgaagcccaaagccttgccctgccgctggccccacttccacttgaactgggatagcgacatgttatcgggataccgaatgatgtggatgatggtgcttttcgatttgccggtcacaaccaaaaaggaacgcaaggccgcaactggttttcgcaaccacctcctcgacctcggtttcgaaatggcccagttttccgtttaccttcgtttctgtgccggtaaggaacaggcagaaagcatgacgcgcaaagtccatatgaaactgcccgctggcggcaaggtcgatattctgtatttcactgacaagcaatatgagaacatcgtttcatatacaggtagaacaaaacaggattcgcgcaaaaatcccagccagtttgaaatgttctgaacgacgaataagaggattgtgaacccgccagaacgtcaaaaaagcccctgaaatcaggagcttttccgaaggtggttttagcagaagagagattgtggtccaaccgcaacttctaaaccgaaagaaaatcctctgcgcgagttttagcagaagagagattgtggtccaaccgcaacgaaagacctgttctcatggctctcgcagaagttttagcagaagagagattgtggtccaaccgcaactcttacgatgagtggagcggaaatgcttgggttttagcagaagagagattgtggtccaaccgcaacgtaatgactgtggttttggttgtctgaaagttttagcagaagagagattgtggtccaaccgcaacagcaggagcaggcgtcagcaacactcgccagttttagcagaagagagattgtggtccaaccgcaacttgagtccgtatcggctgatattccgcgatgttttagcagaagagagattgtggtccaaccgcaacgccttaagacgcatgttcacggcggggtgcgttttagcagaagagagattgtggtccaaccgcaactttatcgttagagcgttacaaccagctcatgttttagcagaagagagattgtggtccaaccgcaactatcgcatagaacttgtgcgctccgatcacgttttagcagaagagagattgtggtccaaccgcaactgtttcgacggatgccaattcagaaacagcgttttagcagaagagagattg

SEQ ID NO: 3223 - DNA, 13890 bp, synthetic construct
  misc_feature 1..13890: note = Synthetic
  source 1..13890: mol_type = other DNA
cagattgaaattgcggtgcgattgtcccaaccaccgttcttgtcgcgatctggggcatggcctttggcggggttccggttgcatggtcaacctggatcacgcgcgccgtgccggacgaagccgaaagcggcggcggccttctggtcgcgggcttccagcttgcgattgcgacgggctctggcgttggcggccttctgtttgacgccagcggtgcgcttggcgtctttaccatcgctggcatgttgctggtcggtgcctcgatcatcgtgacactgggtctgcgtaccgcacctgttcccgcaaccgaacaggcataagcatcgccccacccccactctgatgcttcatacacaggcccggcaccccggcagtttcaccactgccggggttttctgtaggtagcccctaaccccaccccgtcattcccacgcaggtgggaatccatctctcaaatcgcgcggtcccaaacaaaatccggccataaaaaagcagagcaggccggagcctgctctgcaattttgtgctctaaagcttgttaacagccagaccacaatccgtcttctgctaaaagacaccctatcatttacaaacaccgaaatcgggtcaagccgtaattccaccccacaaagaatagtttttactaatgaacccgaccaaaaggatagaagacgctcctctcttcgtgctttagcatcaaataattcttttgcctgtgggggctaaaagtataggggagctcaatgtcatcttaccggttttcgttcgatctcggcacaaactcgattggctgggctgtcatcgcccttgaaaaaaatctgcgccccaacggccttgttgattgcggttcgcgaatattttccgatggccgaaaccccaaggacaaacaatcgctggccgtcgcacggcgcgaagcccgcgccatgcgccgtcgccgcgaccgttaccttaaacggcgtgatgaactgaccgaccggctgatcgcacacggcctgatgccgcgaaacgccgatgaacgacaatcactggttgatcttgatccctacgcgcttcgggcaaaggcgctggatgaacacatcccgctatatcatttcgggcgcgccctgtttcacttaaaccagcggcgcggtttcaaatcaaatcgcaaaaccgaccggggcagcaccgaaaccggcattaccaaagttggcatgaaaaaactgcaagaagcccttgccaatgaaggctgccgcacgcttggcgaattgcagcatcgccaccatcaggccaaccagtcgccaactgcggacgcgaacccgcaatcggtccgcgccaaactgcgaggcgaaggggccaaagccgcctatgatttctatccatcacgcgatgccgtcgaagacgaattcaatcagctctggcaaagccagaagcgtttccaccccaaaactctgaccgatgaagcatgcgaaagcattcacgatgctatctttttccagcgcaaactgaaaatccccaaggtcggcaaatgcacccttaaccctgccgaggaacgccacgcccgcgccatgccgatcacgcagcgtttccgcatcctgcaatttatcggcgacttgcgcctgattgacggggatttgcgtaaacatccgctcacgcccgatcaacgtgatgccctctaccgcgaatttcttgccaagaacaaggtcacgttcaaacggatgcgcgtgcttttaaaagccgggccggaaatgaccttttcccatgaaacggaaaaacagacggaaatcaaaggcgacgaaaccgccgccatccttgccggacccaaatatttcggcccggcatggcgcgaactcccccttgctgatcaaagcgagatcgtcgaaaaactgatccatgaacaggacgaagaaaccctggttgatttcctgcaatcacgtttcgggttcaaccgcgaaaaatgcgaagccattgctgatgcgcccattcccgatggctatgcccgccttggcaaaacggcattgcaaacccttgtcaccatcatggaagaagacgatctgccttatgatcaggcctgtaaagaagccgggtacgatcacgcccttctgcccgatggcgaaatcctcgatgaactgccctattacggtatcgcccttgaacggcatgtcgcattcggtgacggcgaaagcgacaatatagaacagcggatcggcaaaattgccaatccgacggtgcatatcgcacttaaccaacttcgcaaggtgatgaacgcgctaatcgcgctttacgggcaccctgatcaggtcgtgctggaaatcgcccgtgaccttaaaaacagcaaatcccgcaaggacgacatcgccaaacagcaaaaaaacaatcaggatgccaatgaccgtcggcgcaaggatttgctggcgaccgacacatccatcaatgccgaaaacatgctgcgcatgcgcctgtgggaagaactcaatcccaatgacccgcttaaccgcgcctgcccgtttaccggtgacccgatttcacgcgaacgcctgttttcaagcaacgtcgaaatcgaacatatcctgcccttctcacgttcccttgataacagcccggccaacaaaaccctttgcatgacatgggccaaccgcgccaagggcaaccgcaccccatgggaagccttctgtcgcgatggggaaaagggctatgtctgggatgatattctggcccgcgcggcaaacctgccaaaaaacaaaagctggcgctttgcccccgatgccatggaacgccttgaacgtgacggcgattttctggatcggcaactgaccgatacacagtatctaagccgcatcgcacgcgaatatgtctcaaaggtctgtgaccccaatcaggtctgggtcacaccgggccgcctgaccgcatggctacgccgcaactggggccttgaaagcatcctgcccaccggaaatgccaccaaaaaccgcgatgaccaccgccatcacgcgattgatgcgattgtggtcggggttacggatcggggcattctgaaccgcatttcacgtgccgccgcaattgccgaaaccgaagaactcgaccgcatcatcgccgaaatgcccgaaccgttcgacaatttccgcgatcaggtgcgcaacaaggtcgaaaaaatcatcgtttcgcacaaaaccgataccggttacacaccgggccgcaaaaacggcgatgccacaccgggggccctgcataacgaaaccgcctatggcatcatcgaaaccgacgccaagggtatttccgaagtcgtcacccgcaaggatgttctgtccttcaaatccaccaaggatatcgacgcgatccgcgatccggccacccgccaaagccttctggatgcggttgccggtaaaacaaccgcaatcgacttcaaggaagccctgcgcgactggtcgcacacaaccggcaccaaacgcatccgggtcacatccaaactgtccgtgatcccgatccgcgacgcaaacggcaccgtctataagggctataagggcgatggcaacctgtgtgccgatatttacgaacgcccggacggcaaatggggcgatgaaatcatttcacggtttgatgccgttcaaccgggtttcgaaccggcatggaaacggcaatatcccgccgcccgtcgggtgatgcggctgtttcgtgatgatatgattatccttgaacataacggattaatgattatttgccgaattgctcaattgactgccggaaaggtgattatggccatccactatgaggccaacaccgacaagcgggagcgcgacaaagaagacccgttttcatttttgcgctgtagtggcgatagcctccgcaaacggaaggcaaagaaattgtatgtcgatcctttgggtaaactgcgcggccatataccggaggacgggtaatggatcgcatcatcgaaatcgctagcgacgaccgccaccttgccattgcccgcggctcgatggaaatcagatcgggcaatgaaatcataggacgggtgccgcttgatgatattggcgcgctgatctgctcggcccacggcctgacctattccaacaatctgattgccaaactggccgaacgatccgtacccgtcgtcctgtgtggtcccaaccacatgccgattgcctatctgatggctgccgacagccaccatcagcaatccagacgcgtcatggcacaggccgatgcggccaaatcgcttaaaaaccggctttggaaacagcttgtgcaggccaagatcgaagcacaggccgctgtactgcaaataactggcaaaccgcacgtcccggtcggctccctgatccggcatgtaaaatccggcgatccggaaaatatagaagcccaggccgcccaacgttactggcaactgatgtttggcaatgatttccggcgcaaccgctttggcgacgggccgaacggattgctgaattacggttatgccgttttgcgtgcggcaaccgcacgtgctgtcattgcggcgggcttgcatccgtcccttggcctgcatcaccgaagcggggccaacccgatgaatctggtcgatgacctgatcgaaccatttcgcccgatcaccgatctgatcgtctatcgattgtgcatcgacgatcccgaaaccgaagttgacagcgaaaccaaacgtatccttgccaccatcacatcgcacgatctgccaaccgatgccggggcatccccagtcatgcaatgcctgcatcgtttggccgggtcactcgcgcaatgctatcttggcgaggccgaaaacctcaccctgcccctcgccccgttgccgcttgaactgggatagacccatgttatcgggatacagaatgatgtggatgatggttctgtttgatttacccgtgctaaccaaaaaggaacgcaaggccgcaaccgggtttcgcaatcacctgcttgatctcggttttgaaatggcccagttctcagtctatctgcgattttgcgcgggcaaggagcaatccgaaagcctgaccagaaaggtccgcacgaaattgccaccgggcggcaaagtcgatatcctctgctttaccgacaagcaatatgaaaacattgtttccttcaccgggagaacaaaagcggattcgcgtaaaaaccccagccagtttgaactgttctgacgatgataaacaccggtttttctgacgtcggaaccacaaaaaagcccctgaaatcaggggcttttccgaaggcagttttagcagaagacgaattgaggtccaaccgcaacaagacaccaatgcaccttatcccgccgcccgttttagcagaagacgaattgaggtccaaccgcaacttattgcgcaaatcgtggaggctatgatggttttagcagaagacgaattgaggtccaaccgcaacaggaatgcgatataagattgcgctaaccaagttttagcagaagacgaattgaggtccaaccgcaacgaccctgatcttatgccagcgcaccaaacagttttagcagaagacgaattgaggtccaaccgcaacagtgacaacggtggtcatatcggtgtgggagttttagcagaagacgaattgaggtccaaccgcaaccaccgtgcgcaatctcccctttcccaaattgttttagcagaagacgaattgaggtccaaccgcaacccgtatatacggcctgaaccaaaaccgattgttttagcagaagacgaattgaggtccaaccgcaaccagtacaacgcaacgctgaatgtcaagtacgttttagcagaagacgaattgaggtccaaccgcaactatggtcgctgccatgcaaacaaaggtcgggttttagcagaagacgaattgaggtccaaccgcaaccgcaatttcaatctgcaactggcctttaaagttttagcagaagacgaattgaggtccaaccgcaacggaagggccgaacccgactttgatggggtagttttagcagaagacgaattgaggtccaaccgcaaccatctcttctttgcgttccatctcggcgtcgttttagcagaagacgaattgcggtccaaccgcaactcaagcgtgatcggctgcgtggtgtattggttttagcagaagacgaattgcggtccaaccaaacaaaaccccggcccaataacatgagccggggcacgaagtgctctggagggagacggggcttttatcgtggccccttggtaaacccctgatatcccttgggcgttagaccgatccgatcaatcagatcgacctgatcgtcaccttgcgttccgcctgcgttttaagccggttgcgcaatgcgcggccaaacggggcggcctcgatctcgaattcgtcgccatcctgcgttttgatgccatcggcaaaggaaagcgttgccgtgccaaagaaatgcgcatgcacatcgcccgggcggcagaacagatcatatttgaagtgatgatattcaagattggcgagagagtgagacatattgtcctcgccactcaggaacggtttttcccagatcaccttgccatcgcgataaagccgtgacgtgccttcaacatggcttggcagatcgcccagaagcagttccggccccatcgcgcaggcacgcagttttgaatgcgccagataaaggtaattctggcgttccatcacatggtcggaaaactcgttgccaatcgcaaagccgatgcgcaccggggtgccttcggggtcaatcacgtaaatcgcggcaatttccggttcctcgctgccatcaagggcaaaggacgggcttggaatatccgcccccggattggccacgaccgatccatcccccttgtaaaaccattccggctgcacgcccggctcgcccgcctttggcttgccgccctcgacccccatgcgaaacatcttcatggaatctgtttcgtcggcggccttgttatcggccttgtgcatgttggcgcgcgccgacgcagagccaaggtgggtcaaccccgttccggtgacaaggaaatgcgccggatcggcatgggtgatgggtggcaacaaccggccggatttggcgacctcgttataatcaacgctggtgtcacccaggcgggcctttgccgcctcgatcatcgtgaccccttgcgaaatcgcgatgctggcaagctcgcgcgtggaggcaaccgccttaagcgggatcagggttttggcatcctcgaccacggccacatgctgcgcgcccgcggtatccttgtattgaaccagtctcatgaaatctgtcctgataatctgcttgataatctgtgtgttgtgcgtaatccgggtgcgggcatcatcgccttgcggccaatcagacccagccgccatcaacgataaagttctgtgccgtgaccatgcggctttcatccgaggtcaggaaaagcgccatgcgcgcgatgtcgcttggcatcaccttgtttttaaggcactggcgctcgtcaatctcgcgctcggcggcttcatcgacccaaaggtcaagctggcgctgcgtcatgacccagccgggcacaagcgtattgacccggatgccatccttgccaaggtcacgcgccatgccgcgcgtaagaccatgggttgcggcctttgccgtggtatagcccggcatgccgccctgccccatcatccagctcaccgacccgaaattgacaatcgcaccacccccggccttctgcatcatcggtgccaccgcctgaatggcaaaaaacgacgggcggatattgatcgcctggcgttcatcccagtattccggcgtcacgtcctgccatttatggcgggtgtcattggcggcattattaagcagtgccgtgatcgggccgttggccttggcagccagcgccaccgcatcctgaagcgccttgatatcggtaatgtcgcatgtgatgaaaagcggcttgtgcttggcatcgcggcccagcttttcaacaagcgcgtggccggcttcctcggcaatgtcgacaaaggcgaccttcgccccctgctcgacaaaggcggtgacaagcgcctcgccaatgcccgtggcaccgccggtaatgaaaaccgatttatcggcaaggctggtatagttcgttggcatgcgatcggacatgatcgtcggctctcccgttatctggtctttatgtgccgatcccctccgggtaccggtccgtccggcacgccatgatcgggatcagggttaaactggcaggatgcaccccgcccaaaatactgtacgggatacttgatggggcatcgcatgggatgatcaccgcatggatgcatgcgaaaaatccacaatcgcacctctttcgggccggattatgatacccgtttacgatacccggtcccgcgcgatgggccgcttcctcctgacagtcttgttcttttattcttcatacaataacattaattatcaggatgtcgcttgctgtcaagccgcaaaccggcaaaatcaggcctgatacaacactcaactgattgcttcttgtttggtgataagtggtctataaaaatgacacctctgatgtggtgcaaacagccccctgaaaaccgcaccgaaataattatatgcgttgcagcacaaggcattatcgggcgcgcagaagttgccctcgaaataaattcatattatatgaataatgtcagagtgcggtcaccgatccagccaccgccgtccgcagatatcaaaagaccgcaccggaggaatttgaatgccatcgtccatgtcaagaacctatgcaaggcgcagcctgcacagcatcgttgcccatgatctgggaacccggatcgtctcgggcaagctggcaccgggcgatgtcctcccgaccgaggcagccttgagtgaatcactcgatgtctcgcgcacggcattgcgcgaagcgatcaagatcctctcggccaaggggctgatcgaaagccgtccgaaaaccggcacgcgcgtcaaaccgcgcaaaagctggaacctgcttgatcccgatgttctgtcctggcatttccccgatcccgatccggcgtttctgtatggcctgtttgaaacccgcatgatcatcgagcccaacaccgccgccatggccgccgaacgcgcgaccgaggaacagctcgccaccatcgaggccgcctataccggcatggaaaatgccgaactcggcaccgaggccgtctatatcaccgacctgattttccatcaggcgattttggatgcgtcgggcaatgatttcatgaaatcgttcggcatgctgattgaaaccgccctgatcggatcgttccgcctgtcttcgggcggaccaaaggcgcatgtcaaatccctgcccgaccatttcgcggtctaccgcgccatcgcgcaccgcgaacccggcgacgcccgcgaggcgatgcgcaacctgctcagccgcaccatgctgcaactccgtcagcagctcggcatgaaaagcgaacatgactgggacgtgattggtctttgatactgctttgaccggtctgtgataccgctttgatacccgctttacgggcccggcgatgtcatcgcccccacacagcagcaaaagacaaaaacggggctgtcatcaggacggccccttttgtattcctcatacaaataaaaagccggtttttgcctcataacgaccaaaacccgtattcctcacacaaataaaagccggtttttcgcgcctggaatggccgcgcgcgatcctcgacacgcccctcaccgatccattattcaccaaaattgaaaaatcggattgattatgaaaaataacttcataaaaaaccggccccaaaacccacaaaatggccgccggaatgagcgcccctgaaaacaattcgggccgaagcagccctgccgccccggcccgaattcccccacccgaaaaggctaaatccggctcaccccgccccggcccgcatccccgaaaatgaccgtgtaatcaggcgttgcagcacgataaagccaaacagaagcgccccgatcatgatcttggtccaccagctattaagcgacccgtcaaacgcgatcagggtctggatcacccccatgatgatcccgccaaagaacgtcccgaccacaaagcccatccccccggtcagaagcgttccgccaatcaccaccgccgcaatcgcatcaagctccaccccgaccgccgccaatggataggcagaagcggtataaaacgcgaagacaaccccggccaaggcactgaaaaagcccgacaaagtataaacccggatgatcgtgccctgcaccggaatgcccagcaattctgccgattgacgatccccgccaatcgcatagacattgcgcccgaaccgggtgtaatgcgcaatcaccaccccggcaatcaccgtcaataacatcaaaagcgccgccgcactgatccagccacgccccggcagcggaattttaaatccgctgaaatcggcgacaaacggatgatcaatcggcacggaatcaaggttgatcaaaaagcacatcccgcgcaggaaaaacatccccgctagggtgatgataaagggctggatatcgaacttggcgataatcacccccatgaaggccccgaaaagcgtgccaaccgcaatcgaaatcaccaccgccaccagcggatgcatgccaaacccggtgacaagttcggccatcaggacgccgacaaaggcaatcatcgacccaaccgaaagatcaatcccgcccgacagaataacgaatgtcatgccgaccgcagtaatgatcagaaacgcattatcggtcagaagtgcgcccagaacataagtatctgaaaacgcccgatgttcggcaatcccgtaaccataaagcagcgccagcaccgccagcgtggcaagcaacgggtaataacgttcattaattttcatcggaattcccccgcaccttccggctgccgatcttttcccacgccttgcccgccagttcgcgtgatttcggcgcctgcaccagcagaaccaccatcaccaccgccgccttgacgatcagggtatattgcgacggcaaacccgataacagaatgcccgtggtcagcgactgaatgatcagaacaccgatcaccgtcatgccgataaagaaccgcccgcccatcagcgacgcaccgccaataacaaccgccagaatggcatccagttcaagccaaagaccggcattattggcatccgcgccgcgaatgtcggcggcaataatgatcccggcaaaagccgcacacagccccgaaatcgcataagccagaagcttgatcccgcgcgcatcaatacccgcaagccgactggcgcgcgcattgccgccaaccgattcaacaaacaggccaagggcggttttgcgcatcacggcataaagcgcaccaatcaccaccgcggcaatgatcacccgccacggaatgcccagcagataaccgctgccgatcccttcgaaaaacgccccatggaaggtcacgatctgcccgtcggtgatcatctgcgcgatgccgcgcccggccaccatcaggatcagggtcgcaatgatcggctggatatccagataggccaccagcatcccgttccacagcccgcaaagcaccccggcgccaagggctgcgaagatgatgaccgccggatgcagatcggtatcacggatcaggaccgccatgacggcggctgaaatcgcaatcaccgatccgaccgaaagatcaatgccccgcgtgccgatgaccaccgccatgccgactgccacaagggcggttgacgccccgcgatgcaccacatcaacaagcgacccgtaaagatgcccgtcaacaatgcgaatatcaaaaaagtccggcgatatgatcccgatacccagaatgatcagcacaagggccgccaccgggccaaaccactgccggctcagcaaagaagatgcagacattgtgctgctttcccgtaatttctttttgtcctgcaagctggtcatcgtgcaatcgcctcgatgatcctgtcctgcgtgatttcggcacccgtcagttcagaaaccttttggcggtcgcgcatcaccgccacccggtcggcaaaggcaacgatttcctcaagctcagatgacgccaccagcagggccagcccctcgtcacaaagctccttgatcagcttgatgatatcggcatgcgcgcccacatcaatgccgcgtgtcggctcgtcaagaataaggaaaatcggcttggacaccagccaccgcgccagaatgaccttctgctgattgccaccgctcagttgcccgacaggcttttcgctatcaggtgtcgcaatccccagcgccctgatcatctcatcggcggttttctgctgctcggcgcgtgcaatcgggcgcagccagccccgccgaccctgaagcgccagcatgatgttttcacgcacactcagttcggcaacaatgccatcctgtttgcggtcctcggggcaaagcccgaaacccgaccggatcgcatggcgcggggagcgcagcatcaccggctccccgtcaaggaacacaaggccgctatcggcctttttcgccccgaaaataagctccgaaagctccgtcctgcctgaccccagaagcccggcaagaccaacaatctcgccgcccgaaaggtccagcgtcaccggttcgagaacccgcttcttgcccagattcttgatctggatctggcgacccttgccggtgaaattgctttcatcctgatggcggtgcgaactgacctcggccagttcccggcccagcatgtgattgatcaggtcgatctgtgccagttccttggtgacaaacgtcccgacaagccgcccgttacgcaggaccgtgatgcggtccgtgatcgcgtaaacctgatccagaaaatgggtgacaaacacaatgccaagccccttggcgcgcaattcgcccatgatgcgaaacagggtgcggatttcctcggcatcaaggcttgcggttggttcgtcaaggatcagaacccgcgcatcaagtgccaccgcacgcgcaatcgcaaccaattgctggatcgctaccgaataggaccccagcggccggttgacatcaatatcaagccccagcgtttcaagtgctgccttggcgtcgctttcggttttcttccacgaaatgaacccgaatttcaacgtctggcgttccagcatcaggttttcggcaaccgacagcgtgggaaccaggtttacttcctgatagaccgtcgaaatacccagcgcctgcgcatcacccggatgatttggatggatttcctgcccgtcaagcaggacggttccggcatcgcgcggatgaaccccggtaatcaccttgatcagcgtcgatttcccggcaccgttttcacccagaagcgcgtgaatttcaccggatcgcaaatcgaaatcgacatcctgcaaggctttgacgccgggaaaaaactttcccgccccgcgtactgacagcacggattgcgtcttctcagacatggatagcccctctccctttatgttcgctggccggatgtggccgaacgcacccttgccatcgacaaggatgcgcccagacatcacgccagttgcgtcaccccaaccgcacggtaaggcgcacggttgcggataacggccttacttgctgcgcattttgtattcttcggcagcggtatcaggcagataaagcggaccattggccttgatccatttcggtacttccttaccttctttggcagcggcaatcgcatcaaaggaaggtgcgccaagatgcgggttcagttcgatggtggcgttggtgtcgccatcggccatcgccttgaagatatcaggaaccgcatcaatcgatacgatcaggatgtcttcggccgggtcaagaccggcttccttgatcgcctgcaccgcacccagcgccatgtcatcattatgcgcataaaccgcacagatgttcttgccgccatcttcggctttcaggaagctttccatgacttccttgccgcccgaacgggtgaaatcgcccga

SEQ ID NO: 3224 - DNA, 24230 bp, synthetic construct
  source 1..24230: mol_type = other DNA
  misc_feature 1..24230: note = Synthetic
cccgcagagcagatgaattgatgcgtaaagtattcagttacggcgaacagtttagtatggacagtttgcaatatgtgagcgatgtatatttgcgccacgtgatgcacaccaaacgcaacggcccgattgtacgttacattccgggcatgttgcgtttggagcgtgggcacaatgattacctgtccgaggcccatttaaaattacagtatcgcgcccccggtcaaattgattgtaaagtcatagcctttcacacaactgccaaataccagagcgagcaacgctttcactcgttaggacgttttaattttcaaatctacgagtcgaaattgtttcttgatggcatcttgaatcccctacacaagcgcaacagacgtttttatcgttacacttacgtttttataagcaagctcaacgactccgttcctccgacagcccgcatcaatataaccccccgtttcagcaacgaccagttagtaacaggttttattgatatggatttatcaagcggagctgtgcggaatttcacctttcagtttcgttatcagttacgtcagataaccgtcaatgcccgaatgggcaccgatggttgtcagagcatactgcctaaccgtttgcgtatagtatctaagttcaagttgttgggcaataaggtaaacgaagttatggaaatacattcagcccataacttcacttgtccggtcaacacccagttcagcaaacagtcaaagtacgacttaacacagttgtgcctgttacgcattgataccacacgtgtaatcaataatttcgattactttgccaaatatcgtaagtttccgctacgtaaagccgaagaaaatattgtacagctttataagcaaaagcacgaatcacaaaccgactccatagctttgcagcaagcagacgaagccctatcgaatgcatcggaagttgacagtcaaacctcagaaaccgacgattttgatttagcatccgatggcctcgaagatgctttggaattaaaggacgacaaacaagacaatcgccatccgaaaagatggtttggcgaacgcacccaaactttgttgctttcatccaatcatttcaaattgagcgatcattcccgcattaaattgccccccatcatcaccccttcgatggtagggtggagccgtacgaaaggattttcgctcaaagctcgtgcacgttgggatttgttcactcatttctcaaccacattgccacgtatggagtttactcccagtataggttacagtttcaagcaaaagcaaatctattgggaagttcccttattagtacgttttagtcatcgttacgacggaatcttcagtttcaatgcaggaggtggtgcccacatgtacaacagtcgtcaagccgatgaactgcgtcacaaactcgaaggcattgaaaaatacgattccttgcttcacatcatcgaccattatggttttcacgactatcgcgatgcccacatacaaaccgatgccagtttcagtttgcttcccggactaaggttcactttaggaggccgctatcatcggcgaggtttgatagagtggaacgaacttgccgaagcttctggcatgaaaaagcatttttcaagtctcggaccgcgcgtacaaattgagtggactccagcccagtattattattgtgaaggcaaacgtcgtattcctttgtactcaaattatccaaccttgctgttcagctacgaacggggctatgccttaggtcgtggccaaacccattatgaacgcttcgaaggcgatttgcgttatcgtttgtcgctttacgccatgcgtactctgtttttcagaatgggcggtggagtgtatacccagcgcggcaacgattgtttcctagactacgactatttcaagttcagctatatgcctgcccaatggaacgacgacatgacgggcgagtttcagcttctcaactcccgttggtataatgagtcgcgctactatgtgcgtttcaccggaacctacgaaagtcccatgttgctgttttcgcgcttgccatatttgtcgaaagtcgtgcaaaaggaaagagtctatttgaacctactcagtgtcaaggcacttaatttttacagcgaaataggctatggtttcagcaccaatatcgtcgatttaggagccttcatcggctttgcgcccgaccacagcatcgacttcggttgcaaagttgtgctcaagttcttcgaagattagccaaccgttttcagcctatgagcagacgcgttgtcgcaaaatagtcaggtaatgctatgccatctcccatgtcggtaggcataggtttcagacaggccttcctgtcctactttctgttgtcacaaaatgtcaaagaacgctgaatgaatacataagaatctgttgttttttcatccgtcaaggctgaggtgcagcccgctgttgctgatgcaaagatacaacatgaacaccctgaaatccaaattttttcgccacttaatctcgcacctcgattttttcaaaacgcgaaaaacgctcattaacccctttaaacacgggccttccggcgcgttcaaccgacgtgcaaaaaagtgaaatagggatatactttttcagtccgtttagtatgcaaaatcaaacgaactactgtagtatatgcagcccggttaccgaacaatagataatgaagtcgtctaaacttttctgacgaagatttgatttggaaatttatctcttctaaattcaatcttcacctttctttttggctgtttttttgacctttcatcagtcgtgtagctcgctacactccttcctcaagacccaaaaacacctcaaaaattaaggcaaatcttgaatttcataaaagttcagccgacttcaatagcaaaagcccactctcaagcaatgatttgcactattcattgccgagagtgggcttttttaatgttcatcttaagtcagaaaggaaagggttactttatcatcttttgtccgttgatgatgttaatacctttatgaggaacaggcagttgacggcccgacaaatcgtaaatagaatccttcacgataggattcttagcagttacttggccgatacccgtaggacccggattgatatccaaaggattttggtcaataccttcaaacacaaataccgatgaagccggcatattgatggtcagttccttatcgatgtcgatagcttcgcccatcttcaaaccattcagcacaggctgatctttgaaagaactggtccaaataacctgcgtgctgacatattcaggaatgtcaagcgccttacgcagcgtaattttgatggtttgtgccgaagcactcgggtttctaagagccagcgtagcctttttgccgttccacgaagcccaaccatagatgttagccttggcaccatcccacggattaccgccaacccagtgaatatcgggcagcacatcctcgttacgcttttgccagtcaatacattcagccaagtcagcccacagcttaccaccattgatttcgtccatgagcttaaagtcgttgtacagttccaccatacccgaaccacaagcaaaggcacaacgcatttcgcgcacaatacccttgtaatccatcgacttcgacacctggccgaacttcgtcagaatgaatccgtgagtcatgatggtgttgatggggcagagcggagaattctgcacaaagttttggtaaaccaagcggtcgcggtacgtaatccagcgttcgcggtcatcgccctgattaccgattacgctccagtcgttctcctgacgccaaacagcatccgagaagtggaaccagaaaggcgaagcccatgtgcccacagtcgtgttgaagaaaatgtcagccttctttttacgcacttcgcgttccaaagaaatgataccctcagcattttcaatgcccgtatcgccagcgtccggccccaaggcactccattgtgcgctgatgccgtcaaacttaaagaagcggaagtcatacttgtcaatcatcgacgtacaagccttcatgaacgtgtcgtagtaatccttgttactcagctgcatgccgcccttatccttccagtaattccggcggtacgtaccactctggccgtagccacccaccgggcccagccaggcaccctgtccggcacccattagtcgtcccgttttgtcggcagcgctgaatccgttggggaagttcttgttgaaagtccacgttccgtaatgatcccagccatcgtcccaaacaaaagcaaccggagctttgccgtaaggtttatagaatttttcataccaatggttcaccacctcggcacactgctcctcagtcatattctttgaataatcctcagagttattgcggtcaatgttcagttcgtaccacgaaatgtacaccggcatggcacgccagggcacagcacgttcgcgttcgctgtaagccaggaacgaacggcgcgactgacccggagctatcaagcccactacagagctgacgttccacgtcgtaccgcccttgagcgtcgtgttgcggcgccagtaaccctccatcggcgattccgtcggagccggcagatgaatggtatcaggagcagccgtcatgaccgaagtaatcgtaccgttcgacgtgttagcctcgttcttcatcgacaccaggtagcgcagcgtaaactgtccgttgtaaggcagtttcacctgatacgtattgtcagccttttggcttcccgtaaatccgaagtgataatcataggcaatgggtgccccgtcttgcagcaagtcaacacccacaatctgcaagcggttattgccgtttttgtaaaggaattccgtgttcaacaccgccttgtttgcctggatgttaaccggctgttcgtgtttgtaaatgtactgagcctcgtgtcccatttcaaggatacgcgccggcacatctttatcattagccttagtccagaagttgggcgtccattcctcggtgcgtgcctcatcttccacaaaggtgtaaccctccttcacatcagccgccttgacagccggcaccagtttcgtagcaggaatagctttactttgtttcgaagcctcagtcatcaggtcgtacaccaccaccggcgtaccgataggtttgctaaacgtgatgctaccgttactttcaatcgtttgcgaagccgtttcaacgaagtaacgaatcaggtaagtacccttttccggaatgttcagtgtaaacacattgttctccgtctttccacccgtgtagccaaaatgataatcatgagccaccacctcgtcggtttgtgcctttatcacgtccacacccaccaactgcaagcggtgtgcgccacctttatattggaacgtaacggtttgttcgcccgcctcgcggaaggtaacatagccctgtgccgccttaatgtcctcaggcgtaaggtcaaagtacttgccaccgtcttcaacgcgaattttcagaatgtcggccggcgtatccgtgcccggagaaaagttgaacgactccgtagtccaactcttcggcgtaaagttttcgatgcccgcattttccgttttgatagcgttcacacccattggtgtttcgagtccggcaaatattttatcgcttgccagcaccgcaccacgcgtattacccaccaccgcaggcgcactgccggcagcaatgttgtccacggtgtaaatcatcggcgtaaccgactgcatagcctggtcgttcttagccgtgatgttcaagtccgtgcgcaaatagtgcgaaccgtcgcgcagaacggctctccattcaatcgtcaggttatctttcgaaaaaacagccttgatagccttacctgcaaagcgttccgaaccctttgcagcagcaatgttggcattcagttcttcagtgtcgacgctttccaacttcatgtccgaagcattcagagccgtaccattgcccaaaatcaccttaaacagttcactgcccggtttcagattcatggccttacagccgttgaacagcaatttgccatcggccgtacggataaacgaagcactgagcaaatcgtttttcaaaacgtattcttcgccgttcacttcaaccaaggcaatgccggcttgttgttgctgcggaaagattacagcttgcgccatggcttttggggtacccagtaaacacaccaccatgcaggtgcttgcgagtaacttgtggtaatttttattcatgatagatttaaaaatgtgttgtatgttgtggttgttagattcaagtttggaaaaaagccatttctgcaaatagcaagtttttcaaatgtttcatttatggattttccaataagtattgcaaaaatacgtaattaaaatgactcacctctcctatttataatatttgttatgaataaaaagcgttgtttgtacatcaaaaaggggttgcatgcgctaactcagattgtttgcctgtactgaaatgaatattttttagaaagcatacgtgtaatcagtttgtttttcgctacctttgtcctatttgaatgcagatgttatctgtacaattttttaaaatgaaataggaaacaatgatacgaagtatattattcgatttagacggaaccctgctcgatacgttagacgatttggccaacagcgtgaattatgctttgcgcacacaccaccttcctgaacgaagccatacagaaatacgcagtttcttgggcaatggcatacgcaatttgatgctcgatgccgtagggcgcggcatgagcgacgaagcattcgaacccgtgttccaaaccttccgtacctactacgtggagcattgtctcgataaatctaaaccatttgccggaatcattgatttgctcaaagccttgcaacaacgcggcatcacgatggctgtggtgtcaaataaattacaccccgcagttgttgaactcaacgaacgttttttcaaggattacatcacttcggctgtgggcgaaagtgccacggttcggcgcaaacccaaccccgacgccgtacttgccgccctcagcgaattgggatgcagcaaaaacgaggccgtatatgtgggcgactccgaagtcgacttgcacacagcccaaaatgccggcatgcagtgtatgctggtgttgtggggttttcgcgacgaagactttttgcgtagcctgcctggtgcttccctctttgcccaatgtccggcagacattctttcatggctcgatacacaatgctgatgaacagattatggcttaaccttttgctgcccctttgcctatggctgtgctcccagcccgttcgagcgcagaaaggaaacgctgctcagaatcgtccccgtgtaggccttgtgctgagcggcggtggagccaaaggtgcggcccacattggtgtgatacgcgcagtcgaacaagccggcattcccatcgactacatagcaggcaccagtatgggagccatagttggcggcctctatgccatgggctacaccaccgacgaattggaacaactcgtgaaaatgcaggattgggaaatgctcctgtccgacaaatcgccccgcaagcagctctcgcccgaacagcgcgaacgcaagggacgttacatcctgaatatccccctttcacgaagtgccaaacccaaaatggatggttttgtgcgcggacgcaatttgggcaatatgttggcccggctcacagtgggctatcacgatagcatcagtttcgacagcctgcacataccctttgcctgcgtggctaccaacctggccaatggcgacgaagtggtgctgcgcagtggcaaactctcagccgccatacgcgccagtatggccattcccggagtttttactcccgtagtgatggagggcaaaacattggtcgacggcggattgtgcaacaactttccagtcgatgtggcccgacgcatgggtgccgacatcgtcataggctccaccgtgcagcgcgtgttcaacgacaccatgcagcaaggaggcatacaaagcgtggtgcagcagctcatcagcatttcgagccgacgaaaattcgaagaaaacatacagctttgcaacctgcacataggcgtgaaccccaagggcgtgtcgaccatggacttcagtcccgaaaagttagacaccatgattcgccgtggctacgaaacagcccgtcaacatcaacgcacccttcagcaaatagcccttgccacaggcgtacattttccttacgaccccaagctgcgtttccccggtcaaacgcccggtgcttcttccgtccggcttcctgccgatacattgtgcagcccccactcggcagccttggcatcggccttgtctaaacttcaaggcagccacccctcccggccaacaggttgccaaagaggcatgcagtccgattttcaagtagccagcatagccttcgaccacatcacccccgccgaggaacgcatcatacgcaaggcctgcaaacttgccgaacactcgcgcatcacgcagcagcagattgaacatgccgtaaccctgctcaacgaacgctttctgtatctcgacgcccattattcgctcatcgaagccgagcaaggctaccatctgctgtttcatgcccacgaacgtttggcaagcgaattaggcgtagccgcccgtttcgataccgaggaactggccgccattctgctcaatgccaattttgtgttccgcacccacgtgcccaccaccatcgacctctccgcccggctcaccgagcaatatgccgtgcgcggatcgctcaccgtcgaaccctggctgaacaagcagttcaacgtgttttacgagtttcgccatcgcgacatcgacgtcaatcacaaaggccgtcgcgccagcagcctggtgtttcagcagcagcaagccggtttggcctacgcctatcggcaaacgcgcaatttcgatgcagaattaggactaaagtttcagcgtttcgatttcaacgacgtactgatgaacgacgaaggcaccctcgcagcctttcccgatccggtcagcgacaattatttcacaggctacgtacgtttgaactacaattcgcaagacaaggccgacaatcccaccgtaggttccaagtttgtagcaacctacacgtttaccaccgacaatttgacgtgcctgaaacgcccccatgccttttccaccgtgtcagccacgtggcaaaccgtcatggcccttggcaagcgatttgcccttttgtcccgtttctccggccgcttggtattaggtaagaaagtcccctttatttttcgcaatgccgtcggcggtcatcttgaaggcaagtacctcgaacagcagttaccctttgtcgggttaagccacttcgaactcttccgcaacgcccttgtgtcgtgcgacgtaaagttccgctatcatttcctcacgcgccattacgccacccttttaggagccgtactggccgagcagcgcgacgttcgtcacctgaaaaaagcccactacgcctacggcataggtctgcattacggttacgaaaccaagttcggccccgtacaagccgccctcagctattcgggcgaatgtcgcaaacccaccttctacatgagcgtaggcttcgacttttagtcctccttcgttcgtcccctaattccccaacgtgtgattcagccagcatgaatcacacgtttttttttatccgcattttcagcctcgaataattgtgacgttctactggattgtaaatttaaaaaggtagaagtatttctgttttaagccaaaaaaaccgacaacaagaaaacttgctgccggttgaaactgtaccacaacggaataatccttattgtgattagctgaattacttgcaaagttagaacttttttttgttttgccaaataagaatcggtttttttgctaattttgtgatgcgaacataacggaatggttttttgttttgataaaaagtaacctattagttttgcattgcatacagaaccaatagattttaaggtaatcaactatgccaagcagtgattcgcggcattcgatgagttcttgttttttgattcttgcgaataacaattatacatatatatatcatgaaaaattcagcacatattttagggcttgacttaggcaccaacagcgttggctgggcattgctcaacgccaatcagtttcgcattgcaggtaacggcagtcgcatcattcccatgacgggcgatgtgatgaccgattttgccaagggaaaattgcaatcggccgcttcgcagcgaacggcttttcgcaatgtgcgtaaaaacattgagcgcgtaaagcagcgtcgttaccgactgctgcaggtactgcacatattgggttttttaccccagcattttagtcaacaaattgactttgtcaatcatcgcggacatttcattgatgaagctgaaccgctgttgccttaccgttgcgatgcaagcggacggcacacttttattttcgaggaatcattccgcgaaatgttggccgattttgcaatacatcaaccacaactcgtggcagacggtcgcaaggtgccccacgactggaccctgttctatctgcgcaaaaaagccctgacgcagccggttagccgcgaggaactggcttggattattctcaatttcaacgcaaaacgaggttactaccagcttcgtggtatgggcgaaagcgaggaaaaggacgatggaaccgtatttgcacgtattcaggtagcggctgtcgaagctatgggaccatcgaaacgccgcaggggacaaaccatttattgcatccgttttgacaacggctgcgaactgaaccgtgaatcggaatgcccgccatttgccgtaggcgaccaagtggatgtgctttgtaccactaaaaccgataagaacggacagcccaaactcaatgaacaagggaaacctcaggtggtggtcagcattccggatgccgacgattggacgttccgtaaaaagaagtcggaatgcgacattgaactcagtcagtgcaccgtgggtgcttacatttacaatcacttgcttgccgaacccgacgacaaaattcgcggacactacattcacaccattgaacgcaaattctatcgcggcgaacttgagcagattttgcacaaacagcaggagtttattcctgaacttactgacaaagatttgctccagaaatgcgcccttgcgctttacaccacgcccgaacgagctgctcagcatattacaaagggcggtttaaccgattttattgtgcgcgacatcctgttctatcagcgtccgctcaaaagccaaaagaaactcattgctaactgtccttacgaacgttaccgccatgttgattatgcaacaggcgaattggtggagcatcgcatcaagtgtgtgccgaagtcgcatccgctttttcaggagtttcgtttgtggcagtttatcagccagttgcgcatttaccaacgcgaagctcaggttggcgaacgccttgtgcccgattacgacgtaaccgaccgcttgctgcccgatgctgaaagtcgtgcgcagctgttcgaccatttgtttgccaaaaaagaatttagccaaaaggatttgctcgggttcaaaccctttaaactttcggtggagcagcgcaagggtttccgttggaattatcctgaggaaaagacctatccggccaaccggacgctgatgagcatacccaaggagtatcgcgattgctttgacgaaaaactgtggcacttgctttattccgtaaccgaccccgaagaaatcgtgaaagccctgaaccgttttgcccgtgagcgtggcatttccgatgccgatgcctttgtcgaagcacttcgtaaggtagtgtttgccgaaacaggttatggagcctattcgctcaaggctttgaagcatttgttaccgcttatgcgttgcggtcatcactggaagtccgatgcattcgatgcttttacgctgcaccgtttggaactgttgcaaacagaacccaacagtttttcggaaacggctcgtaagcagtgtgcgggtattaccggtgtggctgtttgtcaaggacttccgctgcacaaggcttgctatttgctttacggacgctatgccgagagtgacgacctgacggtgtggcataagcccgaggacatcgactattacttgcgccatgtgttcaaacagcattcgctccgtaacccggtggtcgaaggggtggttaccgaaacccttcgtgtggtgcgcgacatttggaaaacctatggccgcatcgacgaaattcatgttgaaatggggcgcgacctcaagcagaacagtgaggaacgaaagcagacgttcgaccgtaattctgaaaacgaacgtgccaattaccgtgcccgccgtttgttgcaggaatttgccaaacccgaattcgacgttgagaacgtgcgaccctattcgcccttgcagttggaggttttcagtatttttgaatcgaccattttgaacgatgctgccaatagcgaggaaaaactgcaatataaggatgtcattaacgatttggggttagcctcgaaggccgataaggttagtcatagcgacatactgcgttatcgtttgtggctcgaacagaaatatcgttcaccttataccggcatgtttattcccttgagcaaactttttacaccggcctacgaagtggagcatgtgttacccaaggctcgttactacgacgattccatgcgcaacaaggtgatttgcgaaaaggaagtgaacaaactcaaggacaagatgacaggctatgagtttatcattcgcaggggtggcgaagtggtgaagggtgcatttggtcagacgtttactttgcttacgagagaggcgtacgaagcgtttgttaaaacgcattatgccaagttgcctggaaaaatgaaaattctgctgatggaggacataccgcaggaattcaacaatcggatgctcaatgacacgcgctacattagccgactgattatgaccttgctttcaaaggttgttggcgaagaaggcgaggaaggcgcgaagtcgaaacacattatcaacaccaacgggcgtatgaccagcgaactcaaacggcaatggggacttaatgaggtgtggaatcacctgattactccgcgttttgagcgtttgaaccagcggctcaacaccaccgagtttggcgagatgcgcgaagtggatggcaaacgctttttccaaacgcaggttccgctgcatttgccgcctgtgaatcgcaagcgtatagaccatcgccatcatgcgctcgacgctattgtcatagcctgtacgacgctcaaccatgtgacctactttaacagtgtggcagcaaaggacgaagtgcaaggtgcacgttacgatttgcgtcgcctgctttgcgaaaaaacgcgaactgacgattgtggcaattacacctggacgttcaaaaagccatgggaaacatttacacacgatgtggaattggcactggataacgtggttgtcagcttcaaacatgctgagcgtgtgttggggcaaacaaaggatggccacatcaccattcgtaaaccgctgcacaaggctacgatatatggagcagtgcaactgccgcgtgccggaaaggaagctatggtggcagggcgtaaggaattggatgaaagtttcaatgccaagaaaattcagagcatcactgatactggtattcaatccatactgctgcgtcatttggccaataatgggggcgacccgaaggtcgctttctcggttgaaggcaaagtgcgcttacagcagcaactgaaggaactgaatttgggtaagccgcacaaacctatatataaggtgcgtgtgtccgaaccattaggattgaaatttgcagtgggtaaacgcggttgccgaaaggcgcagttcgttgaaaccgaaaaaggtacgaatttgttctttgccatttatcaaaggccgaatggcgatcgaaatttccaaactgtttcgcttcgcgaggctgtcgtcaatctggtcgaactgcatcagccggctgccgaaaccttggcagatggtagtaaattactctttgttatttctccaaatgacttggtgtatgttccggcaatgggggaagttcctgttatagatcaattagattcaaaacgaatatttaaaatggtttcatgttatgatgatagatgttcttttttacctcaatcagtagcttcatttatctatccaaaggtagaatatctgtctcataatataatagagaatacagatgatggtatttcgataaaaaagtattgtttgaagttagaagtcgatcgtttgggacatatcacaaatatcattggcttatgataaagaaaaccctctactttggcaatcctgcttacttgtcattgagtaaaagtcagttggtggttaggatgcccgaggtggagcaggctgagcatttggccgaaagtattcggcaggaaagtgtgcgcaccatcccgatagaagatatcggggtggtggtgctcgaccatcggcaaatcactttgacacaaggcctgatggcagccttgctcaacaaccaaacagcggtgataacctgcgacgaccgacgcatgccagccgggctgctgcttccgctcgaaggcaatacgttgcagaatgaacgtttcagaagtcagattgaagcctctgttccgctcaaaaagcaactatggcagcagaccgtggtggctaaaattgagaatcaggcgtacgtgcttgaaaagcaacttaacgaaccggctgcacgtatgcactatttggccgataccgtgaaaagtggcgataccacgaactgcgaggcgcaagctgcagcttactattggcagcacttgtttcccgacattccgggctttacgcgcggacgcgaggggccaccgcccaatcagttactgaactatggttatgccattttgcgtgctgtggtggctcgtgcactggtggcaagcggattgctgcctgtggcgggcatacaccaccacaaccgttacaatgcttactgcctggccgacgacattatggagccttatcgtccctttgtcgatgcactggttatcgaaaccatccggcgttttggtttgacagccgaactgactaccgcgttaaaacgcgaaatgctggcagttccggtgctcgatgtgtatatgcagggaaaacggagtccgctgatggtggctgtagcacaaactactgccagcttggccaaatgttatcgtgccgaatatcgcaaaatatgctatcccacctggggctgattcagtgtctgacactgctcattgttttcttatttcatgccgtattttctgtatgattgaacgtctcaatgcctatcgggttatgtggatactcgttttttttgatttaccaaccgagactaaagagaatcgtcgggatgcagctgtttttcggaacgatttgctgaacgatggttttacgatgtttcaatattctgtttatcttcgtcattgtgccagtatggaaaatgcacaggtacacatgaaacgggtagagcagaaagtgccttctgaaggtaatgtcagtattctttgtatcaccgacaaacagtttggtgatatcaaggtttttcgtgctcaaaaaaagaaagaccctcctgctcattatcagcagttggaactcttctaaaaaaagaatcggaattctgagtaaaatacagaattccgattctttttaataggcatttttttatttctatttttgaatgtaaatgcctcataatcaacaacttatacgatactctgttgttgttgaccctgtaaaggtagtaaaaattcagctaatcacaacctttttcaattctgtagcaagatggtaaagttgttgttgaccctgtaaaggtagtaaaaattcagctaatcacaaccattcaccatcaaaccctttacctgttatgttgttgttgaccctgtaaaggtagtaaaaattcagctaatcacaactgagcgttgacgagggcactttgctctcttgttgttgttgaccctgtaaaggtagtaaaaattcagctaatcacaacggtgcggtcaacggcttctatattctgcgcgttgttgttgaccctgtaaaggtagtaaaaattcagctaatcacaacgacattcaaaatagttttacgaaggaaaacgttgttgttgaccctgtaaaggtagtaaaaattcagctaatcacaacattcttctctcttgggttttccgaccttcagttgttgttgaccctgtaaaggtagtaaaaattcagctaatcacaacaggtagtacattattttgaacacaccaaatgttgttgttgaccctgtaaaggtagtaaaaattcagctaatcacaactagaccctcttgcggaatttgacatcgacagttgttgttgaccctgtaaaggtagtaaaaattcagctaatcacaacataaatttatagatttcgaagctaaggaacgttgttgttgaccctgtaaaggtagtaaaaattcagctaatcacaacatttcactgcttatcttacttgtggtacaggttgttgttgaccctgtaaaggtagtaaaaattcagctaatcacaacggcttttaatatatcggcaaactctaacgtgttgttgttgaccctgtaaaggtagtaaaaattcagctaatcacaacattaacatttgcaacaatgcttttcgccaagttgttgttgaccctgtaaaggtagtaaaaattcagctaatcacaacttgtatattgtattatgatttgtttatttgttgttgttgaccctgtaaaggtagtaaaaatgtgggcttgtgttgaatagagtcggtaatggttattatagatgccaaccgtgacttttgacagccgcctcgacctaatcctcaaagtacaaccttcaatccctttggattgggaagtagttcacagcttattgcgcacaggacggatttaatagataggtgaataaacgtaaaaaacagaagtttgcctatcgattcatttcaaggcgaaatgagtgtgcctgaaaccgattctggggattttttgaaagcgctgattatcaatagttccgagattgctgaaattagctcggaactaattcgaattagctcggaactaatttcaacaatctcggaactaattcggacaatcgcggcgtaatttttgacgatagctcagcgcgtagttcaaacaacgacaagcagatggaaaaacaagctgactattttaatataaattcacctacttagcagcttaatgtttaacatttacggcaaagggaactgtgaggcctggaatattagccatagaaaacgttacagaatcggaaacttcgaactcgtgtttgagaggggagtgttgaggctgtgattacttggcaggtggcagttcgggctgatagctggggcacagcgcactgaggccacagtggtcgcacttgggtttgcgggctgtacaggtgtagcggccgtgaagcagaagccagtagtgggaagcggctacttgattttcgggaatgtattttcgtaaagccatttctacgctgtagggggtggtgcaacgcttgggaaccaaacctaaacggtggctgacgcggaatacgtgggtgtcgacggctaaggcggctttgccaaaggcgacggcttgaatgacgttggccgttttgcgacctacaccggggaggcgcgttaacgcttcgagggtggagggtacttcgccgttgaattccttgactaacatttggctgagcccgacaaggtgtttggccttgttgttggggtagctgacggacttgatgtattcgtaaattacttcaggcgtggtggcggccatgacttcgggggtgggaaagtcggcaaagaggcgaggggttacggcgttgatgcgcttgtcggtgcattgggctgagagtaccacggctatgagcagttcgtagggggtggtgtagttcagctcggtttcggtgtcgtccatggtgctgcctaggtaggccagtacgttctgaaatagttctttacgtttcataatgttagcttttgcatagggtgtagccgcaggctgtgcatccgatgcctcctattaccgaaagcagggcgtaggatagggctgtgagccacatgccttgtcggagaagttggaatgtttcgttcgaaaaggtggagaaggtggtgaagcctccgcagaagccggtgacgaggagccaatagggatcttcgctttgccggcgggacaaaaggccgatgaacaggccgatgagcagacaaccggagaggttgacggctaaggtgggccagggaaatgaggcgtctgtgcctttgagccaacaggcactcacaatgtagcggcacagactgcctaaaccgcctccgatgaaaatgaggagaaaggggaggaacatacagaaaaaaggaatgagaaaagggcgtttgccggcctgaaaaagcgtgacgacggcttattcggcctttaatgcttgcaggcggctgatgtatttgcccagtatgtcgaattcaagattgacttgcgtttctacctgtatgtggtggaagttggtgtgttcgtaggtgaaggggatgatgcacactttgaatgagttggccgtgggttcgcatacggtgaggcttacgccattgaccgtgacggagcctttatcgacggtgaaatatccgcgttcgaccattgaacgtgaggtttcgtaggtaaaggtgtagatgtagcttcctgctgcgtcggtaatgtcggtgcaggtggcggtttggtcgacgtggccttgtacgatgtgtccgtccaaacggccgttcatcatcatagagcgctcaatgtttacttcgtcgccaactttgagcagaccgaggttggaacgctgcagggtttcgttcatggcggttacgacgtagcggttgccgtcgatcttgaccacggtgaggcatacgccgttgtgggcaacgctttggtcaattttgagttcatggccaaaatcgcattccaaggtgaagtgtttgttgtctttatcttgctgaatggcaactacgcgtgccatagattctacaattcctgaaaacataatgtgtgaggaggtaatgaagtcgtttaaacttttctgacgaatatttgatttggagatttatctcttctaaattcaatcttcacctttctttttggccgttttttgacctttcatcagtcgtgtagctcgctacactccttcttcaaggttcaaaaacgcctcaaaaattaaggcaaatcttgaatttcataaaagtccagacgacttcaataagtgggtgttcttaatcaaaaaaaaggaagtaggtgattgactttcaagaatcggaacacctgcttcggaaaaaacagaatatgtgatgctcttgggtatgtgtttacttaatcttgagctctttgttgcttagtttctcgatggttacggtgtcgcccttgagaatgagtttgccattgctgatgcgatagtctttggtgtggcgttcgagctgcgaaaggttaatgagtacgccaatggccttgttgttatcgcgggtggtgagtgcatagcgttcgccttctttcaggtcgccataaattttaccatcagtaccatcgtcggccgtgcgggttacatagagtgtgtcgcctttgtcggagatgagtgtgaaggtgctcatgccgaattcgtcggatgtgccgtagatggttgaatcgttttctacatggtcagtaagagctgtatctgcagccaggctgtcggggtcgctggtggcgtcaacgggttttttgccaccctgacaggctgagagcacgatgagcgcagtaagtgcgcctatccataaatttttcatacttgagattgttatttaacttccaaaccgttgcgggcgaaaaaacgtgtgtttcccctacaaactgttggcattgaaagcctaattatgagagggcgaagttactaattttttaaagataagtaggtgttgtcatttattttatattggcttcgccaattatttttacattgaattgcgttttaagtaggtgttcataattatttttacatttgaatggtgtgattgtgccgtagctgcttgttctgcactcaggagcatagcgggctatgtgactgagtgcagggcaggcagaaatggtgcaagcacactatgcaaagtaaaaatacttcgatagaattatataaataattttgaacacttacttatgcttcaaataatgggttgaaacttcgtatcctgacgtttgagaacggttcggggttaccgcaatgtgacgcctttgtgtgaaaatgaagattgcatttcctaaataaaagtagtaaaaataaattcttttttagctcatctgctgcataagtgtgtaatttatgcgttcggaaggcaatgttactgcgtttttgcttactgcataaagcatttcaggcgtttaataaatataaaaatttaattattgttcgaatttgcacatagaatcggtttgttgtgcatgtttattgtacttttgccgaagaaaataccaataaatacgagaaatgcgaaaatctttacttactgtatcgctcattttgggcacagttgcatcggctcacgctggtggatttttaacgaatacaaaccaaagtgtggttttcctgcgcaatccggcacgcgatgccagcattgtcattgatgcagcttatgcaaaccctgccggtatcggttttatgaacaccggttggcatttgggctttgatattcagagtgcttatcagtcgcgtaaggctacctcaatttttccgaactttagtttgggaacagtgaatggtgtgcagaatccggcaacgggcgaaaaggtatttgaaggtaaggctgtggctcctgttattccttcgattgatttggcccgcgtaggcgagaagtggtttgcttcattccacttcggcatcagcggcggtggcggtaaatgtaagttcgacgacggtttgggttcgtttgaaagtcaggtagccatgattccgactttgattggtgccattgctcccggtgctgtgaaaggatacagcatgactacttatatgcaaggccgtcagtattactttggcggacagtttggtgtaggttacaaaattacgcctaactttaatgtaagtgtgggcggccgtgtgctttatgccgactgtaactactatggttatgtgcgcaatatcggtgtcgtaacggctaccggacacacagttcctgccgtcgacttcttcaagagccagaatatgcctcactttgctccgctcgttgaggataaggaactgaactgcgaccagacaggatggggatttacgccgattatcagtgctaactatcgcatcaataatttgaacctctcggctcgttatgagttcaagacgcgtatgcgactgaaaaaccatgccggtgtgaataccagcggtttgtctgaatatgacgatggcaagaaggtggcttgcgacgtgccggctatcttgtcgttgggtgccatgtacacgattgatgataaactgcgtctgtcgggtggtttccactatttcttcgacaaacaggctacgcagtatgaaaacaaagaaaaacacctggatggaggtacttgggaagtgttggccggtgcagaatacgacatcaataagcgttggcgcgtgagtgccggatggcaaaccacgtattatggtttgggcgacgacagcaagtatctgactgatatgagctttgtgacaaattcaaactcaataggtgtgggtgcacgtttccagctgcgtaagaaggtggctatcaatattgcttatttcaagacgttctacaagcactataaaaagacgatggctgattacgacgacttgaagcataagtttggttcgcagcttgctccgctgcaggctcaacttcagggtggtatcggacagtgcgatcaaattattaacaacccgatggctactgaagaacaaaaggctgctgccgaacagaataagggcattttgcaaggtgaacttggtgcgcttggtgccatcagcagcggattgggcaagttcagtactgctggttcagacaatttccaccgtacgaacgacgttttcggcttaggcttggaaattgatttctaaaaatattttccattctttggaatactgtatggggtaaaagaccggaatttcttccactctgtgtgaagaatttccggccttttttgtgtataagcaggtgtttacaagctcgttttcaagagcttagagctacacccttgaataaaaaggtatcgcgtcagttggctgaaatcagcggatccttgtttggagccgatgggctgggggaggtgttcgccttgcatgtcacaatgatgcttcgcacctcggcattttgcatacggggcacatcgctgataaggcagcccgcattggccgcgatgatgcagcggcagaaaagtccgtgaccgatgcaaagcacatgttgattggggaaggtttggctgacatattcaagaaactgacgggcgcgttcgaacagttgctctacggtttcggcgtcagcaggcagggatacctggtgtgcttcggcaatggtatgtcccgtcaggctaccccagtctcgttcgcgaagcagagggcagagcatgggctggaggtgaaatgcctcgttgacgatttgcgtggtgtcgatggtgcgctgaaggtcgcttgtgagcagcgcatcgaatgaagcgcccgattgcatcagtgtgttgcgcagctgaaccgcctggttgcgtccgcgttcggtaaggtgacccggaagatgcccctgaagaatttgcgccacgttttcttcggtttcgccgtggcgagctaagtatagtgtggtagtcatggttaggatgggcttatattagtaagtaggtgttcaaaattattttatataattctatcgaagtatttttactttgcttcgcgaagtcaggctgcacctcagcatagctcatgcaagcaagcttgcctcgctctgcattcggtttgcactgacattgcatcacgttcttgcaccgcatctgcctgccctgcactcagtcacatagcccgctatgctcctgagtgcagaacaagcagctacggcacaataacgcaattcaaatgtaaaaataattatgaacacctacttataaagaaaacaggagctaaggtagcaaaaaaaatgagtggtggcatagagaggctcaaagtaaacggatttgcagacagaaatagcggcagaataagcatgaaaagaacggaaaatgcaaacctatcctttatttttgaggaagaaaatacaattctggaaaagaaaaatgaacaaatacttttgcaaagcgtacgtttgcagtaaatttgcaacgcctaaccgtttgtttgtattagaacagatgaaagtgtaggcattaaacgcaaaatcatttcattcatccctagtatgagtaaccttcgttttaaagtcgttgaagaggcatttaaaaaacgcccgcttgaggtggaaacaccctcagaacgcccatcaagctactttggcaagtatgtgttcaatcaggaaaaaatgtttaagtacctgacccgtgaaacttactatcagctgcgcgaagtaattgaaaagggctctcccttacccttggcagtagcaaatgatgtggccaaaggtatgaagcaatgggccatggaaatgggtgtgacacactgcacacactggtttcaaccgctgaccgaaggtaccgcagaaaagcatgacgctttcgtagaacacgatatgaaaggaggcatggttgaggatttttcgggtaaggaactcgtgcagcaggaacccgatgcttcatcgttccctaatggaggtatccgttctacgttcgaagcacgtggctattcggcgtgggatcctgcgtcgcctgtgtttattgtaggcgatacgctgatgattcctaccgtgtttgttagttacacgggtgaagcactcgactacaaggcacctttgaaaaaagcattggctgccgtagataaagctgctacggcagtgtgccagtatttttatccggaagttacccgcgtaacggctaacttgggatgggaacaggagtatttcctcgtagatgaaggcctttatgccgctcgtcccgacttgctgcttaccggccgtacgcttatgggacatgattcggccaaaaaccaacagatggacgaccattactttggcgccattcctgaacgtgtggctgaatttatgcgcgatcttgaaattcaagcccttgaattgggtattccttgcaagacgcttcataacgaagtggctcctaaccagtttgagttggctccgattttcgaagaatgcaacctggct

SEQ ID NO: 3225 - DNA, 23762 bp, synthetic construct
  source 1..23762: mol_type = other DNA
  misc_feature 1..23762: note = Synthetic
tacggaacagaaccagcgggcgcccttgattccgaaattacccgaaggatttacgggtgagcccaaagatgtgcccgatgatcgttactgcgatttcatcacttccccgagcaaagaaacggcactggctgtttacacgatacctcagcagggagaatcgaaccctgtctttcgtctcgcagcttacgccctgcctgcagctgcttcgaccgaaaagggaatcagtacgctcaacctgaccttccacgataagggaggagtggaattgctgcgccgacggattctcattcgtcccgaagagcaaccgacgcgcagcggtacgggcatcatcgatacgcccctgcccgaaggagacaatccacgactgcactaccccatccgcgccaatagcttctaccgcatgggaacagaacagagtccgattgacctgagcggtacaacgactgatattattgtagacattgatacggtatgggacgaatactatggcggtgtactgggacaagacaatcagccaggtttgggcattgaccctagttggggtgatcaccccgggggagcacttgacggggaacaacctcagcccactccacccgtcaatcattgattacaatgacatcggctggtatccccaatcagtacttcctcccccaaaaagactgaatcgttacacaactctcttgacttatgaaaagaaaatccttacgaaacacggcatttgccttgttcgccagtatactgctgacaagttgtgccactgacaacgaactaatagcaccgcctgtagtcacgaccttccgccttggcatggacacacaaacgcgtgctgcgcaagccctcaatcccacacaatatcccacgaagctttacctctacaaagctacagctgacgctatgggagaaacttactatgctttcgaccattgtacagatgtatcttcccaaacggtgacgctggaaaacctagaacagaataaccattacaaggcagtattcttgagcattcccgccaaacaaacacccgcactacctgaatttacagaaacacaacagccttacgaaaaggcgcaagcggaatacatccaccaacccgccaacaaccaacaacccgagacggacaacgacctctttcgcagcattgtggactttacggcttcgcctggaacaggcacacaaaacgctgtactcacgcggcaaaacggagcactggaggtgcgcatcaaaggcatttccaacctatcgaaagtagaacttcatctcaaggggcacacctcgcttttgcttcaagacggtacgggcggtcaggtattaactcaaggagagcctgtggccttatctaaggtacaaactttcaagaatgcacccacacaggtaagaatccgcatcaacctgctaccccaagaggatataacggaccgaaacaatggtaatgacaactacctgcttgttacaaccgatgtacctggcgaaggcacgggaatcatcaatcagaaagaaacaaaataccccattcgatcagctcatccctctatccctatctacccgaatcaggtgacttggcttaccctgggtaaagacaatgatagttcgggaggaaactttgaagtctcctttggcgataaaggcaacatcgacctcgaagacggagactgggacggatggaacgacaactacaccaagtaaacgaaaggaatatgaaaaagatatggataacactcttgtgctgtagcgcgatgctcacaatgcctatgctaactgcctgcgacaacgagcttgaaatcacagcggaagaggggctgaacaatgaagctactgattcacaggtaccagaaggctacttccgggcaacgttctttcctcaaccagcaggaacaacttctactcgtgccatcgttaatggtgaatctgagcaaattcagtcgctagtttgcttgatttatcgcaaaaagatagatgacgcacaaaacgaatactacgaatacgtagatagtaagcctgtcatcacctacacaggtacggaagctacagctggaaacatcaccccccaaacatacgtgtggccactaaaggaatccattagcttcaccctgcctaaaggcgaatacaaagctgttttcgtgggcaatgctgaccgcaaactctttgaaggtcagggtaaggaaaatgaaattctgacaaatatccgtggcaacatggatcaggcacgcatcaatatgcccgacaaaggtcctctcgccttcaacgattacaacatgttctacctctgcaccgttgacttcaatgcactcaacccttctcccgccgtattgatgcagcgcgtggtcagcaacaatgtgtttagccggaaggcaattgatgcaaatgcagcggtcagcacgctggctcagaatctggttaatcagattcgtgcgaacgatttgaccacagaagtagtacaaagcctcctccatacggcattgctggagcctgtatccaaggtaactggattagacaaagcctcccaagcgttaacaaagctagtcgaccgattggtcaacctcctcctgggcgatgtggtacagatgctcaacgaccatttactacaggaactcaccacacgcttacaaaattcactcaagggtactggtgacgtcaagaaggatttgctcgggctgagctacatcatgaatccctggagcgcggcagaggctgtcgatgtgacatacacttctctgccccgaagcattgactttaaccgaaactgccgctcgctttataacgagacaacgttcgacaacatacctgtcaaacacacaatggggcagcataatgacacgctcgatgcacacttctccctcgtaacgctctgcggtccgagcagattaaaggaaatcaatatcaactccacaagccaaggctacacgaaactgttgtatccgatacttcaaaaactcgacaaacagattataaacggcttgctgataaacatacatgtgccgctcaactacacgcaagagtcaaacctgcagtactccaccagctatgaacttcttaacctcacgctgaatgattttaaaaaggtgacagactcgaatgctcctaactacgcgacaccagtcggtgtgacaatctcgctcaaagacattgtaaaccttgaagaattagtaaagcggctgctgggcgacaacatcctgtcaaccattgtgggaggactcaccgataagctattagaacccttagtagaggcattaaaccaagtggttatcaaaaagctggacatccaacttcctggattaggcttaagcaacatcgtccttgaaggcacttgggatgccacttacgtatcagacggtacggtagctccaaccacaaacgatggttcacctactcccctgccgagcaaaccgaaaccagagcaacccgctggaatggttagcaggaactaaacaaggaactatgcctaagtgttactgacaatgtcagctatagcaccaacgaataacggaggatacgcccttggggcataccctccgttatttactttcatacaatagtgcttcgcacagtgcgcttacttttggaaacgcttggctttgccacgaacaccgcgtttgttcttcttggccttcttgttattcttcttctcggtagccaagtgttcacggaaggtgggttcggctaccggaccgttgccatcgtcgaccaaagcgaagtcgagctgacggcgttcgaggttggcacgttccacacggatgcgcactttgtcgcccaagccataacgcttgcggtaacggcggcctacgaggcagaagttgcgttcgtcgaattcataatagtcgtcgagcaacatacgcagggggatcataccctcgcacttgttttcatcaacttctacgtagagtccgaactctgtcacaccactgactgaaccttcaaactcctgtccgagacgatcggccataaactctacctgcttgtacttgatgctggcacgttctgccgtagctgccaactgctccatgttcgaagcatgctcgcagaggtcttcgtacttggtggcattgaccgaacgtcctccgtcttcgtaacgagtcagcaaacgatgaaccaaggtgtcgggataacgacgaatgggcgaagtgaagtgggtatagtattggaacatcaaaccgtagtgtccgatgttgtgaatgctgtaacgcgccttcatcatggcacgcaaggctacgagttcgacaacctgctcttctttcttgcccttgacatcgtccaacaagcggttcaggctcttcgatacctccgcctttgttccctcggtgcgaatcttgtaaccgaaacgggcaatgaaggcactgagcttctccatcttttcgggatcgggcacgtcgtgaatacggtaggggaatactttgggcttgcgtcccttgggtacgactgccatcttggtcgctacgctcttgttggccaaaagcataaactcttcgaccagtttgttggcatccttggctaccttgacataggtagaaatgggatgtcccttttcgtctacttcgaaacgtacttcgggacggtcgaaaccaatggaaccgttcttgaaacgcttctcacgcaagcactttgccaagcgattgagcaagagaagttcggcggcatattcgccctccggcacggccccttcgggcaagcgttcgggatgttcaccgggctgagcgaggtcttctgccgatgccgcaccgtttcgctcaaagatgtattgcacctcttcgtacgtgaaacggcgattggaacgaatgaccgtgtgggccaaatgccaatcgagcacctcggcgttttcgttcatcttgaagatggctgaataagccagcttctcctcgtcgggacgaagtgaacagatgaagttacagagacgttcggggagcatcgggatggtgcggtctaccaaataaacgctcgttgcacgacgttcggcttccttatcaatgatgtcgccctcctttacataatgggaaacgtcggcaatgtgtacacccacttcccaaagtccgttacccaattcgcgtacggacaaggcgtcgtcgaagtccttggcatcgtgcgggtcgatggtaaaggtggttacctcgcggaagtcctcacgacgggctatttcttcgggtgtgataccgggatcgagcttttcagctgcctgttccacccgttcggggtatttatagggcaagccgtactgtgccaggatggcatgcatttcggcttcgttctcgccctgcttacccaagatgtcgatgaccttaccaatggggctcttggagtcagtaggccactctacaatcttgaccaccgccttgtcgccgttttgtcctcccttgagcttatctttgggaataaagatgtcggtagccaacgaacggctttcggtaatcaggaagccataaccctgctcgacctgaagctgtccgacaaatgtatcgttagcccgttcgaggatttcggttacttcggcttcacgggtatgtccggcacggcgggccagcatggtgaccttcacgcggtcgccgtcgagtgcatgaagtgaattgcgctcacagaccagaatgctcttaccaccgtcgtcggggacaaaggagttgcgtccgttacgtttgcgcacgaaggtaccttccattacattggaacgcaccgcattgcggtaatgaccgttgccatcggtcgaaatatagtcgtccagtacgaggtcggagagtgcatcaagcaccaccatcttcgtgggatgattagccgccttgaacttcacaaagaggtcctttacgtcgaagtccttctctggttcttgattgaacatatcgacgagcatttgcgccaccgccttcttcttcagacgtgacgcggccttgttcttttcttttctcgccataatcgtatgatttataaagtgattaagctgaagcatagagaagtggaggctgatgatgctcgtccccgacgttaggaaagggggaacagtcggaatgccctgtccaaatcacaagtacattcccttataagcactcgcttgtgctcgcatccgcttcgtctgcgctcagtcacacagcccgtcatccgcttcgactcccatttcttcaaccggcattcgtacagaatgcctcaatggatagagcaaagtaacggctttttaaaacaatgcatgggggttttacaataaaaaacacgggtcaaacgattatcttcctacttttgcccccacttctaccacttcggtctgaaacgtaacagaaaaagaggcgaacggggcattgtgtaccgttcggagttacggctttctatgtgcccctttacccgctacattatccatttctttaaacagtttcccatcgctatgcgttatttcctccttcttctcaccctcagcttgcttcctgtacttggctggagccaaaaagcaggtagcaaaccagactccacgcaggtggaagaaacagaggtgccccttcagacgcaggtaggcgaaacaacgtataaagggcgcaccattccacacattgtttttccaaccttgccgaaatatgcgcccatggagtttaagaacgagaaggagcgcgagcgttacaaccgcctggtctacaatgtcaagaaggtattgccctgggcaaaactgacgaaatacaccatcctcgaaacctacgactacctggagaccttgcccgacgagaaggcacgcaaggcacacattaaaaaggtggaagcgggactgaaggaacaatacggtccggcacttaagaagctcacccgctcacagggacgcctcttgctgaagctcatcaaccgcgaatgtaaccaaacgggttaccacattgccaaggcctttatcgggcccttcaaggcgaacctctaccaaggtgtcgctgtgctcttcggcaatagcctcaacaagaaatatgaccccgaaggcgatgaccgctacacggaacgggtggttagaatggtcgaagcgggggtcatttgaagcagtagctaacggcttaacttctcaaagttgggcaggctccctatccacgatataacatccaaaacgactcaagccctgtagggaagacacgcaaccctatccatcacggattgtggtgtgtcacttccctacagggcttgaagcgttcttaaaaacggggggaatcatgaagtgaatccctaccctccttcacagagtaagtttgaaatgtcacgacattgaaaagagttcgtaatctgcggtcgatacttttgcagtgtcaaaaagcaatcgcataactatcaaaaacttactcatgacttcaaaactactcctcagcacagctacttgtgccctttcactccatggtctttctgctcttgctgccaatgaagtgcatgctgccgctcatggcttacagacgatcaatgcgggacaaggcatgaccttgcgccaagcgttaccgcagactctggcgaacacccaaacggctcagacgaacgaggaaggtggaaacctacaagtaacgacaacgcactttgaggtggggcaaacggtggaaatcacatacaacaatttacccgcaaaagctaccatcagtgtgtacaaggaccaggcacgcatccccctcaaagagcaactgacgctgacggaaaaagccgagaaaggggtattcaccctgggcgaccagctcgaagcgggtgactacacggtgcgttgcaccaatgcaaagggtgaagacattacgacccccatcctgtttagtgtcagtgctcaggcttggacgaagggtcccaaggatatattcgtgatgagcgacatccacgtgatgagcccggaattgctgattaaggaaggcagtgcctttgaaaaatacttggccggcgaccgtaaactgttggctgagagtaaagatatattctataccatgattgacaccatcctggcacagaagcctgagttggtgctcatccccggcgacttaacaaaggatggcgaattgcttagccaccagttggttgccgaacaattaaagcgactcaagcaagcgggcatacagacactcgttgtaccgggtaatcacgatgtgaacaatccccacgcttatgtgtttgacggcgaccagacgcgctatgccgaaacggttagccgcgagaagtttgctgaaatctacagcgaatttggttatggcaaggatgccaagcgcgacccgcagtcgctcagctatgccgttgaggctctgcccgatgtggtggtggtaggtatcgatgcttgccgttacgaggacaatacctttgtatcacaaggtgcggataaggatgtatgcgtcacttcgggccgcatcaaacccgaaacgctgcaatggatcagccaacaggcgcaggaggcacgcgagaagggcaaacaggtgttggctgtcatgcaccacaaccttgtggagcacttcaacggacaggccaccatcgcttcgccctatgtagttgaaaatgcagccgaagtacgcaaggtattgatggaggcaggcatccgcacggtcttcacaggccacttccacattcaggacattgccaaagactacaacgaaacgaagacggactctatctatgacatctcaacgggttcgaccgtgacttacccttgccccttccgccaagtacgcctcaacgaggacaatacggtgatggagttgcgcggcaaactgctcaagagcgtgaaactcaacggccagctcgaagcaaacttcggacactatgcgcaggagaagttggtcagcggtctcgaaccaatggtaggtgggctgatttcggactactgggatacgatccagaaggtggtaagcgacgctacgggtagcctgggtgacctgggagccgctatcaaatttcccgaaacgcctgaggaactgactgccatgctgatggaatgtatcggcgaagatgccatcaaggcttacttgaccttctctgaaagtaacgaagacaagaaggcttcggaagtattacaaaagcgcattgtgaccgacggcatcaacaaattggtcgacaagttggtggggcgcattttaggcgtagtggccaaacccatcgtacacgaaaaggtagaccccatcctcaacaccgtgctcggcagccttttgggcaacatcacgaacaatggtacggacaaggcgaatgtgaccaacgacctcgacctcagcatcgacatgccgcgcaaggtggttagccaaattgcagacgtagcgaatgcaacggaggctatgcaggtgactccgaccctgacggacggtcccatccgcattctcttgcccgaacttgctcagtcggctcgcctctgtatctacgacctcaacggccgcattctctacacaacggaagtgccggctggtgcgccctctgtactcccctaccgcttccagcaaaagggtgtatacctggtgaagttgattggtcaaggcaatgccgtgaaggtaatcgtggaataaacgaaactaacttacacttccttcgcttgggctcgcttgaagcgaaggaagtgttccttctgggatgtgtttaaaaacgaataggagataaacgcttagcacagcggtttatctcctattttcgtatgtaaaccagactctctggccgaacgtacttttactataaaaggtgcacacgttattgtgtgcaccttttatgattagaacattactatttcaatcattcacgaacttcttggactttcctcattacgatagaagccaaaaaaaggacgagtttccccgcccaaagatgttttcacaacggaataatccttattgtgattagctgaacaggggcaaagttaaaatcttttctttaaaaaatcaaatagaacgtagaatatttaactttgcaggcagcaaataagtctgctattaggttgataactctagcatagaatggctcgtaaagcaacaacacctatagcaaagggcgaattcttctgaaaaaacatttttcccttctcttatttaccaatcacacttattgcattaacaatcaacatctctatatcatgaatgccaagcactacattctcggcctagacatgggtacaaacagcatcggatgggccgctattgacgctgaaacccagcaaatcatagcaacgggtagccgtattatcccgatggacgaacgaagtatcaccgatttcgacaaaggtgtattacaatcgtctgccgctcagcgcaccctttaccatcgaatgcgcatcaccaacgaacgagctaaacaacgccgtgaacgtttactccgcgttttaaacatactgggattcttgcccgaacatttccgtcaacagattgattttgaaaagcacttcggacaattcaagaatcacagcgaaccgctgatagcctattgccctgatgcgacgggcaagaaggaatttctctttcgtcaatccttcgaagaaatgctgaacgaattccgtcaggttcatcccgagctcgttgcagaaggcaagaagataccctatgactggaccctctactacctgcgcaagaaggccttgactcaacctgtcagtcgggaagaacttgcctggattctcctaagtttcaacgcaaagcgaggctattaccaactccgcggcatgagtgatgagctgcaaacagccgacgaccaaaaacaattttgcgtactgacagtcatgcaggtaaatcagggcaaagaggtcaaagccggctcacagacctacgagtatcatatcgtctatgacaatggcaaggaggaaaccaaaaaaggcaaacaggctccctacccaattggccatcagtttgaagccatctgtacgaccaagaccaacaaagacggcactacgaccttcagcaccagcactcccgacccagaagactggacactggtcaagaagaagacggaacacgacatcaagttgagcggtaaaacagtgggtgcctacatctatgacgaaatactcgcccaaccttccgttaaggtacgcggcaaattaatccataccatcgatcgcagcttctaccgcaacgagatggaacagatactccgtgctcaaaccgccttccataaggaattgcgtgacgatgtcctcttgcgccgctgtgccaatgaattgtaccgccgtcctgagcgtcaacctcgcatcgaacaactggtgaaacagggattcctccatctgttggtagacgacgtattgttctaccaacgtccactgaaaagcaagaagagcgaaatcgctgactgtccgttcgaacaataccactatgtcaatcgctccacaggcgaatgtgttgacgaacccgtcaaatgtattccgaagtcacatcctctctttcaagaataccgtctgtggcaattcatccataacctccgcatctatcagaaagaagccgaggtcaacggccgcatggtacttaactacgatgtgaccgaccacttcctgcccaaccacgaagtgcgttgccagcttttcgactacctcaacgaacgtgctgacgtgaaggaatctgtcctgttaaagttcaagcccttcggtttaagcaagaaggccgaccttgaacgctatcgctggaactatcccagtgagaatacctatccctgtaacaagacactctacaccattccgaaggactaccgccgctattttaaccaaaagctttggcacattctctattccgtcagcgaccccgaacaaatagtcaaagccttgcgcagctttgctacagagcatcagattcccgatactgacgcttttgtagcatcactaacttcagtcgtcttctccgaaaaggactatggttccttctccgaaaaagccttgaagaagctccttcccttgatgcgttgcggtagccgttggcaatcatccgccatcgatgaagccacccaagaacgtattcagcacttcctgcacaagccgtcccacgaagatatctctgacagcgtacgtaaggcgttagccaactgccactgcatcgaagatttccaaggtctacccgtctaccaagcctgctatgccgtatacggccgacactctgaagccgccgacctcacagcgtggaagtcacctgacgaactcgcctacttcctgcgctacaccttcaagcaacactccctgcgcaatcctgtagtagaacgcatcgtgctggaaaccctccgcatcgtcgaagacctttggcgcaaatatggcaagatggacgaaatccatgtcgaaatggggcgcaacctgaagcaaaatgccgaaggacgtaagcgcgattacgaccgcaatcaggagaatcaagctgccaattaccgtgcccgccgattgctacaagagtttgcccgttacgaaaccgacattgagaacctccgtccacactctccctatcagcaagacctcttccgactctacgaagaagaagtcctgggcaattatgccgacgaagtaaagaaggacaaacaaattgccaagaccattcagagcttagggcgtccactcgaagcctgcaaggtcaccgccagtgaagtacatcgctaccgcctttggttagaccaaaagtgtaagtctccttacacggggcaacccatctctcttgcccgcctctttacccgcgattatgagatagaacacgtcattcccaaaacgcgttactacaatgactcgatgaacaacaaggtcatctgcgaagcggaagtcaacaaggacaaaggcaacatgacgggatacgaatacatcctgcaacgtggcggaagcatcgtacagggcgctttcggcaagaccttcactatcttgaaacgcgaggaatacgaagactacattaacctccacttcaagcacaatcgtgccaagaaagccaacctcttgatggaggatgtgcctgcagagttctccgaacgcatgctcaacgatacccgctacatgagccgcgtcgtgctttccctgctctccaaggtggtgcgcgatgacgacgaagtttcctccgtttcgaagcatgtactcccgaccaatggcagcatcacgacgcgcctcaagtcagactggggcatcaacgatgtgtggaacgacctcattgctccccgtttccagcgcatgaacgaacggatgcacaccgatgccttcggcgagatgcgcaatgagtcgggcaagcgtttcttccagccacgcctcccgctcgacattcctcagatagacaagaaacgcattgaccaccgccaccacgccatggatgccatcgtgattgcctgcaccacccgcaaccacatcacctacctcaactccgtttcctctcacgacggttacaatgcgacccgcatcgacctacgcactaagctctgcctcaagcaccacaccgatgccaacggcaactaccagtggctcttcaagaagccttgggacagctttacacaggacgttcgcgccgcactctcgaacatcgtggtcagcttcaagcaaaatctgcgtgtactgacttccagcaaaaagggtggttcgtctatacgcaagccgctccacaaggaaacgttctcgggcaaagttcttctacaacaagtaaagaccatcagcctgaaagatgcacttgccgactggcatcagattaaggacaaaaccttgcgccaggaaataaagcgtttgcttgcagaagtctatcctgcgggcaatgtcagtcaactgatcaaacacttcaagttacaaaagaacctcttcaacggtaaagacatccgcaaggttgaggtctacacctacagccaaggtgaagaaacccaagtagctaaccgcaagttgctggacaagacactgacgctgaagcagatttagtcgattaccgacagcggcatccgcaagattctcatgcgtcacttagccaactatcaagacgctgctggcaaataccgtaccgaagaggccttctctcccgaaggactggctgaaatgaacgctcatatccgtgaactgaacgacggcaaaccgcatcagccggtttacaaggctcgtttttcggaaatcctagggcaaaagtttgctgtaggccagaacagtgccaaggccaagcagtttgtagaagcagccaagggaaccaaccttttctttgccatctatgccaacgaagacggaaagcgttcttacgaaacgattccgttgcaggatgtcatagcccgacgaaagcgaaaggaagaggtggcaccaagtgtcaacgaacatggtgaacgtctgctcttcaccttatctccaggtgatttggtttacctgcctaccgaagaaggtgtagtaccacaggtgttggataaaaagcgaatttacaaggtggtgtcttttagcaaatgccggtgcttctttgttccgcagtcgttttcaactactctttacgacaaatgtgaatggggcagcatgaataagatagagttgactgacaacaaggaaaacatcaaagccctttgcgtcaagctcaaagtcaaccgcttaggtgaaatcatagaaatcatcgacggacaatgattaagaagaccctatactttggcaatcctgcctacctgtcactgagcaacggtcagttggtggtcaagatgcccgaagtggaaaacgccaaggaagtgtcggacctcatccgcaaggagagcgtccgcacccttccaatcgaggatttgggcgtagtgatactcgaccacaaacagattaccattacccaagcggccattgccaccctgctcgaccatcaagtagccctgattacctgcaacgaacggagtatgcccacagggttgctcctaccgttgcaaggcaataccctctacagcgagcgattccgctcacagattgacgcctccctgcccctcaagaagcaactctggcaacagaccatccgcgccaagattgaaaaccaagcctacgtattacaggaacaaacacacgaagttcccaagcgccttctccgcttggcacaagaggtcaagagcggcgattcggacaattgcgaagcacaagctgccgtacattactggaaatacgtctttcctgacatccccgacttcctgcgcgaccgcgaaggagcggctcccaatgctttgctcaactatggttacgccattctccgcgctgtcatcgcgcgggcattggtgggtagcgggctgcttcccgttgcaggcattcatcatcacaaccgctacaacgcctattgcctggccgacgacatcatggagccttatcgtccctttgttgacaaattggtcattgccacgatgcgcaaaatggaagtgaccgacacgctcaccaccgaactcaagcgcgagatgctaatcattcccgtgctcgatgtgcgcatacagggacgacgcagtccactgatgattgcagcgggacaaactaccgccagcctggccaaatgctttgctggagaaagccggaaaatactttaccccacttttgaataatatgctcaaccgattaaacgaataccgtgttatgtggataatagtcctgttcgaccttcccaccgatacgaaggagcatcgccgcgatgctgcccgtttccgtaaggacgtgatgggagatggttttacgatgtttcaatactctgtgtatgtgcgccaatgcgccagtatggatcatgcgaaagtgcatatcaatcgcgtcagaagcatgatgcccgtccatggcagaatttctgtattctgcattacagacaaacaatatgctgaaacccttgtcttctacaatcgggaaaagaaggaagcaaccgattctacaacttatcagcaattggaaatgttctaaaattagaaatgggatttctcggtatagaccaagaaatcccattgattttatcattcattttttatttctaaaacaacaacagaattcctgaatatcaatactttcagagaatcctgttgttgattaccttgcgaaggtagaaatgtttcagctaatcacaacgaaaccttcgttcatcataaccgacgagaagttgttgattaccttgcgaaggtagaaatgtttcagctaatcacaactccccaatgggtataattactcgcgacatagttgttgattaccttgcgaaggtagaaatgtttcagctaatcacaaccgacgtgaaagttgttcgaaatctttcccggttgttgattaccttgcgaaggtagaaatgtttcagctaatcacaacaaaaatgcttatttgtatcgtattttgttgttgttgattaccttgcgaaggtagaaatgtttcagctaatcacaacttccacgtgtagtcagcaaacgtcatgctggttgttgattaccttgcgaaggtagaaatgtttcagctaatcacaacgtttcatcgggagtttatgtaatattattcatatatttgcactggctcttgagcgtaaagggcgttaatgacgccctcgcctattggatttttcctctgaggcaacgttcaagagcctttttttgtttctactttacaagacttgttgttgattaccttgagaaggtaaaaatctttcagctaatcacaacatcgtatcacatacaccgggtgcacatcgggatgagccttacgcaggcgatcgcggtactccttaaggctgcagtggaaggttttctgatagtgacgggtcagaccgaagcgggagctgtagagggagcgacgggcgatttcttcgacagtgagatcggaataaagcatgaggtgggcgaccatctcgtgacaataggtttccttgaattcctgccaacgaagaccggtgagggtgaagagcaaaccggagaggtcttcggtaagcaggcctttctcggtgcaatagtcgaagagggtgatgccaccgtcagccatgcgacgcaaaaattcgtcgagcaaatggatgcccgtaggattttcattacgctctatggggatgtagacttcgttgccttgacggtcgtactctcggcgatgggtgaaaggggagatgattaaatctttgacttgatactgtggttctacacggagaacggtgtgcttaccgcgcgtgttttcatttcttcttttactaggcataagggattggatgatagaggggaatgcggagcggtgcgaacccatcgcttagatgcggaaaaagagaaggggacgcgaagaaaggggatgaaaagggtgcgaagagaagagagaagaaagttacttctgcttgggccgcgaccgtacaactgctgcaaccgtactgcagcggaatttatactgctgctgtgacttatacaactaccacgccccgattacttccgcacagcttcattccacagccgcacattcaccgtttgacttcacaaaggtatcttcttttcgttagaaactaagagtttcagcgagcaaatgtgttctcgtcgagctgaaggccacattttagcgcaaaaatgtgtcctcgtcgttgaagaatacacattgtatgccttacaatgtggcctcgtaggctacgagaacacattgacaagcacgctatgtgtattcctcaacgacgaggacaccttgcaaagattacaaaaggacgaggaggcgggagcaaaggcttcgtcagcacaacagccgcgcccatcgcctttaccactacacgacttcgatgaccgacgacccgttgcccggctgcttacgcaggcgaatctgcggagagatttgcgaacgaatctggtcggtatggctgatgacaccaactttgcgtccctgggcattctccagattggagagtgcccccatcacgaggtcgagcgactcgcgatcgagattgccaaagccttcgtcgataaagagggagccgatggccaggccggtacccgagaaggaggccagtcccaaggccaacgcgaggctgacgacgaaggtctcaccacccgagagggaattgacaaagcgtttttcatcgaagaggtcgcggtcaatgacttcaaggaagagggagttgggacgctgtgccaattcgtaacgaggcgatatctgacgcaggtggtagttcgcatgttccacaaggcaggcaaaggtgacacattgtgctgccgtacggaacttcttgccatcggccgaaccaagcaattcgttgaggcgttgccactctgtctggtctgccttggcgcggttgagcgtttcgacaaactgtgccgcttcctgcacacagcgttcgtgtgccatgagtcgcgactgcgattcgcccaagcggcggttgacttcgttcaacttcacgcgctcttcttcccgacgtgtctgaagcatggccaaagcctcttcgccaacttccttcggacgaagtgggtcggcctggaggacgcaaagcacatcgcgtgcctgagtgaggcgggtctgtgcctgcatcaggttttggcgcaaggcgtcgagctgttgacgcaatgccttccaatcctgtgttgaagcaaagagctgttcgagttcggcaaactgaacgggcggatgcgaaccgttgaagcggaggataagcaagtcgagttgctgttgtttctcctgcaactgctgttgtgccttgacacgtcctttctccaggttttcgcgcttaccctcaagtgctttgagccgtccctgatgttcctcgcaaagtttacgcagttcggcttcgacgcgccgtgtctgcaggacggcttccttgagtggcgccgcttccttttgaggtgaacttccgccaaagagctggcgcatctcctccttcatcgcctcgaggcgttcgtgaagggcggtacggttttcgcgcaactcttccaacgagcgggttgcctcttccagatgagcggccgctcccttgatttcctcacagagcaactctgaagcccgctgtttctcctccagcgtgcggcacgtctggttccagtcttcgcagagatcgcgaaggcgcatacgcaggccgtcggcattgttcttccactccgtaaaccatcccgacacggtaatcatgccgtcgaggtcgatatagagttgcgaacacgtgcggtcggacaggcgaatggcctgctgcaactcctcggaagcagctaccagcacctgaatttcggtgcgcagtttgtcaaacgccgtgcggttgttgagcatcgctgtgtcgaggttctcaatttgttcattgagctcgttgatgtggcgctggtggtagttataggtgtcgagttccttctcggcctcttcagctacccggatggtattgtccttgagcaactgaatcatcttggcacgcgcctcacgattggccgtttcggaacaatcctggaaggagttgtcgaggtaagcataagtctgccactcctcgacatcagcctgttggcgacgctccatattctgcagttcgcgggcggcggtacggatgcgggcatcgtcggcggcgatgtcttcgcgcaaggcggccagcgtattgcgcttttgcgccaaagcctcttgtgccgctacatattccttgttgaggttggtcagcaagttgcccaactgacgctccgtctctgtgtgataaggatggtgggtcgccccacacacgggacaggcactgccctccttgagctgtttgcgcaactcgacaatgttctcactctgactcaacgtgtaggccgtcgcaatgcggttgtatgcctcttctgccgcatcgcgctcgatttccaaacgctctgcctgctgacgcttctgtgccaactcggtctcttcgcgtttctgaatggcacgtccttcagacaacgaagtgtaaccctccgagatgtggttccacaacacggcggcacgcttgagcgcgtccatgcggttgcgcgtttcggtcacagcgcgttgcaactttgccgagtcgagtccctggatggtctgtttgtgaatcatcaggttactcttgagcgcgctcatcttcgccagattctggtcttgctcgtgcttcaccttctcgcactgttcctccagccccattttgcgccgttgggagtcgtgccacttggcgtggctctcgacgttgcgcgcggtttcggttgagagcaaagagagcttgtccttcacgaggtcgaacttgtcgaacatgcggctgtgtactgagagcgactgctggtgaaactgcttctgcgtgatttcctgacgggctgcctccagggactgttgcttggttgtcaggtccttctgtcgtttacgcaacacctcgtcggcctgcttaatctgggcatcggcgcggcgaagctgttcctcgaacacgcgcatctcgccttcgagcgcatggccgcgattgatggcggcggcacgttgttcctgctgtttttcagcctcagcggtccgttcctcagccgcactcaactcctggcgcttggtatcgagcgtttggcgcacctgttccaggtcggtttgggtctgcgcctcgtcgttgcgcatccgttcacgatcctcgcgacgcatgataatctcctgaaagaggggttgcatactgagcaaggagtcgtaacgttcgagccgttgctcgtcggcacgcgtttcactgcaagccttggttgcggcggcaaacttggcttcttcttcgctgacgcgctgggtagcctgacggtaacggtcggcccattcgagctgccgcatgaggcgttccagttcgcgctgggtctgttcacccgtagcggctaagacccgacgacgctcttcctcttctgccaaagcctggggttcaagacggttgagcaacatgccttccatgcggtgttccatgccgctgaccacctcgtcggcctgcttcgacagctcatagatttgcttggagatggctccgtagacctccgttccggtcagcttctcgagcaaggtggccttgtcagccgactttgccttgaggaagttggcaaaactgttttgcgccaggatgacggtgcgggtaaactgctcgtaggtcagccccacggcctcgatgatggcatcctgaagttcggctttatcgaatgtatgtttctgcggactgagccgtacgaaggaacgttcgacgggtttgatggtgcccgtgcgggctacccgaatgctccacttggcttcgtagcgtgttccgtcgtgggtcgagaagatgaccatcgccttgccctcctttttgccccggcggagtacgcccgccacgttggtggtctgtatttgttgggctttcgactcagcctgtttgagttcttcggccgagattttctcggcatcatcaaaccgaggtgcgcggttgtaaagtgccagacagatggcatcgagcaaggtagacttgcccgaacccgtatcgcccgttatggcaaaaagtccggcggaacgcagaggctctgccgtgaagtctatcacctgctcgccttcgagcgccgtgagattttcgagaatgatcttttcgattttcattgtctgtgctattcggtgagggactgtgcggcttcttcggcctggcgaaaacgttgcaccaattcctcggacatcgggttattgtattttgcctcaaaaatgcgttgggccaaatccaacggcgcaagcggacggtaggcggtttcgctaccactctccttgccccaggcacttggttcgtgagtcttctcctcgggacgcaagcgtaccatgcggcagaagtgaacggcgcggtcggccagcaactgcatgacttcgtgcatgagtccaggttcgggttgggtctcacgcagacggatttcgagataaggccaattgtcgacctctgtatcgttccactcggacggacgttcgggcaacagggatatggctgctttcacttcggagggagtcgcaccctgtccttgctgtccgctgatgacttgcagacggcgcaagggcgtatagggtaaggtacgcacctcggccactccactttcgtcaagcgtcagacacttgacgccgtgctggtaatgctgttcggaaaaggacatgggcaaagcactgccggcgtaccatacgtgggttccgccttttacttgctgagcccggtgaatatgccctaaggcggtatagcacactttatcgccgatgacggaagcgtcgacacagtcttgcccaccaatgactaaccgctcggaatgctctgactcacagacttcagctcctgcggcatagaaatgggcggcagcaagcaacgggagtttcttgaaatcgctcttgcggaaacgctgttgcatctgggtaaaataataacgaagtccttcggcgggtgtttgacctgccggatagtcgcctccccgcaggtaaggtagcgccatgcagacgcagactgcctcggagctattgcgcgtggccaacggtaacagatagtggtcgaaatcgggggttccgtccttgccctctacctcacggataaggccgcgcacatagatattgtgcgtcttgagcagggcggcaggtgcctccaagcggctggcactgtcgtggttgccggcaatcaagatgatttgcaatccgggcatttcctctgttgcctcgtgcaggaagtcgtacagcaattcttcggcactggcagagggattgggcgaatcgaagatgtcgcctgccacaatcagcgcatcagcctgttcggctttgagcatactcaagagccagcgcaagaaatggcggtgttcgcccaaacggtgatgcccatgaaagacattaccgagatgccagtcggcggtatgtatgattttcattgcttgctattattttttgacgcgcaaagttacggcaaagtccgtttcggtgttgcggcctcatcgggttttgtcgcaatctacccgagaggaaaaagagaactacggaagaaacggaaagaacggaaaaagggaattccgtaagttccgggagttccgtggtcggaaaaagagaaccacggaagacacggaaaggaacatcaagctataaaatccgcgtttccccttttcaaagagattcaaaaacactcaatagatacacagagccttatagaaagaacctaaagtgagttcgggcttttactaacaaaatcttatctgtaattttgtcgccgtcaaaccattattccaaacaagatcatgacagaaccgaaacaatcctggattgaagccggctacgttaacgagccgcttccgaaagacatagacctgaagcaagccattaaagacttgtgcaaggagaagaatgccactatcctcgcgcattactacacgaatagtgacgtgcaggacattgcccacttcgtaggcgacagtctggcactcgccgatcaggctaaaaatctgcagtcggacattgtcatcatgtgtggcgtacacttcatggctgaaacggtcaatgtattggctggcgaccgcctggtgttactccctgaccttaacgcgacctgctcactcgccgaaagctgtccacccgaggaatttgcagccttcaaagcacaacatcccgaccataaagttatcagttacgtcaatacctctgcccaaatcaaggcaatgagcgatgtgctcgtaacgtcaagcaatgcccgcaagatcgtagaatcctaccccaaggatcaggaactgatattcggtcccgaccgcaacttgggcggctaccttaactctgtaacgggacgcgatatggtgctttggcagggggcttgccacgtacaccaacgcttctcggtcgacaagctcatccaactcaaggaaatctatcccgaagccaaagttcttgttcaccccgaatgtaatggtgcggtggtgaagttggctgactgtgtcggttcgaccgccgccttgcttaactatgccatccagtcggatgcaaccactttcctcgtagctaccgaaagcggcattctgcaccagatgcagaagcaatgcagcggcaaggcctttattcccgttccgcccgaggaggcttcttgcggttgcaacaa

SEQ ID NO: 3226 - DNA, 23483 bp, synthetic construct
  misc_feature 1..23483: note = Synthetic
  source 1..23483: mol_type = other DNA
ccgcagagcagatgaattgatgcgtaaagtattcagttacggcgaacagtttagtatggacagtttgcaatatgtgagcgatgtatatttgcgccacgtgatgcacaccaaacgcaacggcccgattgtacgttacattccgggcatgttgcgtttggagcgtgggcacaatgattacctgtccgaggcccatttaaaattacagtatcgcgcccccggtcaaattgattgtaaagtcatagcctttcacacaactgccaaataccagagcgagcaacgctttcactcgttaggacgttttaattttcaaatctacgagtcgaaattgtttcttgatggcatcttgaatcccctacacaagcgcaacagacgtttttatcgttacacttacgtttttataagcaagctcaacgactccgttcctccgacagcccgcatcaatataaccccccgtttcaccaacgaccagttagtaacaggttttattgatatggatttatcaagcggagctgtgcggaatttcacctttcagtttcgttatcagttacgtcagataaccgtcaatgcccgaatgggcaccgatggttgtcagagcatactgcctaaccgtttgcgtatagtatctaagttcaagttgttgggcaataaggtaaacgaagttatggaaatacattcagcccataacttcacttgtccggtcaacacccagttcagcaaacagtcaaagtacgacttaacacagttgtgcctgttacgcattgataccacacgtgtaatcaataatttcgattactttgccaaatatcgtaagtttccgctacgtaaagccgaagaaaatattgtacagctttataagcaaaagcacgaatcacaaaccgactccatagctttgcagcaagcagacgaagccctatcgaatgcatcggaagttgacagtcaaacctcagaaaccgacgattttgatttagcatccgatggcctcgaagatgctttggaattaaaggacgacaaacaagacaatcgccatccgaaaagatggtttggcgaacgcacccaaactttgttgctttcatccaatcatttcaagttgagcgatcattcccgcattaaattgccccccatcatcaccccttcgatggtagggtggagccgtacgaaaggattttcgctcaaagctcgtgcacgttgggatttgttcactcatttctcaaccacattgccacgtatggagtttactcccagtataggttacagtttcaagcaaaagcaaatctattgggaagttcccttattagtacgttttagtcatcgttacgacggaatcttcagtttcaatgcaggaggtggtgcccacatgtacaacagccgtcaagccgatgaactgcgtcacaaactcgaaggcattgaaaaatacgattccttgcttcacatcatcgaccattatggttttcacgactatcgcgatgcccacatacaaaccgatgccagtttcagtttgcttcccggactaaggttcactttaggaggccgctatcatcggcgaggtttgatagagtggaacgaacttgccgaagcttctggcatgaaaaagcatttttcaagtctcggaccgcgcgtacaaattgagtggactccagcccagtattattattgtgaaggcaaacgtcgtcttcctttgtactcaaattatccaaccttgctgttcagctacgaacggggctatgccttaggtcgtggccaaacccattatgaacgcttcgaaggcgatttgcgttatcgtttgtcgctttacgccatgcgtactctgtttttcagaatgggcggtggagtgtatacccagcgcggcaacgactgtttcctagactacgactatttcaagttcagctatatgcctgcccaatggaacgacgacatgacgggcgagtttcagcttctcaactcccgttggtataatgagtcgcgctactatgtgcgtttcaccggaacctacgaaagtcccatgttgctgttttcgcgcttgccatatttgtcgaaagtcgtgcaaaaggaaagagtctatttgaacctactcagtgtcaaggcacttaatttttacagcgaaataggctatggtttcagcaccaatatcgtcgatttaggagccttcatcggctttgcgcccgaccacagcatcgacttcggttgcaaagttgtgctcaagttcttcgaagattagccaaccgttttcagcctatgagcagacgcgttgtcgcaaaatagtcaggtaatgctatgccatctcccatgtcggtaggcataggtttcagacaggccttcctgtcctactttctgttgtcacaaaatgtcaaagaacgctgaatgaatacataagaatctgttgttttttcatccgtcaaggctgaggtgtagcccgctgttgctgatgcaaagatacaacatgaacaccccgaaatccaaattttttcgccacttaatctcgcacctcgattttttcaaaacgcgaaaaacgctcattaacccctttaaacacgggccttccggcgcgttcaaccgacgtgcaaaaaagtgaaatagggatatactttttcagtccgtttagtatgcaaaatcaaacgaactactgtagtatatgcagcccggttaccgaacaatagataatgaagtcgtctaaacttttctgacgaagatttgatttggagatttatctcttctaaattcaatcttcacctttctttttggccgttttttttgacctttcatcagtcgtgtagctcgctacactccttcctcaagacccaaaaacgcctcaaaaattaaggcaaatcttgaatttcataaaagttcagccgacttcaatagcaaaagcccactctcaagcaatgatttgcactattcattgccgagagtgggctttttaaatgttcatcttaagtcagaaaggaaaggattactttatcatcttttgtccgttgatgatgttaatacctttatgaggaacaggcagttgacggcccgacaaatcgtaaatagaatccttcacgataggattcttagcagttacttggccgatacccgtaggacccggattgatatccaaaggattttggtcaataccttcaaacacaaataccgatgaagccggcatattgatggtcagttccttatcgatgtcgatagcttcgcccatcttcaaaccattcagcacaggctgatctttgaaagaactggtccaaataacctgcgtgctgacatattcaggaatgtcaagagccttacgcagcgtaattttgatggtttgtgccgaagcactcgggtttctaagagccagcgtagcctttttgccgttccacgaagcccaaccatagatgttagccttggcaccatcccacggattaccgccaacccagtgaatatcgggcagtacatcctcgttacgcttttgccagtcaatacattcagccaagtcagcccacagcttaccaccattgatttcgtccatgagcttaaagtcgttgtacagttccaccatacccgaaccacaagcaaaggcacaacgcatttcgcgcacaatacccttgtaatccatcgacttcgacacctggccgaacttcgtcagaatgaatccgtgagtcatgatggtgttgatggggcagagcggagaattctgtacaaagttttggtaaaccaagcggtcgcggtacgtaatccagcgttcgcggtcatcgccctgattaccgattacgctccagtcgttctcctgacgccaaacagcatccgagaagtggaaccagaaaggcgaagcccatgtgcccactgtcgtgttgaagaaaatgtcagccttctttttacgcacttcgcgttccaaagaaatgataccctcagcattttcaatgcccgtatcgccagcgtccggccccaaggcactccattgtgcgctgatgccgtcaaacttaaagaagcggaagtcatacttgtcaatcatcgacgtacaagccttcatgaacgtgtcgtagtaatccttgttactcagctgcatgccgcccttatccttccagtaattccggcggtacgtaccactctggccgtagccacccaccgggccaagccaggcaccctgtccggcacccattagtcgtcccgttttgtcggcagcgctgaatccgttagggaagttcttgttgaaagtccacgttccgtaatgatcccagccatcgtcccaaacaaaagcaaccggagctttgccgtaaggtttatagaatttttcataccaatggttcaccacctcggcacactgctcctcagtcatattctttgaataatcctcagagttgttgcggtcaatgttcagttcgtaccacgaaatgtacaccggcatggcacgccagggcacagcacgttcgcgttcgctgtaagccaggaacgaacggcgcgactgacccggagctatcaagcccactacagagctgacgttccacgtcgtaccgcccttgagcgtcgtgttgcggcgccagtaaccctccatcggcgattccgtcggagccggcagatgaatggtatcaggagcagccgtcataaccgaagtaatcgtaccgttcgacgtgttagcctcgttcttcatcgacaccaggtagcgcagcgtaaactgtccgttgtaaggcagtttcacctgatacgtattgtcagccttttggcttcccgtaaatccgaagtgataatcataggcaatgggtgccccgtcctgcagcaagtcaacacccacaatctgcaagcggttattgccgtttttgtaaaggaattccgtgttcagcaccgccttgtttgcctggatgttaaccggctgttcgtgtttgtaaatgtactgagcctcgtgtcccatttcaaggatacgcgccggcacacctttattattagccttagtccagaagttgggcgtccattcctcggtgcgtgcctcatcttccacaaaggtgtaaccctccttcacatcagccgccttgacagccggcaccagtttcgtagcaggaatagctttactttgtttcgaagcctcagtcatcaggtcgtacaccaccaccggcgtaccgataggtttgctaaacgtgatgctaccgttgctttcaatcgtttgcgaagccgtttcaacaaagtaacgaatcaggtaagtacccttttccggaatgttcagtgtaaacacattgttctccgtctttccacccgtgtagccaaaatgataatcatgagccaccacctcgtcggtttgtgcctttatcacgtccacacccaccaactgcaagcggtgtgcgccacctttatattggaacgtaacggtttgttcgcccgcctcgcggaaggtaacatagccctgtgccgccttaatgtcctcaggcgtaaggtcaaagtacttgccaccgtcttcaacgcgaattttcagaatgtcggccggcgtatccgtacccggagaaaagttgaacgactccgtagtccaactcttcggcgtaaagttttcgatgcccgcattttccgttttgatagcgttcacacccattggtgtttcgagtccggcaaatattttatcgcttgccagcaccgcaccacgcgtattacccaccaccgcaggcgcactgccggcagcaatgttgtccacagtgtaaatcatcggcgtaaccgactgcatagcctggtcgttcttagccgtgatgttcaagtccgtgcgcaaatagtgcgaaccgtcgcgcagaacggctctccattcaatcgtcaggttatctttcgaaaaaacagccttgatagccttacctgcaaagcgttccgaaccctttgcagcagcaatgttggcattcagttcttcagtgtcgacgctttccaacttcatgtccgaagcattcagagccgtaccattgcccaaaatcaccttaaacagttcactgcccggtttcagattcatggccttacagccgttgaacagcaatttgccatcggccgtacggataaacgaagcactgagcaaatcgtttttcaaaacgtattcttcgccgttcacttcaaccaaggcaatgccggcttgttgttgctgcggaaagattacagcttgcgccatggcttttggggtacccagtaaacacaccaccatgcaggtgcttgcgagtaacttgtggtaatttttattcatgatagatttaaaaatgtgttgtatgttgtggttgttagattcaagtttggaaaaaaagccatttctgcaaatagcaagtttttcaaatgtttcatttatggattttccaataagtattgcaaaaatacgtaattaaaatgactcaccctctctatttttaatatttgttatgaataaaaagcgttgtttgtacatcaaaaaggggttgcatgcgctaactcagattgtttgcctgtactgaaatgaatattttttagaaagcatacgtgtaatcagtttgtttttcgctacctttgtcctatttgaatgcagatgttatctgtacaattttttaaaatgaaataggaaacaatgatacgaagtatattattcgatttagacggaaccctgctcgatacgttagacgatttggccaacagcgtgaattatgctttgcgcacacaccaccttcccgaacgaagccatacagaaatacgcagtttcttgggcaatggcatacgcaatttgatgctcgatgccgtagggcgcggcatgagcgacgaagcattcgaacctgtgtttcaaaccttccgtacctactacgtggagcattgtctcgataaatctaaaccatttgccggaatcattgatttgctcaaagccttgcaacaacgcggcatcacgatggctgtggtgtcaaataaattacatcccgcagttgttgaactcaacgaacgttttttcaaggattacatcacttcggctgtgggcgaaagtgccacggttcggcgcaaacccaaccccgacgccgtacttgccgccctcagcgaattgggatgcagcaaagatgaggccgtatatgtgggcgactccgaagtcgacttgcacacagcccaaaatgccggcatgcagtgtatgctggtgttgtggggttttcgcgacgaagactttttgcgtagcctgcctggtgcttccctctttgcccaatgtccggcagacattctttcatggctcgatacacaatgctgatgaacagattatggcttaaccttttgctgcccctttgcctatggctgtgctcccagcccgttcgagcgcagaaaggaaatgctgctcagaatcgtccccgtgtaggccttgtgctgagcggcggtggagccaaaggtgcggcccacattggtgtgatacgcgcagtcgaacaagccggcattcccatcgactacatagcaggcaccagtatgggagccatagttggcggcctctatgccatgggctacaccaccgacgaattggaacaactcgtgaaaatgcaggattgggaaatgctcctgtccgacaaatcgccccgcaagcagctctcgcccgaacagcgcgaacgcaagggacgttacatcctgaatatccccctttcacgaagtgccaaacccaaaatggatggttttgtgcgcggacgcaatttgggcaatatgttggcccggctcacagtgggctatcacgacagcatcagtttcgacagcctgcacataccctttgcctgcgtggctaccaacctggccaatggtgatgaagtggtgctgcgcagtggcaaactctcagccgccatacgcgccagtatggccattcccggagtttttactcccgtagtgatggagggcaaaacattggtcgacggcggattgtgcaacaactttccagtcgatgtggcccgacgcatgggtgccgacatcgtcataggctccaccgtgcagcgcgtgttcaacgacaccatgcagcaaggaggcatacaaagcgtggtgcagcagctcatcagcatttcgagccgacgaaaattcgaagaaaacatacagctttgcaacctgcacataggcgtgaaccccaagggcgtgtcgaccatggacttcagtcccgaaaagttagacaccatgattcgccgtggctacgaaacagcccgtcaacatcaacgcacccttcagcaaatagcccttgccacaggcgtacattttccttacgcccccaagctgcgttttcccggtcaaacgcccggtgcttcttccgtccggcttcctgccgatacattgtgcagcccccactcggcagccttggcatcggccttgcctaaacttcaaggcagccacccctcccggccaacaggttgccaaagaggcatgcagtccgattttcaagtagccagcatagccttcgaccacatcacccccgccgaggaacgcatcatacgcaaggcctgcaaacttgccgaacactcgcgcatcacgcagcagcagattgaacatgccgtaaccctgctcaacgaacgctttctgtatctcgacgcccattattcgctcatcgaagccgagcaaggctaccatctgctgtttcatgcccacgaacgtttggcaagcgaattaggcgtagccgcccgtttcgataccgaggaactggccgccattctgctcagtgccaattttgtgttccgcacccacgtgcccaccaccatcgacctcgccgcccggctcaccgagcaatatgccgtgcgcggatcgctcaccgttgaaccctggctgaacaagcagttcaacgtgttctacgagtttcgccatcgcgacatcgacgtcaatcacaaaggccgtcgcgccagcagcctagtgtttcagcagcagcaagccggtttggcctacgcctatcggcaaacgcgcaatttcgatgcagaattaggactaaagtttcagcgtttcgatttcaacgacgtactgatgaacgacgaaggcaccctcgcagcctttcccgatccggtcagcgacaattacttcacaggctacgtacgtttgaactacaattcgcaagacaaggccgacaatcccaccgtaggttccaagtttgtagcaacctacacgtttaccaccgacaatttgacgtgcctgaaacgcccccatgccttttccaccgtgtcagccacgtggcaaaccgttatggcccttggcaagcgatttgcccttttgccccgtttctccggccgcttggtattaggtaagaaagtcccctttatttttcgcaatgccgtcggcggtcatcttgaaggcaagtacctcgaacagcagttaccctttgtcgggttaagccacttcgaactcttccgcaacgcccttgtgtcgtgcgacgtaaagttccgctatcatttcctcacgcgccattacgccacccttttaggagccgtactggccgagcagcgcgacgttcgtcacctgaaaaaagcccactacgcctacggcataggtctgcattacggttacgaaaccaagttcggccccgtacaagccgccctcagctattcgggcgaatgtcgcaaacccaccttctacatgagcgtaggcttcgacttttagccctccttcgttcgtcccctaattccccaacgtgtgattcagccagcatgaatcacacgttttttttatccgcattttcagcctcgaaaaattgtgacgttctactggattgtaaatttaaaaaggtagaagtatttctgttttaagccaaaaaaaccgacaacaagaaaacttgctgccggttgaaactgtaccacaacggaataatccttattgtgattagctgaattacttgcaaagttagaacttttttttgttttgccaaataagaatcggtttttttgctaattttgtgatgcgaacataacggaatggttttttgttttgataaaaagtaacctattagttttgcattgcatacagaaccaatagattttaaggtaatcaactatgccaagcagtgattcgcggcattcgatgagttcttgttttttgattcttgcgaataacaattatacatatatatatcatgaaaaattcagcacatattttagggcttgacttaggcaccaatagcgttggctgggcattgctcaacgccaatcagtttcgcattgcaggtaacggcagtcgcatcattcccatgacgggcgatgtgatgaccgattttgccaagggaaaattgcaatcggccgcttcgcagcgaacggcttttcgcaatgtgcgtaaaaacattgagcgcgtaaagcagcgtcgttaccgactgctgcaggtactgcacatattgggttttttaccccagcattttagtcaacaaattgactttgtcaatcatcgcggacatttcattgatgaagctgaaccgctgttgccttaccgttgcgatgcaagcggacggcacacttttattttcgaggaatcattccgcgaaatgttggccgattttgcaatacatcagccacaactcgtggcagacggtcgcaaggtgccccacgactggaccctgttctatctgcgcaaaaaagccctgacgcagccggttagccgcgaggaactggcttggattattctcaatttcaacgcaaaacgaggttactaccagcttcgtggaatgggcgaaagcgaggaaaaggacgatggaaccgtatttgcacgtattcaggtagcggctgtcgaagctatgggaccatcgaaacgccgcaggggacaaaccatttattgcatccgttttgacaacggctgcgaactgaaccgtgaatcagaatgcccgccatttgccgtaggcgaccaagtggatgtgctttgtaccactaaaaccgataagaacggacagcccaaactcaatgaacaagggaaacctcaggtggtggtcagcattccggatgccgacgattggacgttccgtaaaaagaagtcggaatgcgacattgaactcagtcagtgcaccgtgggtgcttacatttacaatcacttgcttgccgaacccgacgacaaaattcgcggacactacattcacaccattgaacgcaaattctatcgcagcgaacttgagcagattttgcacaaacagcaggagtttattcctgaacttactgacaaagatttgctccagaaatgcgcccttgcgctttacaccacgcccgaacgagctgctcagcatattacaaagggcggtttaaccgattttattgtgcgcgacatcctgttctatcagcgtccgctcaaaagccaaaagaaactcattgctaactgtccttacgaacgttaccgccatgttgattatgcaacaggcgaattggtggagcatcgcatcaagtgtgtgccgaagtcgcatccgctttttcaggagtttcgtttgtggcagtttatcagccagttgcgcatttaccaacgcgaagctcaggttggcgaacgccttgtgcccgattacgacgtaaccgaccgcttgctgcccgatgctgaaagtcgtgcgcagctgttcgaccatttgtttgccaaaaaagaatttagccaaaaggatttgctcgggttcaaaccctttaaactttcggtggagcagcgcaagggttttcgttggaattatcctgaggaaaagacctatccggccaaccggacgctgatgagcatacccaaggagtatcgcgattgctttgacgaaaaactgtggcacttgctttattccgtaaccgaccccgaagaaatcgtgaaagccctgaaccgttttgcccgtgagcgtggcatttccgatgccgatgcctttgtcgaagcacttcgtaaggtagtgtttgccgaaacaggttatggagcctattcgctcaaggctttgaagcatttgttaccgcttatgcgttgcggtcatcactggaagtccgatgcattcgatgcttttacgctgcaccgtttggaactgttgcaaacagaacccaacagtttttcggaaacggctcgtaagcagtgtgcgggtattaccggtgtggctgtttgtcaaggacttccgctgcacaaggcttgctatttgctttacggacgctatgccgagagtgacgacctgacggtgtggcataagcccgaggacatcgactattacttgcgccatgtgttcaaacagcattcgctccgtaacccggtggtcgaaggggtggttaccgaaacccttcgtgtggtgcgcgacatttggaaaacctatggccgcatcgacgaaattcatattgaaatggggcgcgacctcaagcagaacagtgaggaacgaaagcagacgttcgaccgtaattctgaaaacgaacgtgccaattaccgtgctcgccgtttgttgcaggaatttgccaaacccgaattcgacgttgagaacgtgcgaccctattcgcccttgcagttggaggttttcagtatttttgaatcgaccattttgaacgatgctgccaatagcgaggaaaaactgcaatataaggatgtcattaacgatttggggttagcctcgaaggccgataaggttagtcatagcgacatactgcgttatcgcttgtggctcgaacagaaatatcgttcaccttataccggcatgtttattcccttgagcaaactttttacaccggcctacgaagtggagcatgtgttacccaaggctcgttactacgacgattccatgcgcaacaaggtgatttgcgaaaaggaagtgaacaaactcaaggacaagatgacaggctatgagtttatcattcgcaggggtggcgaagtggtgaagggtgcatttggtcagacgtttactttgcttacgagagaggcgtacgaagcgtttgttaaaacgcattatgccaagttgccgggaaaaatgaaaattctgttgatggaggacataccgcaggatttcaacaatcggatgctcaatgacacacgctacattagccgactgattatgaccttgctttcaaaggttgttggcaaagtgcgcttacagcagcaactgaaggaactgaatttgggtaagccgcacaaacctatatataaggtgcgtgtgtccgaaccattaggattgaaatttgcagtgggtaaacgcggttgccgaaaggcgcagttcgttgaaaccgaaaaaggtacgaatttgttctttgccatttatcaaaagccgaatggcgatcgaaatttccaaactgtttcgcttcgcgaggctgttgccaatctggtcgaactgcatcagccggctgccgaaaccttggctgatggtagtaaattgctctttgtcgtttctccgggcgacttggtgtatgttccggccgaaggcgaggtgcctgaaattgacaaactgaatcggaagcaaatatttaaaatggtttcgtgtacggaaaatcgtatttttttcttaccgcaaacagtcgcttcgccgatttatccaggtacagagttcggttccttgaataaagtggaaaaaaatgacgagggggtaacgattaagacacgttgcttaaagttggttgtcgatcgtttgggacaaatcacaaatatcattggcttatgataaagaaaaccctctactttggcaatcctgcttacttgtcgttgagtaaaagtcagttggtggttaggatgcccgaggtggagcaggctgagcatttggccgaaagtattcggcaggaaagtgtgcgcaccatcccgatagaagatatcggggtggtagtgctcgaccatcggcaaatcactttgacacaaggactgatggcagccttgctcaacaaccaaacagcggtgataacctgcgacgaccgacgcatgccagccgggctgctgcttccgctcgaaggcaatacgttgcagaatgaacgtttcagaagtcagattgaagcctctgttccgctcaaaaagcaactatggcagcagaccgtggtggctaaaattgagaatcaggcgtacgtgcttgaaaagcaacttaacgaaccggctgcacgtatgcactatttggccgataccgtgaaaagtggcgataccacgaactgcgaggcgcaagcagcagcttactattggcagcacttgtttcccgacattccgggctttacgcgcggacgcgaggggccaccgcccaatcagttgctgaactatggttatgccattttgcgtgctgtggtggctcgtgcattggtggcaagcggattgctgcctgtggcgggcatacaccaccacaaccgttacaatgcttactgcctggccgacgacattatggagccttatcgtccctttgtcgatgcactggttatcgaaaccatccggcgttttggtttgacagccgaactgactacagcgttaaaacgcgaaatgctggcagttccggtgctcgatgtgtatatgcagggaaaacggagtccgctgatggtggctgtagcacaaactactgccagtttggccaaatgttatcgtgctgaatatcgcaaaatatgctatcccacctggggctgattcagtgtctgacactgttcattgttttcttatttcatgccgtattttctgtatgattgaacgtctcaatgcctatcgggttatgtggatactcgttttttttgatttaccaaccgagactaaagagaatcgtcgggatgcagctgtttttcggaacgatttgctgaacgatggttttacgatgtttcaatattctgtttatcttcgtcattgtgccagtatggaaaatgcgcaggtacacatgaaacgggtagagcagaaagtgcctcctgaaggtaatgtcagtattctttgtatcaccgacaaacagtttggtgatatcaaggtttttcgtgctcaaaaaaagaaagaccctcctgctcattatcagcagttggaactcttctaaaaaaagaatcggaattctgagtaaaatacagaattccgattctttttaataggcatttttttatttctatttttgaatgtaaatgcctcataatcaacaacttatacgatactctgttgttgttgaccctgtaaaggtagtaaaaattcagctaatcacaacatccatttggatttctgcgtcttcaaggttgttgttgttgaccctgtaaaggtagtaaaaattcagctaatcacaactgttgtaaacaatagaaataacgttgcaaagttgttgttgaccctgtaaaggtagtaaaaattcagctaatcacaacctaatttatcagcacctattgtacctccatgttgttgttgaccctgtaaaggtagtaaaaattcagctaatcacaaccctcttgctacagaatagaaaaagtgacagttgttgttgaccctgtaaaggtagtaaaaattcagctaatcacaacatacggtcgcgcatatcagcagaacaataagttgttgttgaccctgtaaaggtagtaaaaattcagctaatcacaacaggctgcatcacgtcttgcaagtgtttcgtgttgttgttgaccctgtaaaggtagtaaaaattcagctaatcacaacttgtcggttactattttaaagcatcaaagggttgttgttgaccctgtaaaggtagtaaaaattcagctaatcacaacgccttttgaagagcttcgcaagcacggagagttgttgttgaccctgtaaaggtagtaaaaattcagctaatcacaacgtgattttcacgttacatttggccgcacatgttgttgttgaccctgtaaaggtagtaaaaattcagctaatcacaacactggaaaaaaatagctcatgagttatgtagttgttgttgaccctgtaaaggtagtaaaaattcagctaatcacaaccgacacaagcaataactacaaatccgcggagttgttgttgaccttgtaaaggtggtaaaaatttagctaatcacaacggtaacaatcttatcaagttccaccaagtgttgttgttgaccttgtaaaggtaataaaaattcagctaatcacaacaactacgttacttgcagtcctctacttccagttgttgttgaccctgtaaaggtagtaaaaatatgggcctgtgttgaatagagtcagtattggttattataaatatcaaccgtgacttttgacatccgcctcgacctaatcctcaaagtacaaccttcaatcactttggattggaaagtagttcacagcttattgcgcacaggacggatttaatagataggtgaataaacgtaaaaaacagaagtttgcctttcgattcatttcaaggcgaaatgagtgtgcctgaaaccgattctggggattttttgaaagcgctgattatcaatagttccgagattgttgaaactagctcggaactaatttgaattagctcggaactaatttcaacaatcgcggaactaattcggacaatcgcggcgtaatttttgacgatagctcagcgcgtagttcaaacaacgacaagcagatggaaaaacgagctgactattttaatataaattcacctacttagcagcttaatgtttaacatttacggcaaagggaactgtgaggcctggaatattagccatagaaaacgttacagaatcggaaacttcgaactcgtgtttgagaggggagtgttgaggctgtgattacttggcaggtggcagttcgggctgatagctggggcacagcgcactgaggccacagtggtcgcacttgggtttgcgggctgtacaggtgtagcggccgtgaagcagaagccagtagtgggaagcggctacttgattttcgggaatgtattttcgtaaagccatttctacgctgtagggggtggtgcaacgcttgggaaccaaacctaaacggtggctgacgcggaatacgtgggtgtcgacggctaaggcggctttgccaaaggcgacggcttgaatgacattggccgttttgcgacctacaccggggaggcgcgttaacgcttcgagggtggagggtacttcgccgttgaattccttgactaacatttggctgagcccgacaaggtgtttggccttgttgttggggtagctgacggacttgatgtattcgtaaattacttcaggcgtggtggcggccatgacttcgggggtgggaaagtcggcaaagaggcggggggttacggcgttgatgcgcttgtcggtgcattgggctgagagtaccacggctatgagcagttcgtaggggttggtgtagttcagctcggtttcggtgtcgtccatggtgctgcctaggtaggccagtacgttctgaaatagttctttacgtttcataatgttagcttttgcatagggtgtagccgcaggctgtgcatccgatgcctcctattaccgaaagcagggcgtaggatagggctgtgagccacatgccttgtcggagaagttggaatgtttcgttcgaaaaggtggagaaggtggtgaagcctccgcagaagccggtgacgaggagccaataggggccttcgctttgccggcgggacaaaaggccgatgaacaggccgatgagcagacaaccggagaggttgacggctaaggtgggccagggaaatgaggcgtctgtgcctttgagccaacaggcactcacaatgtagcggcacagactgcctaaaccgcctccgatgaaaatgaggagaaaggggaggaacatacagaaaaaaaggaatgagaaaagggcgtttgccggcctgaaaaagcgtgacgacggcttattcggcctttaatgcttgcaggcggctgatgtatttgcccagtatgtcgaattcaagattgacttgcgttcctacctgtatgtggtggaagttggtgtgttcgtaggtgaaggggatgatgcacactttgaatgagttggccgtgggttcgcatacggtgaggcttacgccattgaccgtgacggagcctttatcgacggtgaaatatccgcgttcgaccattgaacgtgaggtttcgtaggtaaaggtgtagatgtagcttcctgctgcgtcggtaatgtcggtgcaggtggcggtttggtcaacgtggccttgtacgatgtgtccgtccaaacggccgttcatcatcatggagcgctcaacgtttacttcgtcgccaactttgagcagaccgaggttggaacgctgcagggtttcgttcatggcggttacgacgtagcggttgccgtcgattttgaccacggtgaggcatacgccgttgtgggcaacgctttggtcaattttgagttcatggccaaaatcgcattccaaggtgaagtgtttgttgtctttatcttgctgaatggcaactacgcgtgccattgattctacaattcctgaaaacataatgtgtgaggaggtaatgaagtcgtttaaacttttctgacgaatatttgatttggagatttatctcttctaaattcaatcttcacctttctttttggccgttttttgacctttcatcagtcgtgtagctcgctacactccttcttcaaggctcaaaaacgcctcaaaaattaaggcaaatcttgaatttcataaaagtccagacgacttcaataagtgggtgttcttaatcaaaaaaaggaagtaggtgattgactttcaagaatcggaacacctgcttcggaaaaaaacagaatatgtgatgctcttgggtatgtgtttacttaaccttgaactctttgttgcttagtttctcgatggttacggtgtcgcccttgagaatgagtttgccattgctgatgcgatagtctttggtgtggcgttcgagctgcgaaaggttgatgagtacgccaatggccttgttgttatcgcgggtggtgagtgcatagcgttcgccttctttcaggtcgccataaattttaccatcggtaccatcgtcggccgtgcgggttacatagagtgtgtcgcctttgtcggagatgagtgtgaaggtgctcatgccgaattcgtcggatgtgccgtagatggttgaatcgttttctacgtggtcggttagagcagtatctgcagccaggctgtcggggtcgctggtggcgtcaacgggttttttgccaccctgacaggctgagagcacgatgagcgcagtaagtgcgcctatccataaatttttcatacttgagattgttatttaacttccaaaccgttgcgggcgaaaaaacgtgtgtttcccctacaaactgttggcattgaaagcctgattatgagagggcgaagttactaattttttaaagataagtaggtgttgtcatttattttatatggcttcgctaattatttttacattgaattgcgttttaagtaggtgttcataattatttttacatttgaatggtgtgattgtgccgtagctgcttgttctgcactcaggagcatagcgggctatgtgactgagtgcagggcaggcagaaatggtgcaagcacactatgcaaagtaaaaatacttcgatagaattatataaataattttgaacacttacttatgcttcaaataatgggttgaaacttcgtatcctgacgtttgagaacggttcggggttaccgcaatgtgaagcctttgtgtgaaaatgaagattgcattttctaaataaaagtagtaaaaataaattcttttttagctcatctgctgtataagtgtgtaatttatgcgtttggaaggcaacgttactgcgtttttgcttactgcataaagcatttctggtgtttaataaatataaaaatttaattattgttcgaatttgcacatggaatcggttcgttgtgcatgtttattgtacttttgccgaagaaaataccaataaatacgagaaatgcgaaaatctttacttactgtatcgctcattttgggcacagttgcatcggctcacgctggtggatttttaacgaatacaaaccaaagtgtggttttcctgcgcaatccggcacgcgatgccagcattgccattgatgcagcttatgcaaaccctgccggtatcggttttatgaacaccggttggcatttgggctttgatattcagagtgcttatcagtcgcgtaaggctacctcaatattcccgaactttagtttgggaacagtgaatggtgtgcagaatccggcaacgggcgaaaaggtatttgaaggtaaggctgtggctcctgttattccttcgattgatttggcccgcgtaggcgagaagtggtttgcttcattccacttcggcatcagcggcggtggcggtaaatgtaagttcgacgacggtttgggttcgtttgaaagccaggtagccatgattccgactttgattggtgccattgctcccggtgctgtgaaaggatacagcatgactacttatatgcaaggccgtcagtattactttggcggacagtttggtgtaggttacaaaattacgcctaactttaatgtaagtgtgggcggccgtgtgctttatgccgactgtaactactatggttatgtgcgcaatatcggtgtcgtaacggctaccggacacacagttcctgccgtcgacttcttcaagagccagaatatgcctcactttgctcccctcgttgaggataaggaactgaactgcgaccagacaggatggggatttacgccgattatcagtgctaactaccgcatcaataatttgaacctctcggctcgttatgagttcaagacacgtatgcgactgaaaaaccatgccggtgtgaataccagcggtttgtctgaatatgacgatggtaaaaaggtggcttgcgacgtgccggctatcttgtcgttgggtgccatgtacacgattgatgataaactgcgtctgtcgggtggtttccactatttcttcgacaaacaggctacgcagtatgaaaacaaagaaaaacacctggatggaggtacttgggaagtgttggccggtgcagaatacgacatcaataagcgttggcgcgtgagtgccggatggcaaaccacgcattatggtttgggcgacgacagcaagtatctgactgatatgagctttgtgacaagttcaaactcagtaggtgtgggtgcacgtttccagctgcgtaagaaggtggctatcaatattgcttatttcaagacgttctacaagcactataaaaagacgatggctgattacgacgacttgaagcataagtttggttcgcagcttgctccgctgcaggctcaacttcagggtggtatcggacagtgcgatcaaattattaacaacccgatggctactgaagaacaaaaggctgctgccgaacagaataagggcattttgcaaggtgaacttggtgcgcttggtgccatcagcagcggattgggcaagttcagtactgctggttcagacaatttccaccgtacgaacgacgttttcggcttaggcttggaaattgatttctaaaaatagtttccattctttggaatactgtatggggtaaaagaccggattttcttccactctgtgtgaagaatttctggccttttttgtgtataagcaagtgttttcaagctcgttttcaagagcttagagctacatccttgaataaaaaggtatcgcgtcagttggctgaaatcagtggatcattgtttggagccgatgggctgggggaggtgttcgccttgcatgccacaatgatgcttcgcacttcggcattttgcatacggggcacatcgctgataaggcagcccgcattggccgcgatgatgcagcggcagaaaagtccgtgaccgatgcaaagcacatgttgattggggaaggtttggctgacatattcaagaaactgacgggcgcgttcgaacagttgctctacggtttcagcgtcagcaggcagggatacctggtgtgcttcggcaatggtatgtcccgtcaggctgccccagtctcgttcgcgaagcagagggcagagcatgggctggaggtgaaaagcctcgttgacgatttgcgtggtgtcgatggtgcgctgaaggtcgcttgtgagcagcgcatcgaatgaaacgcccgattgcaccagtgtgttgcgcagctgaatcgcctggttgcgtccgcgttcagtaaggtgacccggaagatgcccctgaagaatttgcgccacgttttcttcggtttcgccgtggcgggctaagtatagtgtggtagtcatggttaggatgggcttatattagtaagtaggtgttcaaaattattttatataattctatcgaagtatttttactttgcttcgcgaagtcaggctgcacctcagcatagctcatgcaagcaagcttgcctcgctctgcattcggtttgcactgacattgaatcacgttcttgcaccgcatctgcctgccctgcactcagtcacatagcccgctatgctcctgagtgcagaacaagcagctacggcacaataacgcaattcaaatgtaaaaataattatgaacacctacttataaagaaaacaggagctaaggtagcaaaaaaaataagtggtggcatagaggggctcaaagtaaacggatttgcagacagaaatagcggcagaataagcatgaaaagaacggaaaatgcaaatctatcctttatttttgaggaagaaaatacaattctggaaaagaaaaatgaacaaatacttttgcaaagcgtacgtttgcagtaaatttgcaacgcctaaccgtttgtttgtattagaacagatgaaagtgtaggcattaaacgcaaaatcatttcattcatccctagtatgagtaaccttcgttttaaagtcgttgaagaggcatttaaaaaacgcccgcttgaggtgaaaacaccctcagaacgcccatcaagctactttggcaagtatgtgttcaatcaggaaaaaatgtttaagtacctgacccgtgaaacttactatcagctgcgcgaagtaattgaaaagggctctcccttacccttggcagtagcaaatgatgtggccaaaggtatgaagcaatgggccatggaaatgggtgtgacacactgcacacactggtttcaaccgctgaccgaaggtaccgcagaaaagcatgacgctttcgtagaacacgatatgaaaggaggcatggttgaggatttttcgggtaaggaactcgtgcagcaggaacccgatgcttcatcgttccctaatggaggtatccgttctacgttcgaagcacgtggctattcggcgtgggatcctgcgtcgcctgtgtttattgtaggcgatacgctgatgattcctaccgtgtttgttagttacacgggtgaagcactcgactacaaggcacctttgaaaaaagcattggctgccgtagataaagctgctacggcagtgtgccagtatttttatccggaagttacccgcgtaacggctaacttgggatgggaacaggagtatttcctcgtagatgaaggcctttatgccgctcgtcccgacttgctgcttaccggccgtacgcttatgggacatgattcggccaaaaaccaacagatggacgaccattactttggcgccattcctgaacgtgtggctgaatttatgcgcgatcttgaaattcaagcccttgaattgggtattccttgcaagacgcttcataacgaagtggctcctaaccagtttgagttggctccgattttcgaagaatgcaatctggc

SEQ ID NO: 3227 - DNA, 21749 bp, synthetic construct
  source 1..21749: mol_type = other DNA
  misc_feature 1..21749: note = Synthetic
acttgcatgtgttaagcctgtagctagcgttcatcctgagccaggatcaaactcttcattgtaatataatgttttgtttgttttctgtttgtttgcccaggttcctgtctattgaataggaattgacaaaagacttattttaattacccaagcaccttattgctaagtgtgcgttgttttggtctcttgtacttctctacaaatgttttatgtaattctttcaaagatcgattgcttaagcggtaagcggcgtatgccgtagttccgtttagcgagtgcaaaagtacagcaagatttcattcccaccaaatgttttcgcgaaaaaattctgggagattcttgggaaatctcctgaaaaatgtgcgttaaccgttggatatcaacaaagataacgcagtgaaaaatttttcgcccgtgggagagatttttgcgcgggctatttgcacttgccgacaaatgtagagacttcatgtgaatggacagtgaagggaaatgagaaattacggggttttatgctgaagagcagaagatggaaggggatttatagcgaaaaaggggcatttgatcaaccaagaaaggtcaacttatggaatacacccatcaatagttaagtagatgttgagaattagtttataagctggtgtggtcatttagtgatgcataaacattgcggattgtatgtgcaagcaattagactgaatgagatggaagcatgttctacacttacttctattatatatagagtaagggtgagtcagctggccgaaccttcctgacaagcccagagaaaactttcggtatgctgccgaaacacgaaaacaaaaagattttagaccttcggctattggccgaatgttccaaaccaaatgggtgaacagcgtcggcactgtgccgaacctgcccacccacttctctatatacatacggtcgatagccgaacaatcccaataagcagaaggagatatgacggccttttgccgaactctttatatgctgcggactacttcttatggctttgtgccgaccttatactcccatcacgatggcaacctgcggcatactgccgaacaactcaaacatttttatttttgaggaacggcatagagccgaagcattcctacaaagaaggctgctggcttcggcaggacaccaattgttttaagtgaccgtgtatctccattacggcaacccatcaacttatctgatccagctggcaatcgccattcggcaatcaaccaaaaaatttcgcattgaattgtgtcgaacttccctcccctatgcctaactttgcaaataaagtcgaaatgaactaaagagagaaggcggaaggatgcctcgtctcaaaaagaacaactggcaaagcccgagagaaaaccgaagcgaaaaacacgcacaggcacaaccactcccatgggtacaaaaactattcttacccaaaaaggcggaaactaacaggttgatacgtgcctctctctacacgcctattctatatttatccattaaatcaccggcagccaatcaaactgccctctatacttcaaactttatggaacaaattcaaacgattaccttacgcgcactggaaaacgacaagcacttcagcttaatggacagcggtatcagactcttcaccgcaattgaaattgacaatgaaccgtttcaagcctacctcaaggcttggcaagaagcttttcaagcggaagatgaagtcatgtacctgctccgcaaaagtctggaactggaaaatgcacaaatccaacatgaccttcgctgcaactgcctgacggctcttttgggtatcgtccgacaccatgcccgctgcatattgtcgaaatcgtacacgcaggccaaacgactttatgctcacttgaaggaagtccgcctcaacaagaaggtgggcttggacaagatgtcgagttccattcaccatatcctggaaatactgaacctggatgaattcaaacctttgattcctactctaggtttgcaagacatctatgagtctttgaaaacctcacacgaggcggtcatcgagtggcagcaacgccgcgatgaggtcgatgtgaccaaacagttaggcaaaggggctctgtttcatgcccgccagcgtacggacgaagcctacaagcagtttatagcctgtgtaaaggctatgtttatcatgttcccgaaggacaccacggctttggctgaagccgtgagtcaatggaacacgaccctgacacgctatcgtcatgcacagaaaatcaaacggggactggcggttacacagaagaaaacggaaggtgccaaggaggaagcagtgaatcaagttgttgaaaatcaagaaacaacgagaacagaacaaatgcactcaactgatgatctacatgtaacttgtcagttaactccggatttacaatcagaaactctttcgacacaatccactgataaagagtcacccactgatgtacattacgtatgtataaaccccgaaggggtgacagcgacttagcccaagggagaagcgaaaccgaagcgatactttttaaagaccgtgatcgtttacctagggttccgcttcgctacaccctaggctaagtccctatcacccctccggggttctcatctgcgcgcactgattttcaaagagggttcgatactttttaaagaccgacatcacttacctagggttccgctttgctccaccctaggctaagtccctatcacccctccggggttctcatctgcacgttgactatcaagaagaggacgtgagtccgaccttatgctatatcaaaccattcaagccctgtacgagcgacactcctacgttgttaaaagggtaaagtgtcgcccatacagggcttgaatatatgggtatagaaagagtttacgtagataggggtcacaccctatcctctgttatgccgccctttccgggctggtcacctctcgtggagcgcttacttttggaaacgcttggctttgccacgaacaccgcgtttgttcttcttggccttcttgttattcttcttctcggtagccaagtgttcgcggaaggtgggttcggctaccgaaccgttgccatcgtcgaccaaagcgaagtcgagctgacggcgttcgaggttggcacgttccacacggatgcgcactttgtcgcccaagccataacgcttgcggtaacggcggcctacgaggcagaagttgcgttcgtcgaattcataatagtcgtcgagcaacatacgcagggggatcatgccctcacacttgttttcatcaacttctacgtagagtccgaactctgtcacaccgctgactgaaccttcaaactcctgtccgagacgatcggccataaactctacctgcttgtacttgatgctggcacgttctgccgtagctgccaactgctccatgttcgaagcatgctcgcagagctcttcgtacttggtggcattgaccgaacgtcctccgtcttcgtaacgagtcagcaaacgatgaaccaaggtgtcgggataacgacgaatgggcgaagtgaagtgggtatagtattggaacatcaaaccgtagtgtccaatgttgtgaatgctgtaacgcgccttcatcatggcacgcaaggctacgagttcgacaacctgctcttctttcttgcccttgacatcgtccaacaagcggttcaggctcttcgatacctccgtctttgttccctcggtgcgaatcttgtaaccgaaacgggcaatgaaggcactgagcttctccatcttttcgggatcaggcacgtcgtgaatacggtaggggaatactttgggcttgcgtcccttgggtacgactgccatcttggtcgctacgctcttgttggccaaaagcataaactcttcgaccagtttgttggcatccttggctaccttgacataggtagaaatgggatgtcccttttcgtctacttcgaaacgtacttcgggacggtcgaaaccaatggaaccgttcttgaaacgcttctcacgcaagcactttgccaagcgattgagcaagaggagttcggcggcatattcgccctccggcacggccccttcgggcaagcgttcgggatgttcaccgggctgagcgaggtcttctgccgatgccgcaccgtttcgctcaaagatgtattgcacctcttcgtacgtgaaacggcgattggaacgaatgaccgtgtgggccaaatgccaatcgagcacctcggcgttttcgttcatcttgaagatggctgaataagccagcttctcttcgtcgggacgaagtgaacagatgaagttacagagacgttcggggagcatcgggatggtgcggtctaccaaataaacgctcgttgcacggcgttcggcttccttatcaatgatgtcgccctcctttacataatgggaaacgtcggcaatgtgtacacccacttcccagagtccgttacccaattcgcgtacggacaaggcgtcgtcgaagtccttggcatcgtgcgggtcgatggtaaaggtggttacctcgcggaagtcctcacgacgggctatttcttcgggtgtgataccgggatcgagcttttcagctgcctgttccacccgttcggggtatttatagggcaagccgtactgtgccaggatggcatgcatttcggcttcgttctcgccctgcttacccaaaatgtcgatgactttgccaatggggctcttggagtcagtaggccactctacaatcttgaccaccgccttgtcgccgttttgtcctcccttgagcttatctttgggaataaagatgtcagtagccaacgaacggctttcggtaatcaggaagccataaccctgctcgacctgaagctgtccgacaaaggtatcgttagcccgttcgaggatttcggttacttcggcttcacgggtatgtccggcacggcgggccagcatggtgaccttcacgcggtcgccgtcgagtgcatgaagtgaattgcgctcacagactagaatgctcttgccaccgtcgtcggggacaaaggagttgcgtccgttacgttttcgcacgaaggtaccttccattacattggaacgcaccgcattgcggtaatgaccgttgccatcggtcgaaatatagtcgtccagtacgaggtcggagagtgcatcaagcaccaccatcttcgtgggatgattagccgccttgaacttcacaaagaggtcctttacgtcgaagtccttctctggttcttgattgaacatatcgacgagcatttgcgccaccgccttcttcttcaggcgcgacgcggccttgttcttttcttttctcgccataatcgtatgatttataaagtgattaagctgaagcatagagaagtggaggctgatgatgctcgtccccgacgttaggaaagggggaacagtcggaatgctctgtccaaatcacaagtacattcccttataagcactcgcttgtgctcgcatccgcttcgtctgcgctcagtcacacagcccgtcatccgcttcgactcccatttcttcaaccggcattcgtacagaatgcctcaatggatagagcaaagtaacggctttttaaaacaatgcatgggggttttacaataaaaaacacgggtcaaacgattatcttcctacttttgcccccacttctaccacttcggtctgaaacgtaacagaaaaagaggcgaacggggcattgtgtaccgttcggagttacggctttctatgtgcccctttacccgctacattatccatttctttaaacagtttcccatcgctatgcgttatttccttcttcttctcaccctcaacttgcttcctgtacttggctggagccaaaaagcaggtagcaaaccagactccacgcaggtggaagaaacagaggtgccccttcagacgcaggtgggcgaaacaacgtataaggggcgcactattccacacatcgtttttccaaccttgccgaaatatgcgcccatggagtttaagaacgagaaggagcgcgagcgttacaaccgcctggtctacaatgtcaagaaggtattgccctgggcaaaactgacgaaatacaccatcctcgaaacctacgactacctagagaccttacccgacgagaaggcacgcaaggcacacattaaaaaggtggaagcgggactgaaggaacaatacggtccggcacttaagaagctcactcgctcacagggacgcctcttgctgaagctcatcaaccgcgaatgtaaccaaacgggttactacattgccaaggcctttatcgggcccttcaaggcgaacctctaccagggcatcgctgtgctcttcggcaatagcctcaacaagaaatatgaccccgaaggcgatgaccgctacacggaacgggtggttagaatggtcgaagcgggggtcatttgaagcagtagctaacggcttaacttctcaaagttgggcaggctccctatccacgatataacatccaaaacgactcaagccctgtagggaagacacgcaaccctatccatcacggattgtggtgtgtcacttccctacagggcttgaagcgttcttaaaaacgggtgggaatcatgaagtgaatccctacccctcttcacagagtaagtttgaaatgtcacgacattgaaaagagttcgtaatctgcggtcgatacttttgcagtgtcaaaaagcaatcgcataactatcaaaaacttactcatgacttcaaaactactcctcagcacagctacttgtgccctttcactccatggtctttctgatcttgctgccaatgaagtgcatgctgccgctcatggtttacagacggtcaatgcgggacaaggcatgaccttgcgccaagcgttgccgcagactctggcgaacccccaaacggctcagacgaacgaggaaagcggaaacctacaagtaacgacaacgcactttgaggtggggcaaacggtggaaatcacatacaacaatttacccgcaaaagctaccatcagtgtgtacaagaaccaggcacgcatccccctcaaagagcaactgacgctgacggaaaaagctgagaaaggagtattcaccctaggcgaccagctcgaagcgggtgactacacggtgcgttgcaccaatgcaaagggtgaagacattacgacccccatcctgtttagtgtcagtgctcaggcttggacgaagggtcccaaggatatcttcgtgatgagcgacatccacgtgatgagcccggaattgctgattaaggaaggcagtgcctttgaaaaatacttggccggcgaccgtaagctgttggctgagagtaaagatatattctataccatgattgacaccatcctggcacagaagcctgagttggtgctcatccccggcgacttaacaaaggatggcgaattgcttagccaccagttggttgccgaacaattaaagcgactcaagcaagcgggcatacagacactcgttgtaccgggtaatcacgatgtgaacaatccccacgcttatgtgtttgacggcgaccagacgcgctatgccgaaacggttagccgcgagaagtttgctgaaatctacagcgactttggttatggcaaggatgccaagcgcgacccgcagtcgctcagctatgccgttgaggctctgcccgatgtggtggtggtaggtatcgatgcttgccgttacgaggacaatacctttgtatcacaaggtgcggataaggatgtgtgcgtcacttcgggccgcatcaaacccgaaacgctgcaatggattagccaacaggcgcaggaggcacgcgagaagggcaaacagatgttggctgtcatgcaccacaaccttgtggagcacttcaacggacaggccaccatcgcttcgccctatgtagttgaaaatgcagtcgaagtacgcaaggttttgatggaggcaggcatccgcacggtcttcacaggccacttccacattcaggacattgccaaagactacaacgaaacgaagacggactctatctatgacatctcaacgggttcgaccgtgacttacccttgccccttccgccaagtacgcctcaacgaggacaatacggtgatggagttgcgcggcaaactgctcaagagcgtggaactcaacggccagctcgaagcaaacttcggacactatgcgcaggagaagttggtcagcggtctcgaaccgatggtaggcggtctgatttcggactattgggatatgatccagaaggtggtaagcgacgctacgggtagcctgggtgacctgggagccgccatcaaatttcccgaaacgcccgaggaactgactgccatgctgatggaatgtatcggagaagatgccatcaaggcttacttgaccttctctgaaagtaacgaagacaagaaggcttcggaagtattgcaaaagcgcattgtgaccgacggcatcaacaaattggtcgacaagttggtggggcgcattttaggcgtagtggccaaacccatcgtacacgaaaaggtagaccccatcctcaacaccgtgctcggcagccttttgggcaacgtcacgaacaatggtacggacaaggcgaatgtgaccaacgaccttgacctcagcatcgacatgccgcgcaaggtggttagccaaattgcagacgtagcgaatgcaacggaggctatgcaggtgactccgaccctgacggacggtcccatccgcattctcttgcccgaacttgctcagtcggctcgcctctgtatctacgacctcaacggccgcattctctatacaacggaagtgccggctggtgcgccctctgtactcccctaccgcttccagcaaaagggtgtatacctggtgaagttgattggtcaaggcaatgccgtgaaggtaatcgtggaataaacgaaactaacttacacttccttcgcttgggttcgcttgaagcgaaggaagtgtttcttctgggatgtgtttaaaaacgaataggagataaacgcttaacacagcgatttatctcctattttcgtatgtaaaccagactctcaggccgaacgtacttttactataaaaggtgcacacgttattgtgtgcaccttttatgattagaacattactatttcaatcattcacgaacttcttggactttcctcattacgatagaagccaaaaaaaggacgagtttccccgcccaaagatgttttcacaacggaataatccttattgtgattagctgaacaggggcaaagttaaaatcttttctttaaaaaatcaaatagaacgtagaatatttaactttgcaggcagtaaataagtttgctattaggttgataactctagcatagaatggctcgtaaagcaacaacacctatagcaaagggcgaattcttctgaaaaaacatttttcccttctcttatttaccaatcacacttattgcattaacaatcaacatctctatatcatgaatgccaagcactacattctcggcctagacatgggtacaaacagcatcggatgggccgctattgacgctgaaactcagcaaatcatagcaacgggtagccgtattatcccgatggacgaacgaagtatcaccgatttcgacaaaggtgtattacaatcgtctgccgctcagcgcaccctttaccatcggatgcgcatcaccaacgaacgagctaaacaacgccgtgaacgtttactccgcgttttaaacatactgggattcttgcccgaacatttccgccaacagattgattttgaaaagcacttcggacaattcaagagtcacaacgaaccgctgatagcctattgccctgatgcgacgggcaagaaggaatttctctttcgtcaatccttcgaagaaatgctgaacgaattccgtcaggttcatcccgagctcgttgcagaaggcaagaagataccctatgactggaccctctactacctgcgcaagaaggccttgactcaacctgtcagtcgggaagaactggcctggattctcctaagtttcaacgcaaagcgaggctattaccaactccgcggcatgagtgatgagctgcaaacagccgacgaccaaaaacaattttgcgtactgacagtcatgcaggtaaatcagggcaaagaggtcaaagccggctcacagacctacgagtatcatatcgtctatgacaatggcaaggaggaaaccaaaaaaggcaaacaggctccctacccaattggccatcagtttgaagccatctgtacgaccaagaccaacaaagacggcactacgaccttcagcaccagcactcccgacccagaagactggacactggtcaaaaagaagacggaacacgacatcaagttgagcggtaaaacagtgggtgcctacatctatgacgaaatactcgcccaaccttccgttaaggtacgcggcaaattaatccataccatcgatcgcagcttctaccgcaacgagatggaacagatactccgtgctcaaaccgccttccataaggaattgcgtgacgatgtcctcttgcgccgctgtgccaatgaattgtaccgccgtcctgagcgtcaacctcgcatcgaacaactggtgaaacagggattcctccatctgttggtagacgacgtattgttctaccaacgtccactgaaaagcaagaagagcgaaatcgctgactgtccgttcgaacaataccactatgtcaatcgctccacaggcgaatgtgttgacgaacccgtcaaatgtattccgaagtcacatcctctctttcaagaataccgtctgtggcaattcatccataacctccgcatctatcagaaagaagccgaggtcaacggccgcatggtacttaactacgatgtgaccgaccacttcctgcccaaccacgaagtgcgttgccagcttttcgactacctcaacgaacgtgctgacgtgaaggaatctgtcctgttaaagttcaagcccttcggtttaagcaagaaggccgaccttgaacgctatcgctggaactatcccagtgagaatacctatccctgtaacaagacactctacaccattccgaaggactaccgccgctattttaaccaaaagctttggcacattctctattccgtcagcgaccccgaacaaatagtcaaagccttgcgcagctttgctacagagcatcagattcccgatacagacgcttttgtagcatcactaacttcagtcgtcttctccgaaaaggactatggttccttctccgaaaaagccttgaagaagctccttcccttgatgcgttgcggtagccgttggcaatcatccgccatcgatgaagccacccaagaacgtattcagcacttcctgcacgagccgtcccacgaagatttctctgacagcgtacgtaaggcgttagccaactgccactgcatcgaagatttccaaggtctacccgtctaccaagcctgctatgccgtatacggccgacactctgaagccgccgacctcacagcgtggaagtcacctgacgaactcgcctacttcctgcgctacaccttcaagcaacactccctgcgcaatcctgtagtagaacgcattgtgctggaaaccctccgcatcgtcgaagacctttggcgcaaatatggcaagatggacgaaatccatgtcgaaatggggcgcaacctgaagcagaatgccgaaggacgtaagcgcgattacgaccgcaatcaggagaatcaagctgccaattaccgtgcccgccgattgctacaagagtttgcccgttacgaaaccgacattgagaacctccgtccacactctccctatcagcaagacctcttccgactctacgaagaagaagtcctgggcaattatgccgacgaagtaaagaaggacaaacaaattgccaagaccattcagagcttagggcgtccactcgaagcctgcaagatcaccgccagtgaagtacatcgctaccgcctttggttagaccaaaagtgtaagtctccttacacggggcaacccatctctcttgcccgcctctttacccgcgattatgagatagaacacgtcattcccaaaacgcgttactacaatgactcgatgaacaacaaggtcatctgcgaagcggaagtcaacaaggacaaaggcaacatgacgggatacgaatacatcctgcaacgtggcggaagcatcgtacagggcgctttcggcaagaccttcactatcttgaaacgcgaggaatacgaagactacattaacctccacttcaagcacaatcgtgccaagaaagccaacctcttgatggaggatgtgcctgcagagttctccgaacgcatgctcaacgatacccgctacatgagccgcgtcgtgctttccctgctctccaaggtggtgcgcgatgacgacgaagtttcctccgtttcgaagcatgtactcccgaccaatggcagcatcacgacgcgcctcaagtcagactggggcatcaacgatgtgtggaacgacctcattgctccccgtttccagcgcatgaacgaacggatgcacaccgatgccttcggcgagatgcgcaatgagtcgggcaagcgtttcttccagccacgcctcccgctcgacattcctcagatagacaagaaacgcattgaccaccgccaccacgccatggatgccatcgtgattgcctgcaccacccgcaaccacatcacctacctcaactccgtttcctctcacgacggtgacaatgcgacccgcatcgacctacgcactaagctctgcctcaagcaccacaccgatgccaacggcaactaccagtggctcttcaaaaagccttgggaaagctttacacaggacgttcgcgccgcactctcgaacatcgtggtcagcttcaagcaaaatctgcgtgtactgacttccagcaaaaagggtggttcgtctatacgcaagccgctccacaaggaaacgttctcgggcaaagttcttctacaacaagtaaagaccatcagcctgaaagatgcacttgccgactggcatcagattaaggacaaagccttgcgccaggaaataaagcgtttgcttgcagaagtctatcctgcgggcaatgtcagtcaactgatcaaacacttcaagttacaaaagaacctcttcaacggtaaagacatccgcaaggttgaggtctacacctacagccaaggtgaagaaacccaagtagctaaccgcaagttgctggacaagacactgacgctgaagcagattgagtcgattaccgacagcggcatccgcaagattctcatgcgtcacttggccaactatcaagacgctgctggcaaataccgtaccgaagaggccttctctcccgaaggactggctgaaatgaacgctcatatccgtgaactgaacgacggcaaaccgcatcagccgatttacaaggctcgtttttcggaaatcctagggcaaaagtttgctgtaggccagaacggtgccaaggccaagcagtttgtagaagcagccaagggaaccaaccttttctttgccatctatgccaacgaggacggaaagcgttcttacgaaacaattccgttgcaggatgtcatagcccgacgaaagcgaaaggaagaggtggcaccaagtgtcaacgaacatggtgaacgtctgctcttcaccttatctccaggtgatttggtttacctgcctaccgaagaaggtgtagtaccacaggtgttggataaaaagcgaatttacaaggtggtatcttttagcaaatgccggtgcttctttgttccgcagtcgttttcaaccactctttacgacaaatgtgaatggggcagcatgaataagatagagttgactgacaacaaggaaaacatcaaagccctttgcgtcaagctcaaagtcaaccgcttaggtgaaataatagaaatcatcgacggacaatgattaagaagaccctatactttggcaatcctgcctacctgtcactgagcaacgatcagttggtggtcaagatgcccgaagtggaaaacgccaaggaagtgtcggacctcatccgcaaggagagcgtccgcacccttccaatcgaggatttgggcgtagtgatactcgaccacaaacagattaccataacccaagcggccattgccaccctgctcgaccatcaagtagccctgattacctgcaacgaacggagtatgcccacagggttgctcctaccgttgcaaggcaataccctctacagcgagcgattccgctcacagattgacgcctccctgcccctcaagaagcaactctggcaacagaccatccgcgccaagattgaaaaccaagcctacgtattacaggaacaaacacacgaagttcccaagcgccttctccgcttggcacaagaggtcaagagcggcgattcggacaattgcgaagcacaagctgccgtacattactggaaatacgtctttcctgacatccccaacttcctgcgcgaccgcgaaggagcggctcccaatgctttgctcaactatggttacgccattctccgcgctgtcatcgcgcgggcattggtgggtagcgggctgcttcccgttgcaggcattcatcatcacaaccgctacaacgcctatttcctggccgacgacatcatggagccttatcgtccctttgttgaccaattggtcattgccacgatgcgcaagatggaagtgaccgacacgctcaccaccgaactcaagcgcgaaatgctaatcattcccgtgctcgatgtgcgcatacagggacgacgcagtccactgatgattgcagcgggacaaactaccgccagcctggccaaatgctttgctggagaaagccggaaaatactttaccctacttttgaataatatgctcaaccgattaaacgaataccgtgttatgtggataatagtcctgttcgaccttcccaccgatacgaaggagcatcgccgcgatgctgcccgtttccgtaaggacgtgatgggagatggttttacgatgtttcaatactctgtgtatgtgcgccaatgcgccagtatggatcatgcgaaagtgcatatcaatcgcgtcagaagcatgatgcccgtccatggcagaatttctgtattctgcattacagacaaacaatatgctgaaacccttgtcttctacaatcgagaaaagaaggaagcaaccgattctactacttatcagcaattggaaatgttctaaaattagaaatgggatttctcggtatagaccaagaaatcccattaattttatcgctcattttttatttctaaaacaacaacagaattcctgaatatcaatactttcagagaatcctgttgttgattaccttgcgaaggtagaaatgtttcagctaatcacaacgggtcttaggaattaatagcctcataatcgttgttgattaccttgcgaaggtagaaatgtttcagctaatcacaacttatacacgcccgaattgaggcaccacacagttgttgattaccttgcgaaggtagaaatgtttcagctaatcacaacacatggtccgatgtgctttctaatgaaactgttgttgattaccttgcgaaggtagaaatgtttcagctaatcacaacatgccggcatcgtcttcgtcttcgtcttcgttgttgattaccttgcgaaggtagaaatgtttcagctaatcacaaccgttctggcaaggctcctccgctggagggagttgttgattaccttgcgaaggtagaaatgtttcagctaatcacaacggtaaccgccacctgttcgcccaagggcatgttgttgattaccttgcgaaggtagaaatgtttcagctaatcacaacactaattcatacagacacaaggatattcgcgttgttgattaccttgcgaaggtagaaatgtttcagctaatcacaacgtgtcctaggcctaaaagtcgcctcgcggggttgttgattaccttgcgaaggtagaaatgtttcagctaatcacaaccgactggtgctaaggtactggttcgcaatggttgttgattaccttgcgaaggtagaaatgtttcagctaatcacaacactgctaccgaaccttataaacgtgctaagttgttgattaccttgcgaaggtagaaatgtttcagctaatcacaaccataaaaacgtttttaaaaaaatgaataagttgttgattaccttgcgaaggtagaaatgtttcagctaatcacaaccttttcaaataaaaaacgattatgagacaggttgttgattaccttgcgaaggtagaaatgtttcagctaatcacaaccacaagtacaaacggcgattatcttaccagttgttgattaccttgcgaaggtagaaatgtttcagctaatcacaacctcttcgcggtgtcggcgttcgagctgtggttgttgattaccttgcgaaggtagaaatgtttcagctaatcacaacggttaagaattcccattattcagtagttttgttgttgattaccttgcgaaggtagaaatgtttcagctaatcacaacctgatagtagtcgaatttcgttattgaaagttgttgattaccttgcgaaggtagaaatgtttcagctaatcacaacctcagtaacgcccgcccaataaacagaactgttgttgattaccttgcgaaggtagaaatgtttcagctaatcacaacacaaggacgtaaagtttatacaatacagagttgttgattaccttgcgaaggtagaaatgtttcagctaatcacaactaccggttgtaggcatatcccactacagcggttgttgattaccttgcgaaggtaaaaatctttcagctaatcacaacgtgtcgcccggggtggtgtaggcttcccaggttgttgattaccttgcgaaggtgaaaatctttcagctaatcacaacatcgtatcacatacaccgggcgcacatcgggatgagccttacgcagacgatcgcggtactccttaaggctgcagtggaacgttttctgatagtgacgggtcagaccgaagcgggagctgtagagggagcgacgggcgatttctttgacagtgagatcggaataaagcatgagatgggcgaccatctcgtgacaataggtttccttgaattcctgccaacgaaggccggtgagggtgaagagcaaaccggagaggtcttcggtaagtaggcctttctcagtacaatagtcgaagagggtgatgccaccgtcagccatgcgacgcaaaaattcgtcgagcaaatggatgcccgtaggattttcattacgctctatggggatgtagacttcgttgccttgacggtcgtactctcgacgatgggtgaaaggggagatgattaaatctttgacttgatactgtggttctacacggagaacggtgtgcttaccgcgcgtgttttcatttcttcttttactaggcataaggattggatgatagaggggaatgcggagcggtgcgaacccatcgcttagatgcggaaaaagagaaggggacgcgaagaaaggggatgaaaagggtgcgaagagaagagagaagaaagttacttctgcttgggccgcgaccgtacaactgttgcaaccgtactgcagcggaatttatactgctgctgtgacttatacaactgccacgccccgattacttccgcacagcttcattccacagccgcacattcaccgtttgacttcacaaaggtatcttcttttcgttagaaactaagagtttcagcgagcaaatgtgttctcgtcgagctggaggccacatttttgcgcaaaaatgtgtcctcgtcgttgaagaatacacattgtatgccttacaatgtggcctcgtaggctacgagaacacattgacaagcacgctatgtgtattcctcaacgacgaggacaccttgcaaagattacaaaaggacgaggaggcgggagcaatggcttcgtcagcacaactgccgcgcccatcgcctttaccactacacgacttcaatcaccgacgacccgttgcccggctgcttacgcaggcgaatctgcggagagatttgcgaacgaatctggtcggtatggctgatgacaccaactttgcgtccctgggcattctccagattggagagtgcccccatcacgaggtcgagcgactcgcggtcgagattgccaaagccttcgtcgataaagagggagccgatggccaggccggtacccgagaaggaggccagtcccaaggccaacgcgaggctgacgacgaaggtctcaccacccgagagggaattgacaaagcgtttctcgtcgaagaggtcgcggtcaatgacttcaaggaagagggagttgggacgctgtgccaattcgtagcgaggcgatatctgacgcaggtggtagttcgcatgttccacaaggcaggcaaaggtgacacattgtgctgccgtacggaacttcttgccatcggccgaaccaagcaattcgttgaggcgttgccactctgtctggtctgccttggcgcggttgagcgtttcgacaaactgtgccgcttcctgcacacagcgttcgtgtgccatgagtcgcgactgcgattcgcccaagcgacggttgacttcgttcaacttcacgcgctcttcttcccgacgtgtctgaagcatggccaaagcctcttcgccaacttccttcggacgaagcgggtctgcctggaggacgcaaagcacatcgcgtgcctgagtgaggcgagtctgtgcctgcatcaggttttggcgcaaggcgtcgagctgttgacgcaatgccttccaatcctgtgtcgaagcaaagagctgttcgagttcggcaaactgaacgggcggatgcgaaccgttgaagcggaggataagcaagtcgagttgctgttgtttctcctgcaactgctgttgtgccttgacacgtcctttctccaggttttcgcgcttaccctcgagtgctttgagccgtccctgatgttcctcgcaaagtttacgcagttcggcttcgacgcgccgcgtctgcaggacggcttccttgagtgccgccgcttccttttgaggagaacttccgccaaagagttggcgcatctcctccttcatcgcctcgaggcgttcgtgaagggcggtacggttttcgcgcagctcttccaacgagcgggttgcctcttccagatgagcggccgctcccttgatttcctcacagagcaactctgaagcccgctgtttctcctccagcgtgcggcacgtctggttccagtcttcgcagagatcgcgaaggcgcatacgcaggccgtcggcattgttcttccactccgtaaaccatcccgacacggtaatcatgccgtcgaggtcgatatagagttgcgaacacgtgcggtcggacaggcgaatggcctgctgcaactcttcggaggcagctaccagcacctgaatttcggtgcgcagtttgtcaaacgccgtgcggttgttgagcatcgctgtgtcgaggttctcaatttgttcattgagctcgttgatgtggcgctggtggtagttataggtgtcgagttccttctcggcctcttcagctacccggatggtattgtccttgagcaactgaatcatcttggcacgcgcctcacgattggccgtttcggaacaatcctggaaggagttgtcgaggtaagcataagtctgccactcctcgacatcagcctgttggcgacgctccatattctgcagttcgcgggcggcggtacggatgcgggcatcgtcggcggcgatgtcttcgcgcaaggtggccagcgtattgcgcttttgcgccaaagcctcttgtgccgctacatattccttgttgaggttggtcagcaagttgcccaactgacgctccgtctctgtgtggtaaggatggtgggtcgccccacacacaggacaggcactgccctccttgagctgtttgcgcaactcgacgatgttctcactctgactcaacgtgtaggccgtcgcaatgcggttgtatgcctcttctgccgcatcgcgctcgatttccaaacgctctgcctgctgacgtttctgtgccaactcggtctcttcgcgtttctgaatggcacgtccttcagacaacgaagtgtaaccctccgagatatggttccacaacacggcggcacgcttgagcgcgtccatgcggttgcgcgtttcggtcacagcgcgttgcaactttgccgagtcgagtccctggatggtctgtttgtgaatcatcaggttactcttgagcgcgctcatcttcgccagattctggtcttgctcgtgcttcaccttctcgcactgctcctccagccccattttgcgccgttgggagtcgtgccacttggcgtggctctcgacgttgcgcgcggtttcggttgagagcaaagagagcttgtccttcacgaggtcgaacttgtcgaacatgcggctgtgtactgagagcgactgctggtgaaactgcttttgcgtgatttcctgacgggctgcctccagggactgttgcttggttgtcaggtccttctgtcgtttacgcaacacctcgtcggcctgcttaatctgggcatcggcgcggcgaagctgttcctcgaacacgcgcatctcgccttcgagcgcatggccgcgattgatggcggcggcacgttgttcctgctgtttttcagcctcagcggtccgttcctcagccgcactcaactcctggcgcttggtatcgagcgtttggcgcacctgttccaggtcggtctgggtctgcgcctcgtcgttgcgcatccgttcgcgatcctcgcgacgcatgataatctcctgaaagaggggttgcatactgagcaaggagtcgtaacgttcgagccgttgctcgtcggcacgcgtttcactgcaagccttggttgcggcggcaaacttggcttcttcttcgctgacgcgctgggtagcctgacggtaacggtcggcccattcgagctgccgcatgaggcgttccagttcgcgctgggtctgttcacccgtagcggctaagacccgacgacgctcttcctcttctgccaaagcctggggttcaagacggttgagcaacatgccttccatgcggtgttccatgccgctgaccacctcgtcggcctgcttcgacagctcatagatttgcttggagatggctccgtagacctccgttccggtcagcttctcgagcaaggtggccttgtcagccgactttgccttgaggaagttggcaaaactgttttgcgccaggatgacggtgcgggtaaactgctcgtaggtcagccccacggcctcgatgatggcatcctgaagttcggctttatcgaatgtatgtttctgcggactgagccgtacgaaggaacgttcgacgggtttgatggtgcccgtgcgggctacccgaatgctccacttggcttcgtagcgtgttccgtcgtgggtcgagaagatgaccatcgccttgccctccttcttgccccgacggagtacgcccgccacgttggtggtctgtatttgttgggctttcgactcagcctgtttgagttcttcggccgagattttctcggcatcatcaaaccgaggtgcgcggttgtaaagtgccagacagatggcatcgagcaaggtagacttgcccgaacccgtatcgcccgttatggcaaaaagtccggcggaacgcagaggctctgccgtgaagtctatcacctgctcgccttcgagcgccgtgagattttcgagaatgatcttttcgattttcattgtctgtgctattcggtgagggactgtgcggcttcttcggcctggcgaaaacgttgcaccaattcctcggacatcgggttattgtattttgcctcaaaaatgcgttgggccaaatccaacggcgca

SEQ ID NO: 3228 - DNA, 14661 bp, synthetic construct
  source 1..14661: mol_type = other DNA
  misc_feature 1..14661: note = Synthetic
aaccctggcgcaaagtttcctcgggcttatcgcccccgagagctccaccgatgcgcacatgatcccaggcattggccacgcccaggcagttacatccgatcacatccacaccggcttcctggcagaggaaacgaatgttgcgggagtcggccgtggaaaccttctcggtaatgatgatgatgcgcttgaggtcgtggttgaaattcaccaactcgctcacggcctgactcacggcgctgggcggcaggtagatgacgcccacgtcaaaatggtgtccggccttcatcacttcgcgaacgctgggataaacgggaataccacccagctcggtttccatgatgccttcgcggccatactgaacgccggccaccacgttgccgcgtgagtactcgtgggaaacgggcgtcacctttcggctctcgccgccctggatattgatcacacagacgcgcgaatccttggtcaccatctcttccaatgagtagatgccgacgaagtaggggaagggcttggttttcagctgtctcatgtttcctcctagacgccgaccgctaaggtttcgttgtactgggccattcctgcttcgccccaccactgatcgattttcttcgcgtactcgagagtgagaatcatggatgtgtcgtatccgaagaacttgtagggaagcttgagcgaatcgagaatgtcgcgcccataggccatgccctgcacaagattcggcccgccgcgccccacaaccacgtagatgggcttccatccgttctcggcaatgtgatcgcgcaaggcgtcaaacatgccgcggaaggtcacgtagatgtccgtgttgttggccttgccgccgatgatgagaatggtgttggccgcttccatgtgatgcttaaaagcgatacgggaaatctggtacatcttctcgtagggcgggttgcctccgaagtccgaagagaaaatggcccggtcgcccagggtttcggtggccgcgctgttggcgcctccgccgaacatgaagggcagaatggttcctttgggattcagttcgagcacatcgctctgtccctgataggtgcgcaggcgattgatctccgactcgaagggtgtgatgtccgactggaaaatgcctgaaggcaggccggcgcgtttccaggcgggattgtcctggtcgaaggcggctttgatatcgcatgccatggccacatactttccgccctcgcgcttgatgcgcagcggattgatctcgatggtcgacagaccgtaactctgatagagatcccacagcttgggcagcgactgcaccagggggctgatgaactgcttggggcagttggtgtccttgagcgcattggtgatgtcgaagctcttgagcccgatgaagggatccacccaggtggtcttcattttatcatcgcccagagtttcgatgtccacgccaccgtggggtgacagggtgaagatgggtttgcgctgcaccgtggattcggtgatggagaagtagacttcgatttccgagtccacgaattcctcgaaggtacagccattggccatgacgggccggcttccgtgaagatgctgtgcgaagtagagatcctttttcgccgccagcgcatcgggcagattgtccacgatgcggatcagaccggccttacccttcttgcccacgccttcgtggaaaatgggcttcacgacgatttttccatacttgtccagcaggctttgaatttcgccggctgtggcgccacccgttacgaactccggatgaggaaagtccaccagatccagaagctgcgccccgtatttcaaacctgagagctgcatgtcatctccttgggccgtcgctcttcgcgccctgcgagggcggccgcctcttgtgaaatttgtcacaagaaaggcggaagcccttgggttagcaagcgttaatcggagattttgctagcgacggcttcgattgaagcgcgcctgaaggcggcgggacatttccccccagatttcggtctgagtgggatggggatggatggcccctgacagctgatccagtgtcatttccccggccaccagggccacggcctcgccgatgagggcgtcagcgtgatcggccaaaaggtgggcgcccaggatgcgtccgctctttttttctgccacaagcttgaacatgccatgtttctcgaaattcagccgggctttcacgtccacatccaggggatagcggaactcgccggcgtccaggcctcggttcttggcctgctcgagactgagccccaccgaggccacctgggggcgggtgaagaccacgccaccatccaggtcggcattgtagcgggctgctttgcccagaatattctccgcagccacccggccctggctggatgcggtgtgcgccagcatgaggccaccaataacatcgccaatggcgaaaatgtggggctgattgctgcggcaggagttgtccacacaaatcacaccgttttccgtttccacaccggcggcatcaagtccgagtgcctccagttgaggacgcttgcccgcggccatgagaatccggtccaccgtgaccgactgctcctggccctccacgtcggtgaagctcagagcaacattgcccagctcgccgctgatctgcgtgaccttggcgccacaatgaagattgagattctcctcctcctgcagggccgcctgcaggcccagggccacagcacgctccatttcgggaagaacgcgatccatcatttctaccaggataatctggctgccgaagtgcgcgaagatctgggccaattccaggccgatggccccggcccccacgatggccaggcgttcgggtctatcaggcatatcccagatggtttcgctggtgagcacggcgccgctggccaatccctcacgagcgccgggaatgggcggtacgaaggcgggtgctccggtggcaatgaccgccgccgcgaaacttagctttcgactttctccgccggattcgctgagctcaagctcgtgcttgcctgtgaaagttgcccgcgcctggatgtagtcgatcttggatttcaggtcggtcttgagcgccaattccccccgctcctggagcagtgatttgcggaagctctccagcgaggcccactccagcttggccggacctgtgccctgtacaccaaggtgcgagtctacatgccgatcgtgaagtcggtcggcggccgcgcgccaggttttagaaggtatgcatccccgccagaggcattcgccaccgggcaggggagcgtcatttaccaaggccaccttgagccctgcggccgcaagttctcgggcacagtcctccccaccgggacccgcaccgatcacggcaacctgatagtcccaatcacccttcagcaaatcactggatttctctatagagcccacaggtcaaacctcctagaatgcaccggccagctatccgaccacgtcctggaaagtgggtcaagcgcgggccttcggcaagcccgcagggtgtctttggggatttccaggtatcctaaccgtaaaatccttaagtcgttgatactctggacattagagcaatttctttgctagttaggcgtgacttcagcgagaggaatagaatgccccttacagagatatcatctttcagtgtatccaaactggagatactggacagcgagggcaaggcggatccctccctcgacccagggctttcaaatgatgagctcctgaaactccaccgactcatgtgcctcggccgcgaagccgattcccgaatgcttaaattgcagcgcacgggtcgcttgggaaccttccctccaacagccggacaggaagctgtctccgtggcctcgaccctggccgttcgcaagagcgactggttcacgggcgccttccgggaactccccggccgtttggcccgcggacagtctttcacccagttgctaaaattctgggccgggcatgaagagggcgcggcggtgtccatggacgaccgcaccatcccagacaacatcgtcatcgcctcgcatgtgcctcaggccgtgggtattgcctacgccatgcagctcaagggtgaagacgccgtggtgctcaacttcttcggcgacggtgcaaccagcgaaggcgacttccatgaaggactgaacttcgcatcggtttggaaaagcccggtgatcttcatcatccagaacaatggatgggccatctccacgccgcgtgccaagcagacgaactcggcaaccctggcgcagaaggccatatcctacgacatgcccggaatcatcgtggacgggaacgatgcgctggcggtttacaccgccgtgagcgaagccgccgagcgggcgcgcaagggcgagggccccacgctcatcgaggcgcagacctatcgtatgggtgtgcacaccacggccgacgatcccacccgctatcgcagcgacgaggaagtggcggaatgggcggccaaggatcccattcagcgcttccagcgttatctggaaggcaagggaatctgggacgccgacaaacaggccgcgcttgaggaagagatcaaggccgaggtagccgccagcgtggcggagttcgagggcatggagaagatccggcccgacacccccttcgatcacgtcttcgaaaacagcaacccggaactggatcgccaacgcgagatcttccttgagaacatccgcacggaattccccgaagacctggaaggagtcgccgatgccaaagcttaacatggtccaggcgatcaacctcgccttacatcaggaaatggaagccgatgagaccgtgctcactctgggccaggacatcggcgtgaacggcggcgtgttccgcgtcaccgagggactcagcgaaaagttcggcgagaagcgcgtcatcgatacgcccatcgccgagtcggccatcgtgggtgccgccatcggcatggcccaggcgggcatgcgtcccattggtgaaatgcagttctcgggattctcctactacggattgcagcaggtggaaagccacgccacgcgttggcgttcgcgaactcaaggcaacatgagtattgcaatggttctgcgcatgccctacggcggcggcgttcacgcactggagcatcacagtgaaagccgtgaggccacctacgcccacttcccgggcatgaaggtggtgctaccgtcgggtccgcggaacgcgcgggcgctcatggtggcgtccatccgcgacaatgatccggtcatcttcatggagcccaagcgcagctaccgcgccttcaaggaagaggtgcccgaagagcccgaagtcatcgagatcggcaaggctcaggtggtgaaggaaggcagtgacatcacgctggtggcctggggcgccatgatgcgccagtcgctggatgcggtggagcgcatggagaagaagggcgtgagcgttgagctcatcgacctgctcagcgtggcaccgcttgacagtgacaccatcaacgcgtcggtggccaagaccggtcgctgcgtggtggtgcaggaagctccgcgcagcctgggtatttccagcgagatcatcacgcgcatcaacgatcacacgctcatgtatctcgaagcgccagtcgggcgcgtgaccggtttcgacgtggtcacgcccaacttcgcgcgcgagaaatggtatcttcccacggcgacgcaggtggaacgccagctcgacgcaaccatggcgttttaggggggcggaatgtacgaattcaaacttccggatctgggcgaaggcattcacgagggcgaggtgctcaagtggcacgtctcagccggtgacaccattgccgaagacgatcctctggtggacgtggaaaccgacaaggcggcggtcaccattccttctccggccagcggcaaggttgtttccctcgccggtgatgtgggcgatatcgttcacacaggaagtattattgcggtgatcgatgacggcaaagccgccagcgaccatccaccagcttccagcaaaaaagaagcgccggccgaagatgcggccatgcacgcttccgtggctgcggcggcagaaaaagcggctctggccttcgatgttgatcccaatgcaaaaaaaccgatagacgagcccagcgtggtcagcggcaagcggccagcgatcagcagtcagcgcgtcgccgccgctcccgccgtaagacgattggctcgtgaaaagggaatcgacatcaacaccctcgtgggcacaggcccaggcgggcgaattgtcgcggaagatctcgaccggcccgcggccggcgggcagcggtcagcgaccgtcaccgaattgcccgcagccacgcaggacttcagcggcggatcgtccatcccctatttcgaagtcgaggagcttcccgacttcagcgaatggggtccggttgagatcgaagccgttcggtccattcgccggaaggtggcgcgcaagatgaccagctccatggttatcgcgccgcacgtggcacacatggacgaatgcgacgtaacggggctttcgaatttcctggccgatgaaaaggcgcgcgagggcggcaccggcctcaccttcatggcattcgtcatcaaggctgtggccaacgctctacagcgtttccccgaactcaacgccagtctcgatcctcatcgcgaagcgctcatctacaagaagtattacaaccttggtttcgcggccgatacgccgcgtggcctgctcgtgccggtgatcaagaacgccgatcgcatgggcgtggcggccatctcggatgcggtgcgcgacctggcgggcaaggctcgcgagggaagcatcgaaaccgccgacatgcgcggcggcactttctccatcaccaatatcggtgtgctgggtggcacggggctcatccccaccatcaactaccccgaggcggcgattctgggcatggcccaggtgcgtgagaaagccgtggtgcgcgacggcgagatcgtcattcgcaatatcatgccgatcactctcgcctttgatcatcgcatcaccgacggcgccaacgcggcgcgcttcgtgaacgacgtgatggcccagttggaagatccgattcgaatgagcctgtagggaggcgcgacatggtcatgggacagctcaagcaggaaaccgacctcgttgtcatcggcgcgggccccggcggatacgttgccgcactccgggcggcggaccttggcctcgatgttaccatcatcgagcgcgaagaaaagttgggcggagtttgcctgcgggaaggatgcattccctccaaggccctgatcaacgtggtggaaatcgccgatgccgccaggcatggtgagaagttcggtctcaatgttagcggcgtggagctggatcccgtgaagctgcgtgagtggaccaactccgtggtgaccggcctcaccggtggtattcgcggactgctgaaaaatcgcggtgtggatatcatccagggcagcgcgcgtttcgatggacccaacagtttggctctggagggcgcggaagtttcgggcatccagttcaagcactgcatcattgccacgggatcacgtatcaatgagctcccggctgcttatgacctgcccgtgtggacttccgccgaagcgcttaagattcccgagatacccgaatcgctcttagtggttggaggcggatacatcggcctggaaatgggcatgatctacgcgggtctgggatccaaggtgaccatggtcgagtttttcccgaatcttttgcaaggcgccgacgccgatctggtgcgtgtggtggtgaagagcgccgagcagcgtttcgaaaagattctcaccgattcgaaagtggtgaagctcgagaaggaagatggcatctgcacggccaccatcgaaaccgacggcaaggaaacgcaggtggaaacctcgcaggtgctcgttgcggtaggacgccgtcccaacaccgacaacatcggcctggaaatgacaggcctcaaggtggatgaagaaggacgcatcccaaccgatgaacagtgccgaacagccctgccgcatatctatgccatcggcgacgtggcaccggggcccatgctggcgcacaaggccagccgcgaagccaaggtggccgcagaaaccctggccggacacgatgccgcattcgacaatcgcgccatccccgccgtggtcttcaccgatcccgagctggcatggacgggactcaccgaaagggaagccgaagagcagggcatcgctgtggaaataggacgcttccctctctcagctttaggacgcgctcgcacccttgggcgcaatgaaggtttggccaagattctcagcgatcccgaaacgggacgcgtattgggagtgggcatggtaggccccatggccagcgaactcatcgccgagggcaccttggcgcttgagatgggcgcgacgcttgaggacatcatggtgaccatccatcctcacccgacgctgtccgaggccatcttcgaggcggccgaggctgccgcgggttcggccattcacattagcgcctccaagaaaccctagcatgcttcccgaactgcttccctaccggcgcgatgagctcttgctcgaacgttgccggcgcagcggtcgcgcggaaatcgacatctttcgcccggccggtgcggaagtggtactcggccgtggcagcaaggttgatctggaactcaatgccgactcctgcctggaagacggcgtgaagctacgtagacgtttgggaggaggctgcgcggttgtgctcgacggcggcaatctcgtactcgccgtggcactgccactggccggtgtaggtggtgtgcgcaaagttttcgacgcgctcactgagtgggccatcgagggtctcgcccgcgcagggattcccgacgttgaaaaagccggcactagtgatcttgcactcaatgggaaaaaggtgggcgggtcctgcgtctatcgatccaagggattcttcctctactccaccacacttcttttcaagccaccgggtgatgcagccgagcgttggctcgctcatccgcctcgcgagcccgactatcgcgatgggcgtggccacgcagatttcatgggctcactcgaccccgagggcgacgtagagacatggctccgccgtttgcgcgaaagcttcacgcccgattcgcttcccagtttttctgattaatagagctgcttgacctggctccagcttctgtcctcgctggcgccggcggtggctccacctaaggtgaaggacaaatcttgtgcgccggggaaatcgccgatccaagcaaagttggcggtaccggtaagctcgaaaccggaagacagtccggaagtatcgatccagagaattttctcgccccaggggccgagggtccagcaagaattcccgagatgttcgccgtcgatatgcaggtcgataatggtgaggccgcttttttcgggctccgcgatagcgtgaatgtaaagcgcttcggggccgctgctcagttctgtttctagcttaagttcaccgagaacaaaagtgagaagaccgtttgcatacttgaaactgaaggcttcttcccgattacattgccaattgaaactgtcgccgtctaggctttgactgtttccaccagaaagggtgagttcgtaagctgtgccatcgagaccgtcacccaacactgcctccagttcgaagagaccgccagcactcgcgactcgagacgcgagttgactgcgactgatgctctccgttgtggcgaacaagggcgtagcaaggaaagccacagccacaagtgccgcaagaatcttcacgagtgcttgattcagcatctgcttccccaaaatggcttgatcaatacaactgttgagcatgggcttcaaaacaattgccctgtaagaatgtatcggtgcatatggctataaactgaaggcactttgacataggggataaagcggttgcggcccgccacatgtgacgggccgcagagcctgcggatcaaagtccattggtatgaaatgctagcccggactctgaccggttacacttgatccctttttactagacttcgaccctcccagtcaataggatttttctactctacttcaattgggagatgtctatggctgattacatactcggattggaccttggccccaattccatcggatgggcaatgttggaagcagaggttcgtgatgaagatggaacaacatcagtcatcgaaaagggattcctcgacacttctcacgcaggacacccacccttgggcgctcgcgtatttgaagccgggctcgacaatcttaacacatcgaaggaaaagtccctgtcccagaaacgtcgcacgagtcgctcaatgcggagaaatcacgcacgcagaaacgctcgacgaaagaccttgctgcggcatttgatccacgcagatctttttccagggagtcctgaagaacgagaatctcttttaaagcaaaatccatacgaactccgaactcttgcgttggatgaacgattggaccctcatcaactgggacgtgctctttatcatctcacacaaaggcgcggatttaaatctaaccgtaagagcgggaaagctaaagaggacaagggaattcttaaggaaatcggccagcttgcaaaagacatcgagaatcatggctcgcgaactttgggagagtacttctaccatctatcacaagatgagtctggatctttccgcccccttgaattgggttggctccgtgtccgagagcaacacactcgcagggacatgtatgaagacgagttcaaaaagatcatcgactcccagcgacgcttccatcccggcattctcttggacgaactcgtcgagaatctgcacaaagcgatcttcttccagcacccttttgaactcacagatgaaagacggatgcgtgctccggcaggtgcgaatcttcatcgagcaccttcagtgcgcccctgtcctctggaaccggatgagaaatgttgcccaaaagccgagtggatcgctcaacgcttccgaatcctcaaggaagtcaacaatatgaagatcgcagagaactatggtctagagaggtctctttccgaggaagagcgacaatctgtcattgagcgtctctccctttccgaaaacgtcacattcgatcaaatcagagccacattggctaaacaaggctgcgatccggaggcccttttcaatctcgagcggggtgaccggaagaagctgaatgggaacatcatcgacagtaagctgtcagcaactcttggtaaaaagaagtggaaagagctagaagccacctccaagcaaaatcttcgaaatgctctcctacactccgaggaccccgagagccttgaggccacactcatcgactcaggtttcgatgaagagaaggctgagaaactggcggactggaatcctcccgatggatacattggcttctctgaaaaagcactgtcgcttcttgtaccacatctagaaatcggcctcgatgagtatgaagccatccagaaagagtaccctgaccgccccgaaggtcatgaagttgatcaactccccgccttgtcctcgaaggatcttcctcacgatttgcgtgatatcaccaatccgatcgtccgcagagcgcttgttgaagtccgaaaagtgctgaacgcactcattcgtgaacacggcaagcctcgtcgaattgttgtggagttggccagggatatgaaggctgggcccgaggaaagaaaaaagtactcacgtcaacgatatgaaagagagaacctgagggatagagcccgaaaggaagtcgaggggcttggcggcaacccaaacaatcgaaatgatataaatcgctggctctactggactgagcaggatcacagctgcccttacacgaaccgacgaatcccgcaggatgagctctttcgcggcggcgagtgggaagtggaccatatccttccccactggcagagcctagatgattccatgaacaacaaagttttggttcttcgtgtggcgaatgaaaaaaagggagacagaacccccgcgcagtggcttggtgtggagagtgaagagttcaggaaactcattcaacgagtcgaggggatggttcggaagaacgggctcccctatccaaaacttctgcgcatgaagcaggacgaagtcaaagttgatgactttgcactccggcagttaaacgacacgcggtatatttcaaaagctgtagtgaagtacttaaatctcctttttcctccgaaacttagggttggtgaattggctgtccagtcttcccgtggaagccttacatgggagttgcggagacattggggactcaataatgttctggatgatatgctcgacaagaatggtaatccggttctttctcccgaacttgatgaagatggggaacccaagaaatcccgaaaggatcatcgccaccatgctattgatgcagtcgtcgtcgcattgtcatcccgacgaaatctaaaacgctaccaagattactggaagaagcacaacagggctgcccaaaggcctttctttgaggatccctgggatgggttaagggatgaagtctcccaccatgcgaaagcaatcaatgtctcgcatcgagttgtaaggaaagtcgacggccccctacatgaggagactttcttcggtcgcgccctcgaccaagacgggaaacctttttcagacacgtatgtgactcgcaaacccattgagagccttacaggtaaaatggtaaaacacattcgcgatcgctgcgttaaaacgctgattgaaacgcgactaactgaaaagggttgggacggaaaggcaaattcccttccaaaagattggtcgaccgaaggaatccatatcccatcaaaggcttcagctgagggcatccctgttagaaaagtccggatcgaagaaatccattctaacgtcgtcgacttaggccatcgattcgccaaatcaggaagcaaccatcacattgctttcttcgaagtgcctagtcaaaactcaggtgagcaaccccaactggaggctaaaatagtatcaagaatggaagtcgcaaaaaaagtgcggcaagataagctacccccgatttccaggattcatggggcgggtggtcactttctcatgtccctctgccgaaaagactcagtgctgctcagtgaccatacgggttcaaacaagcgactttgcattgttcaaaatatctcgaccggaaccgatgagatgcctttctaccttgtctttagggatgctcgagattctcggcccgcttccgagggaaataaagccccctatcagagattagtctcagaagttgcttggcatcgattgaaacttgaaaaagtgcaagtcgatcctttgggaaggatttctaaagcaaacgattaaggtattctaatttatagccgatcttcatgggacacttcccaagggtgcaccatgaaaagaactgttgaagtttcgactcgaggaactcgccttacgctggctgattcgcgacttgtcatccaaagagaaggcgtggttttgggtaacatacccttcgaggacatcggcgttcttgttctggactcgacgggaattgagctctcttccggagctttgagggcactcgcggaggcgggcggcgcacttctctcctgtgacgatcgtcatcatcccaacgggatgttcctaccacttgtcgccaacactctacacgctgagcgacttcgcttccaagttctcgcgagcgatcccctgaaaagaaatctgtgggcaagaatcattgcttcgaaaatccgcaaccaatcagccctgcttgcttgcactgggacccgcaaacgattaacgcgcctagctcaaaacattaaaagtggcgacaaaggaaactcagaggcccaggccagcaggttctattggcccatggtctttgatggattgatcgagaacttccctggccctttccttcgccgaagagcaggtgctcccccaaatgatcttcttaactatggatatgcggttcttcgtgcagcgacagctcgatccctctgtgccgcaggtttgcaccccggcttaggtatccatcaccagaaccgctatagcggttattgcttagcggatgatctaatggagcccttccgaccctgggtagacaagcgggtccaggatctgcttattgatggaattcaagagttgaggaaagaaggaaagaaggccgttttagaagttctcaccgatgagtgtcagatcaatggatcccttggtccagtattgagcgcactcgataaaagcgcctcctctctcgcacgctgtttcgaagcttcaacgaaaggtgaccctacatccaaagctgttaaacaactacttcttccaaaatggccgcggccttccgacgttcgtgatgattagcgggtatagagcaatgtggcttcttgtgatgttcgatcttcctgtaaagaaaaaagtggaaaggaaagctgctgcccagttccggaagcaactcctgaaagacggtttcaacatgatccagttttcgatatactccagaccatgtccaagcgaagaaaacgccgaagttcattgcatccgagtaagagggctcctgcccaacaagggccaagtccggatactgaagtttacggacaagcaatacgcccgaatggaatgcttccaaggcccaatccccgccgaattcgaaaagatgccttcccaaaccgagcttttctagcaatggaaacgccgcaagcctctctagtagttagacttgcggcgcgcctagtgtaaccgatcagagtccgggatcaatccacaac

SEQ ID NO: 3229 - DNA, 8655 bp, synthetic construct
  variation 6513..6729: note = note, n is a, c, g, or t
  misc_feature 1..8655: note = Synthetic
  source 1..8655: mol_type = other DNA
ccgtggccatcgggcgctttccgctttccggtcgaggacgcgcgcgcactttgggccgcaatgaaggcctagccaagatccgcagcgacccagaaacgggacgcgtcttgggcgtgggcatggtaggccccatggccagtgaactcatcgccgagggcactcttgccttggagatgggcgccacgcttgaggacatcatggtgaccatccacccacatcccacgctttcggaggctatcttcgaggcggccgaggcggcagcgggtcagggcatccacgtcagcgctcccaagaaagcctagcatggtcgatgagctgccttcctaccggcgcgatgagctgctgctcgagcgttgccggcgaagcggtcgcgcggaaatagaaatcttccgtccggccggaacggaagtggtactcggtcgaggcagcaaggtggagctggaactcaatgtcgaaacttgccgtgaagatggcgtgaagcttcgccgacgtttgggcggaggatgcgcggtggtgctggatggcggcaatctcgtgctcgccgtggccctgcctcttcccggtgtaggcggcgtacgccaggtcttcgatgcactcactcagtgggctatcgacgggctcgcccgtgcaggaattcctggcgtggaaaaagcgggcagcagcgacctggcgctccacgggaaaaaggtgggtggatcctgcgtgtatcgccccaagggattcttcctctactccaccaccctgctcttcatcccccccagcgaaacggccgagcggtggctgtctcatccgcctcgcgaacccgagtaccgagaaggtcggggacacgccgacttcatgggctccctcgataagggtggcgaagtagagacatggcttcgccgcctgcgtgaaagcttcacgccagattcgctcccgatttcagctgattaatagagctgcttgacctgactccagctcttatcttcagatgcgctccctgccactccacccagggtgaatgacaggtcatgtgcgcccgggaaatcgccgatccaggcaaagttggcagtgccggtgagcacgaaattgtccgacaagccggcagtatcgatccagagaatcttctcgccccaggggccaagagcccaacaggaattccccaagtgctcgccgtcgatacgcaggtcgataaccgtgaggccgcttttttcaggctcggcgatgacgtgaatgtagagggcttccggtccgctgctcaattcagtttccaagcggatctcacccagaataaaacttaagaacccatcagagtactcgagactgaaggcttcttcccgattgcattgccagtcgaagtttccattggccaggctctggcccattccacccgaaagtgaaagctcggaagttgtgccctcgaggccatccccgatcacggcctccaattcaaacagaccaccggcacctgcaactcgcgaagctagttgcgtgcgactgatgctctccgtggcggcgagtaagggcgtggcaaggatagccacggtcacgagtgccgcgagattctttactgaaacctgattcaacatgtgcttccccaaaacggcttgttcaatacaattgttgagagggtgttgcacacccaaaccgtgtaagaatatatcggtgtgtgaggataataactgaagacactttaacattgtggcaaaagcggttgcggcccgccatatgtgacgggccgcagagcctgcggatcaaagtccattggtatgaaatgctagcccggactctgaccggttacacttaactcctttttactagacttcgaccctctcggtcaataggatttttctactctacttcaaactggagatatctatggctgattacatactcggattggatctagggcctaattcaatcggttgggcaatgttggaagcagaagttcacaatgtagatggatcggcctcgatcatcgaaagcggattctttgatacttctcatgcaggacacccgccgatgggcgttcgagtattcgaagcagggcttgacaatctaaacacgtcgaaggaaaagtctttggcccaaaagcgtcgcactagtcgatcgatgcggagaaaccactcacgcagaaatgcgcgcagaaaggcattgcttaagcacttggttaagaatggtctatttccaaaggatccagatgagcgagaagttttgtacaagcagaatccctataagcttcgaactattgcattggacaaaaaactagatcctaatcaaatcggacgtgttctttatcacctcgcacaaaggcgtggattcaaatctaaccgcaagagtgggaaagccatagaagacaaggggattcttaaagagatcggtcagcttgcaaaagacatcgagagtcatggctcgcgaactttgggagagtactttttcaatttgtctcaagatgattccagatcgttccggccacttgagcttgggtggcttcgtgttagaaatcaccatacccgccgggatatgtatgaagacgagttccaaaagatcatcgaatcacagcagcgcttctatcccgaaacactaacggacgaactcatcaaggagctccatggatccattttctttcaacaccccttcgaactgacggacgaacgacgcaagcgagccccagcaggagccaatcttcatcgggcaccttcggtgcgaccctgtcctctggagccaaatgaaaaatgttgccccaaggctgagtggatcgcccagcgtttccggattctcaaggaagtcaacaatctgaagatcgcagagaactttggattggagagagctctttccgaggaagagcgacaaactgtcattgaacgtctctccacttctgaaaatgtcaccttcgatcaaatccgagccactttggctaaacgcggttgtgatccggaggccctcttcaatctcgagcggggagatcgaaagaaactgaatgggaacatcatcgacagcaagctatctgcagctctcgggaataagaagtggaaagagctggaagtaaccaccaagcagaatcttcgaaacgctctcctgcactccgaggatcctgagagccttgaagccactcttgtcgacgcaggtttcgatggaggaaaagccaagaaactcgccgactggaatccacccgatggatacattggcttctctgaaaaagccctattgcttctcgtcccacacctggaagcgggtctcgatgagtacgaggctatccgaaaggaataccctgaccgccccgaagggcatgaagttgaccagctccccgccctgtcctcgaaggatcttccctatgatttgcgtgacatcaccaatccgatcgtccgtagagctcttgtggaagtccggaaggtcataaacgcacttattcgtgaacacggcaaacctcgtcgaatagtcgtggagttagccagagatatgaaggctggtcccgaggaaagaaaaagatactcacgtcagagatttgaaagagagagcctgagggatagagcccgaaaagaagtcgaagagcttggggggaatccaaacagtcgaaacgatataaatcgctggctctactggactgagcaggactacagctgcccctacacaaaccgacggatcccacaggatgaactctttcaaggtggcgagtgggaagtggatcatgttcttccacactggcaaagccttgatgattccatgaacaacaaagtcctggttcttcgaacggcgaatgaagaaaagggagacagaacccccgcgcaatggcttggggtgaagagtgaagaattcagaaaactcattcagcgagtcgaggggatggttcgaaagaatgggctcccctacccaaaacttctgcgaatgaagcaagaagaagtcgatactggggattttgcactcaggcaattgaacgacacacggtatatttcaaaagccgtggtgaagtatttgaatcttctttttcctccggaacttcgaaagggcgagctggcggtccagtcttgccgtggaggcctcacctgggaattgcggagacggtgggggctcaataatgttctggatgatatgctcgacaagaacggcaatccggttctatctcccgaatatgacgaggatggagaacccaaaaaatcccgaagcgatcatcgccaccatgccgttgatgccgtcgtcgttgcattgtcatcccgacgacatttgaaacgctaccaagactattggaaaatacaccatacagaaggtcaaagaccctatttcaaagacccatgggatggaatcagggacgatgtcgcccaccatgcaaaagcaatcaacgtttcacatcgagctgtgaggaagatcgacggtcccctccacgaggagactttcttcgggcgcgccctcgaccaagacgggaaacctattccaaacacgtatgtaactcgcaagcccattgagaatttgacgggaaagatggtaaaacacattagggatccccacgtgaggtcattgattgaatcgtgcctccgagaggagggttgggacggtaaggccaatgcccttcctaaagactggtggacagaaggagtgaacattccgtccaaggcatcagcagatggaatcccaattcgaaaagtccggattgaagaggtgcattcaaatgtcgtcgatttgggacaccgatttgcaaattctggaagcaatcaccacatcgagtttttcgaaatgccaaaccaggattcaaccgaacaacctctcttaaacagcagaattatctcgagaatggaagccgcgaaaagagtaaggcaagacaagcttccaccgatctccaggagccatgaggccggcggtcactttatcatgtcactctgccgaaaagactccgtgctgctcaatgatcatacggattcaaacaagcgattatgcgttgtccagaaaatctcgaccgggaccgaggggatgcctttctaccttgtttttcgggatgcacgagactctcgaccagcctcagagggaaacaaaacgccctatcaaagattggtctcagaagttgcttggcatcgactgaatcttgaaaaagtacaagtcgatccattgggaaggatttccatagcaaacgattaaagttattctatttattgccgatcttcatgggacacttcctgggagtgcaccatgaaaagaactattgaagtttcgacacgaggaacccagctctccttggctaattcgcgcctcgtcatccaaagagagggcataatcttaggcaacatccccatcgaggatatcggggttcttgttctggactctacaggcatcgaactctcttcgggcgcactgagggctttcgctgatgcgggctgtgcacttctttcttgtgacgatcgtcatcatcctaacggaatgttcctgccgcttgtcgctaacactctgcatgctgaacggcttcgcttccaagttttcgcaaatgatccactgaaaagaaatctgtggtcaaaaatcattgcttcgaaaatccgcaaccaatcagccttgcttgcttgtactggaacccgcaaacgattaacgcgcctagctcaagacattaaaagtggcgacaaagggaattcagaggctcaggctggtaggttctattggcccatggtctttgacggcatgatcgaagactccccaggccctttcctgcgccgaagagcgggcgcgcctccaaatgatctccttaactatggatatgcagtacttcgtgcagcgacagcccgagccctctgtgcctcaggattgcaccccggtttaggaatccaccaccagaatcgctacagtggttactgtctggctgatgacctcatggaacccttccgaccttgggtggacaagcgggttcaggatctactcaaagatggaattggagagttgaacaaagaaggaaagaaagcagtattggaagttctgacagatgagtgcacggtcagtgacgcccttggtccagtcttaagcgcactcgacagaagcgcttcctctctagcacgttgcttcgaggcttcagcgaaaggcgatccaacatctaaatctgttaagcatctgcttcttcccaaatggccgcggctctcctgcgttcgtgatgattagcgggtatcgagcaatgtggcttcttgtgatgttcgatcttcccgtaaagaaaaaggtggagaggagagctgctacccagtttcggaagcagcttctgaaagacggttttaacatggtccagttttcgatatactcaagaccatgtccaagcgaagaaaatgccgaagttcattgcatccgagtgagaggactcctgcccaacaagggccaagtccgaatactgaagtttacggacaagcaatacgcacgaatggaatgcttccagggtccaatccccgccgaattcgaaaagatgccctcccaaaccgaactattctgacaacggaaacgccgcaagtcactctgcgagtaagacttgcggcgcacctagtgtaaccgatcagagtccgggatcaatccacaacnnnnnnnnnnnnnnnnnnnnnnnnnnnnnnnnnnnnnnnnnnnnnnnnnnnnnnnnnnnnnnnnnnnnnnnnnnnnnnnnnnnnnnnnnnnnnnnnnnnnnnnnnnnnnnnnnnnnnnnnnnnnnnnnnnnnnnnnnnnnnnnnnnnnnnnnnnnnnnnnnnnnnnnnnnnnnnnnnnnnnnnnnnnnnnnnnnnnnnnnnnnnnnnnnnnnnnnnnagtgtaaccgatcagagtccgggatcaatccacaacaggagatccatcataaccaagttgtggattgatcccggactctaatctcctatgattgtgggcgacgcataagttctatggaaagtatctcatggggctcgacacttacagttagctcacgaggtccacttatcaaatacatttcctgtctttcctcgagcagattgcacttccaagcttcttcaatgtcgaactccgtgtgcagagtttcctcaaggctttcatcaccaagattgtagaggcgaagaagaagcccattgccttgggaattcgtacgcagtgagctaagcccaactcgggagctcaagcccgaaatgagtcctttcgaggagggtttggccaaggcggcaaccccttgccgacatggcaagggtgttcgccatctggcgctctcgtctttgacgcctgccgcaacaccatcgccctggaagggcagcaaggataactggaatcgatgtgtgccaaggcattgagcatcgggagtgtagagagtgggtcccgcgttggaacacttgcgatcggcaaaatcatcgcgggatagccagcccaccgcgcgcagcaaggttatctcaagactcacttcaccggcggagtttcgccgagcagacagctcgggtaaaccctgggcgagaagggctaagccaccatcatgatcattgacccaggaaaactcctgctgagggaaagcgtcggtaggcggctgggcccagtctgcgttagtgacatgatcaaggcttcgacgattgagcatgaattgaccatcggatacgaggctgtcacttacgatgcccgtgggaaagatcgcgcgaagtcgatgatcttcagcaaggttctcaaactcgatttccatatcaaggcgaggtgaatgagcatcgagcgttagactgatgctgaggggacaatccacaaactcatcgctgcgcgattttcgatcggcactcagtgagcggggaagtttgaagcttcccttccacaggagtctgccccgcagaggaccttgattttcaactgatatctcaccgagaatctcagtggaactcagggcttcatcgtcagggagtgttccgaaatcatattcgtcaccgatgtctgctacattttccagaaaaccgagaccctcgtaacggcgatcattgaccttgtcaaaaagatcaaagagtccactaggctgaatttcgacctccaggagctcattctcaattcggtttttttgggcgcgaacatgaatttcaaggggttttcccgtctccccgccctctcgaaggaagaacagcttgtgtcccacgggtggcaaatcttccgcgtagaaaagaatgtgcaggaaagtgtcgtgctcgccggcttgggaatcgtccttgagaatgcgatcgccaaaacgctggcgatacacggcgaacttctccaactgatcttccgcgaaaagttcggcgcggtaatccacgccccagaatcgttccacggtccaacgatccaagatttggtagggaatggcgcttcccgattcatcgaacagttgtaggcagtccaagtcgtagcccagtggttggagaactacgagtctctcaaccaaggcactgcgcttttcaggaagtgaattgaccacgagaatggcgtcgtccggttcaagaggaaatgatgcccggagcacccatgctgttcctgctgtcggccctcctggcgttcgtgctgggggcgggcccgctggaggcggcgcaaaatcctttccttcctggcgcgcctcctcccaagtcggactcggttcagaaaccggaaacgccctcggcactgctccccttcatgcgccacgtggtccagctgcaactcgccgcccggcaaaagatggtccttttcgccaaggacatccgcgagagaccctacggcggttccttc

SEQ ID NO: 3230 - DNA, 23768 bp, synthetic construct
  source 1..23768: mol_type = other DNA
  misc_feature 1..23768: note = Synthetic
catggttgccgtcgccatgtccaccacgttcgccgcgttcgtcttcgcgctgttcttctgtgccctcggccttattttcgcgttcgtcattgttacgatcgttgtcatcgcgatcgctctcagcttcagcttgattaccatcacgatcaccctcggcctcagcttggttaccatcgcgatcaccctcggcctcagtttgctcttcgcctctgttgcccttgtcgcctttgtcgccgtgaccatgctccatgggtacaataggacagatgagccattgcgcaaaacccgaggtagggatcgaataagcgccaaaaataacgacgatggccaaaagaatatagcaaagtggtttagctatagcttcgcgcaacttgatcttcttcttaaagaagcctttgaccatattccagtacaaaccaagatggatgccgacaagaatcaacgaaacagcagagaaaaataggtgtagtgtcctaaaaatggatgtatccaagttaagcgattgaatggcatcgcggaaaagaatcttcgagataaaaatgccactgatcacaattattaaaaacgagataatcaaagcaatggaaatccaatagctgaactttgtgcgagctggagtatctttgttgaagagtttttttgtgctgtttacaatccagcgccagttgaaaagacagtgaattaaaaagaccagaaaaattccaatgccggcaacttcgtgataggtgagtgtgagaacttttgccttgtataggaaaactaagatgatgaacattgccacatcgagagctattttcgcagatagtttaacgctttttgtcattgtctaacttgccatcctttctaaagagcggtgttatttcgacacaagacgagcctgggaatgttgacttaaataagacggatgcgtgtcaatagggctgcttgtagaaacaaaagttagcttaatataactttatggtaatagttagctatggttaactataagcggcttgaaataatatccgaacggagaacgattttttaaatctcatctatcatgtcgatgaggctttggcgtgaactaatgccaagcttttggtagatgttggagcgatgaaactttacggtgttttcggaaactaccagcttttcggcaatgcttttaacggagtttcctttagcgagcagttgcagtacatccacttcgcgatcagttagtgaaaaatcctgcgcaatttgggcgacgcgttggtcgttggttttgtcagcgtgcgtgctggtttcgtcgcttatggcgccattggcgtttgtagatttgacctgctgcatttgtgcaataaagagcatcatcaacgagagaacaagcgctactaccgcagccaccaaaagcaccacatcatacggttcaaacaagcgagtaaaaaagcgtataacgaattgcaccagataaatgatggcaatagagttgcatgcaacgcgcaagcagtgggtgtggtatgcagagccgtaccaaattgatcctgctatggaaaacaaaagcagcaaccacgcgctcatgaaaatagccgaatagaaaacagcgctcgagaagaagggggaaagcgcgaacagcgagacgatgccgcaaaatccgacaagaagagaaaatacaatttcagaagcaatgcgttttttcgcgacagcaataacaataaccgacgcaacaattccgcagggtatgaaaaaccacaggaagcttagctctatgataggcatccagttttgaacaatgattgaccaaacgagtccgccggcaattgccatgattatgaaatagacaaggtttgggtgagggcgctcgacatcaggaagtatgtgtggtgagacgtttttcttttcgagcagaagaagaaatacgagtgagcatatgggaagagcagctgatgctccgccagcactcgattgaggaagcaggctcatagaccagctcaatacgcccgtaatgacagatccgaggcttaccaccaagaaaagcgaaggaaagctggtgttgagtgacgctgctatccatttagcgaacggaacaacaaatgctattccgcataagagtccacagagaaacccgagggggatagaggcaatttgggcggcgaaggcataggccatcaacaaagcgcaactgatggcagaaacgctgcacgcaacaattgccagcagatctaagctcttaaatttggacaggctgggaaatatgagcaggatgccaattatggcgatgcgcgctgcttgcttaaaaacccacgaatctgaaggctgcatggcaaattgataattcgacgcttcgtatgagaactgcatccatgccatcgcaaagccaaaagcgcatgcagacaaaacaagagcaagtaaggcatccttctttattacaaatgccccattgtttttaagtcgtagttcttccgcttgcgttttcgccatattcgccatagctttatgcgttcccctttgtactaaaaccgttagcaattttaccttaccaggctgattcagcttgctgggatttacggaaaacgcctgtagagcggcaatactaccctttttggatggggtgaaaaaactacaaactgccttttctgagtggaggcaaattcgccaaaagatagcaccatgaattccgaagcggcggtgatttaccgcaaagattgttgagggaaacctattgagggagacctcgagaaggagggaatagcatggctatccagaatttaagtagaaggaacttcttacaaggcgcagttttagctggcgcaggtcttacgggtgcaggtgtgctcgcggcgtgttcgcaggctgagactgccaccgacgaagggcttgcaactactggtgatgaatatacgtgggaaggtgaagccgaccttgtcattcttggttcaggctgtgcgggcatgtatggcgcctatcatgcggctgacgcgggattgagtgtgattttgctcgagaagcagcccgaagagaccgccggcggagacacgcgttgtatgggtggttatatgaatcgcaagaatatgacgatggaccttcttatgaactcctattcttttggagattgcgacgaagagtgggcacaaaagatcgttgatggcagtttggatacggttgattttttgctcgagcatggttgcgagtgggaaacggttgaggatggttttttgaaaggcaatggaccggcggtttatgagtgccttcgcgatgcaatgctgacaaaaaacgttgatgtacgctatgaaacgcctgctactgagcttattcaaaacgacaccggcgaggtaattggtgttgtcgctaccagcaatggccagccggtgaattttaaggcaaaacgtgcggtgctggttgctacgggcgcatacacgtgcaacaagcagctgatgtgggacttaaacctgccgggcatagatacctattcaatcagtagcccctatttgactggcgacggtttgcttatggcagcaaatcttggtgctcgcatcggtaaagtttcgaaaggtgttgagttcgacgcgttcgtttcaaaagcggctagcgaagaaattggaactggtattgagatgcttaagccgcctacaccatcacttatttatgtaaatggtgaagctaagcgtttccaggacgaatatctgaatatgcaacatagcaagacgacgcttccgtgtacgtattttacgggaagcatggcagaatatcgtcaatctgcggcgcattatgataacggcattatgtgggaagtattcgaccaagctgcttttgactccggttcggttggcaacactacgtcaaatatgacttgggcaaatgttatccccagcgatggatatatctggagtgaagacaacaaagcggagttggaaaatggctggattcttcaagccgacacgcttgaggaacttgctggcaagatgggtgtagatcctactgctttggtagagacggttaccgcatataacgctggttgcgaggctggcgaagacgcctttggtcgcaaccctgaaatgctggttgcgctcggtgagggtccttattatgcggttcagctgggcatttcggtcttgtataccatcggcggtttaatgaccgatgccaacggtcgcacactggactggacaaacaatcctatccctcgtctttatagtgctggcaacgtgggtacggtaggatcctatctggctgctattgctgctcgtggcaatatgactcaggccctcattgctgtggaagatattcaaaccttgggtgcttgggacgaagcttaaacgtaggagcgtgttatgtttaaaggtaataagcagatcattctccttactgcgattgtgcttgttgttggtgctctggtcggctgtgcgccacagcagcaagcagctgagaattcaggcaatacgcaagataaaaacgcagcagctgttgagacggtagattttgaattctcgcaggattcggattgtacgatatgtcattcagtcgagtcggattcaatgagcgattccacttgccttgctggacttggctcgcatgcctctatggagtgcctgacttgtcatgagtttgattcgagtcttgagaaggcacacgaagatgtctcgatgggggatacacctcgtagtagtctgaagcgcacttcagttaacgaagatgcttgcttgtcatgccatgacaccgatgagctaattgagaagacggctgatattacggtgctaaccgatagcgaaggcacagtggtaaaccctcatgaggtaatgagcataggcactggtcatgatgagatttcgtgttctagctgccacaagatgcacgtaacgtcagatgcttcgcaagctgcaagtgatacgtgcttgagctgccaccataaagaagtctacaagtgcggaacttgccactagttcttctgcgtgatcgcggctagcttgatgcattctcttgttacggatgcggggcgtgcaaattatccctccctcttaggcaccttctgcattctaatggcgaacaccccttatggcgtcgtgtcgtgaggggtgttcgtcctgtaactcgcttgtcgctatgcgccctttgtttcagcaaaattgttgcactcatgaactatcgtcagtaatttcgaggttttggctggaaaatgcccctcgtcggtgaaatcaccccctattttggcgtcgaaaaccccgactagggcacttttccaaccattttgccctcagattcaccgacgagggcacttttccagccacaacttgcaaatttgcatttaatcgctcgacaagtattcgctctggtaataactcggaaaacctataagcttcccaagcttaacccgtcatcctaagtgcaacactttgcggcaagcaaaggttcatgaaccccgattgattggtgcttaccttcgctattattcgccagatcacgaaatgcggaagtagtctagctcggtcttgaacttgtcttgtgccgcaaggcgggtgtcggtgaggtagcctttctcgcgatcccattcagagagaccccggtaataaaaggccttcatgttgtcgtctatgatgaacggcacaacctcgttggcgagacactctttaaacatgatgagcctgcctattcggccgtttccgtcctggaagggacgaatcttttcgaattcgacatggaaaccaataatctcctcaagcgaatgctctgatctggggttgtagctttttaaaaggcggcaaacttcttctttgacgttttctggaagggttgttttttgaccgccgacttcgttaggtaggcgcttgtattcgcccattgcaaaccaatcttttgcggagtcggtattgccagctttcaagatgtggtggagttccttgattattgtttccgaaagcggttcctgcgcatgatcaatgatgtagtcgatggctcgaaagtggttgcttgtctctatgatgtcgtcgagcctcacggcctcactctggatgccaatggtcgcggtttcgaagatgaagcgcgtttgagccagagaaagcttgcttccctcgatgcgattggaattataggtaagctcaacttgcactttgtgataaatgccgcctttgattttggccgtcttttcttcgcgaagtcgggcgagaagaggtctttcgttgatttgtttggcgtttgcgcgagcgggttttgtagcgtctgaggggatattccatgtcttgcccgttagaaaggcgcccggagcgcggccttgtgcgcagtagttgcggacgcttctttcggaaactccccaaatctcggcaatctcagttgcggacagaaaccccattgggctttgcctccttatcggcaaaaacctgatggggtaattgtagcaaattgatttaattcttgccgatatcggcaaaaaagagtggtgagaagttttcgactcttagacggcggctgcattaagctcggtctttagctgtaaaagcgcagaaaacttttcgccaacagagaaggtcattggctcagcctgcgaactgctgggcatagcttttgcaatcatgcttttttggaggaggtagtcattggtcataagtgacgagagtaactcagcagtaagcgttgcgtcgtaaagcgcgccgtgtaggtcttggctggacgcttcaatgccgtaccaatttgctgcgatgcgaagcgccatttgccttccgttgtcaacttccatgaagcgcgggtatatcttttgtaggtcaagccacctgttgtttttctccgagaaagagatctcttttgtttttgtctcaacgacgagctggcgcaggtcggaattactccaggcaacaaagcgagttttagcgttgcccacccaagcgcgaaactgcttcaatacttccgcgagagactcggcacctgtaacgtcacaggttctaatgccggtgagtttttggaccttgcgcgtgacgcggtctgtgaattccggtttgacgaacgacgtgaagctgtctaatagtttgccattttgatcaactcgaacagccccgatctggatgatttcgaaacagaaatgacccgttcggtatttagggttgacgggtgtaaactcgaggtcaatcactatgttttgttcgtagttgctcatatgctcaccatctatctcgtttgtacgttttaatacatgataggtcagcattagattatgtgtgttccaagcatgggacaccacgcgcaaaccgagctttgcgtgggtcgaactatgggtgaaccttgtgcgcgctgagctttgtgaggcgtgggtcttgcgcggatcagcgtttgttgctcggcgacggctatcttagtctgccgcggcgcgaccccttggttgcgattgactagaatctcatctcttgcagtttctggcactgttccgaggtaagctttgtgattgctcctgtacgcgaaacggtaatgaaatcccgaaactcgtcgatgtgaattggtggcttgatcagcaaaattgaatcgattggagcataatatttgctgcgccaatgcagtccgtcttcggtggcgatattgtcgactatgatgtcgccgcatacggttccgcgtgcaaatatcgcgccaccgatttctcgataaatatcctcaccctcattcagtgcttggtgcaaaacgtcgaacgtctctggttcaatatcgtcctggaaacgtttcagctctcctttgagtcgacggatggtatcgatggatgtcttcgagtgcataaagaagacaggctctccgataaaagcatctttgggtgccgtccattcgacatagtcggaggtcattacttcttggacgtcgaacttgcctcgctcttcgatgaaatataaaacttcgtctaagcttttcgggaacgaaatgtttgtaatgaaggcttctggcatgtgttgctcctgctggatacttgtctttgtgtcgcctatgatagcaaagacgtgagaacaaatatgaaagctttgcgtcggcgattaatttcgaattagaatttcttggcggcagcaatggtggcggcattgaaagaagtattggcggagacattgacgacagcgtaggcggcagtggcagcagcaatggcggctgcagcaatggcggcggcatcggccttagcggcggcgtcggcgaacaattggaggcttatgggcgatttcgcaaacagagtgtacgaagtagtgaagcagataccgcgcggcaaagtgtctacgtatgggcaggtggcgcgtttgattggtgcgccgcgatctgctcgctttgttggctatgctcttcgcgctaacccaaaacccgggacggatccggagagtattccttgtcaccgcgtggttttcaaggacggtcgcatggcgtcagggtttgcgttcggtggagaagagatccagcgcaggatgctcgaggaagaaggggtgctgttcgatgatgccgggtgcgtcgttatggacgaatgcctctgggacgggcatcttgactatcacacgtcagatgacaatcaccccacgggtcctccgccggatttcgattggtcgcgcgaacttggcgaagacaacgattgattcgctcgcgcaaaatcaggcttgacacgttttttgatttggtgcattatgggcgccgcggttccggaacccgcatgtattcatcaagagttgggcgagagagttggctcgaagaccccagcaccaaccggccaaggaggcacggtggtactgccaacaccgatgaaaggagtttcttgtgtctaaaacaatccaatccgcaaaagtaaaatctgacaaaaaatctcgcaatattgaggacgaaaaaacgcgcaatccgtttgcacgcgtacaggagaagaggccgcccttccactacctgagcgagatcgagaccttttcgtcttttcagttgtgcgccaatctgcactatcagatgcagtacagcgtgaagacgctcgaagaacagcttgcagaggaggggaagccgcacgtgttacagctcaacgccttcagttttaagggggcgaacggggattggcgcaagccggatcgatggtacctctacgctgatggactcgaggtggctcatggaaccggtgctcaggcgcgcatctgttttgaggagagcgccgagatgtttcgcgacttgtgccgcgaggccattgagactgctgatttggacgaacttaccaagcgcgagtatcagcttctttgccgcgcccgcgacattgccaggtttgaacctttcgatagcgagcctggtcacgttggctctcgattgggtagagtctaggttggcgaggtaagttccagcaggttgcaagcttggccggtggatcatcacctcgattggtaggctgtcgccttggttagtaggccgcaaacctgccagaaggaaggcttgtcgaaagaaagttggcaggccttctgcttttcctctggcgaatttgtttcactcgtgaactatcgaaaacatttccgaggttttggctggaaattgccccttgtcggggaaatggggggtgtttttgggtccgaaaacaccgacgagggcactttttaaaccattttgccctcagattcaccgacgagggcacttttccagccacaacttgcaaattcctcgcgaaaagcagtgcgaaagcgcctatcagtcaatgttgtgggtgaggtttacaaggttggtagtatgtggcgattgaggcaattggtcaggaggttctagccaattcttgggatatgtcccatagttggtacaaacaaatagaattgcctccgggataatgtatttgaccttttcaatggttttagtgagctttttgttggttggactgcaggcgattgctacttgacaaataatcaaatcagtggagaataggggcgagtgattctcaataagttatagctaatagctataacgacttctcagtccgttttaggaccagccccgtaaggggcttttttattgccttggtctaggttgtgtattgtcgtgttaggatagctttaggttacggtttcgatctttgatttcgggagtttaaatgggtaaaaaacaattgcgctaccgggtgggaattgatgctggactctattctgttggaatggcagcaattgagattgatgattcctctgataatccatatgatgctttgccgattaggttgttaagttgtcaatcggtcatacatgatggaggggttgatccatctgctcaaaaaagtgctgattcacgaaagaaaatagctggagtagcgagaagagcacgccgccttaataaacgcaaacgtttacgcttaaaagatcttgatgtaacgctagtaaatttagggtatccagttcaaagagcgaaaaatcttattgatgagattaaagatccgcttattccttggcgtgcgcgcaaaacgcttctcgagggttatattgaaaatgaagcacaacgcaaacttaacctcacggtagcaatacgacatattgcccgacatcatggatggagaaacccgtattcaaatgttagttctttggcggaagcagccaagaagccgtcgtcattttattttgagtattttgataggttgcagctttggttgcggagcgaagatctgccatgctacgaaggcgttagctttaaagaaatcaagaataaggctgctacaaaaaaggatgcagccactgaagagaacgaagagactaaagaaaagtcctatgaggtggttagaccagagctgtgggattctcctgactgcgtttatcctactgtgcctgaactaataacagtgcttgtttcacccgaagagaagtatttgctgccagacaagaagtatgccctccgaaaacgcaaagaggctaattctaaaaagggggcaacctatatcgggaaactacaccaaagcgataattactacgaacttaatagaatatttgaagttcagaaagtgcccaatgaagagcgtaaagctattttcgacaaagtgttttctcaggtaaatccaaaagacgttggagctgcaaaagaattggttggaaacgatcaattggatccgacccaaaaacgtgcatctaaagcatctattgagtatcaaaaatacgtaatactaacgactcttcataatctgcgaattaaagatggggatataagcagagaactttcgcttgaagaaatcgccaaagtgtttgagtttttgtgctctgataaagccaatgggaaaagctccgagctcgattggcatgatgtggctgatgttttgggaatagagaaaaatcaactggcaggggttggcggaaccactgaagaaggtgagcctatttctgtgaaagtgcctccatcgctaaagagtataaaggctctcaaaagtgttaagggctacaacgataagctgtctgttgtcaaagagtggtgggaagactccagcgattatgcgagagagttctttatcgaatctctcagcaactccggcatgcctaatccagggaacgaccctgagttccaagcggccacaggagccgttgagcagctttatgagcagcttggtgagcttgatgaatcagttttatcagagctagacaaaatcaaaatagtttctgggcgcgcggcatatggtctcagaactctgcatacattaaatcaattgatgctcaatgagggcttgaatcttcatgaagcaagaaagaaagcttttggtatcgaagacgattggacaccggaaggtaaccctcttggcactaaattaggaaatcctgcagcagatcggacgatagcaattgtagctagatggctaaaagcttgcgaaaaagaatggggtgccccagaaacggttaacgttgaacatacccgagaaggatttaagtcggaaaaggtaagccgagaaatcaggaaagaaaacgataaacgatacgatgccaacaaatcagttcgcgacgagatctaccgtgaagtctacgggttggatggcaccacttcggattcgatttcgaaagcagacgtaaggcgctacttggcaattcaaaggcaaaatagtcaatgcgcctattgtggtaaaaagatcgatttttatactgcgcagatggatcatattgttccgcgaaaaggtccaggatgctcgaatgtcatctctaatctggttgcagtttgcgaacaatgcaatgtttcaaaaagtaatattttgttttacgagtgggcaagtaaagaaaagagaagtgaagtttcaggcagagtagatacatggttaaaagatggttatttctcttcagacaagcaattcaaatcatataaacgcgatgtaaaagctcgtttgaatcaaaaaaacgaagatgaaccactcgatagtcgttctgctgaatctgttgcttggatggcacgcgaactcattaagcaaatagaaacgcatttctcctataaaggtaaagttggattttcaacagaaggaaataatgacttcgttgtaaaaagagtgaatgcttttaatggaaggctaactgctgaggcaagaagagcatctgggctcgaacgtaagatgccgtggatggacggagataaacgaaagactcgtcttgataggcgtcaccatgccgttgatgctgcggttatagcaatgctgagaccgtcggttgcaaaaaccctcatggaaaggcaatcgatacgagacaccgaagttgtgcagggttactattctgacaaaatggatgagtggaaaaaatacgaaggattcaaatttgcagatattgagatctatagacgttggcgtgatgaacagatgagccgcttgatagctgttcttgcagaagacatgagacgcggcgctgtcaaagtgctttatcctattcgacttcgccttggcatcgggaaagcccatgatgacaccatattcgagatggctaaaaaaccgctcggtagttcgtggacgcctgtagcgattgataaagttgaaagtccacagatatggcaggcattgactgagttagaggattacgacgaaataaaaggacttcctgttaatgataatcgtacgatcgtcgttaaggggaagcgattcggaagagatcatttggttggtgtcttagcgcagccaaatgatatagataaggttgaaagcgcagtaaggatgccagtacgtggtggatatgcaggaattggttccacgattcatcacagtaggatatacaaaactccaaagtacaattccaaaggaaaactgacaggttttacatttgaatcggttcgcgtatttcaagttgatctgttgaagcaccgtggcaaagatctgttctcgattgagttggatcaaagtagttacagcttacgaaacgcaacattaaacattaggaaagcgctacaaaatggtgaagcagaatacttaggatggctcgtcactaattcaattattgttgttgataattcggattctttctttgatcctgagaaaaacaagaaaatcaaccttattatgcgcgcattcccggaatgcagagagtttgtggtgactgggtttggaaccaacgcaaaactaacagttcgacctgcgcaaatatcttccgaaaaccttcctgattataaggaatactggcgtgatgctcttgggaggcaaaagaataaagaggtcaatagcgatatggaatctgattctgtagagtttgccagcggagagtttacgaaagaagaattaaagactttgtttgaggctctcgaaaaaggagttccactcgcaatcaacgccttaatgcaaacgagcccatgggttgtctataggaatacgcttgggcagacccgttataaaagcaataatcatatgccaactagctggcttgtcgaatagcatagtaaagtgtcaaataactggagaacagttgatctcacacggctaagcggacgaattagcttttcgaagaatactcgatttttggatattctcgatgacttgacaggcgaaattatctcaattgcgccatgcgagatcaacgttctctttatagggatcaaagttcagttggagccggctgtaatgtatcatcttgccaaccaaggtgtgattacggtattcactgattggaaagggcttcctatatcaggagtctatccatgggtcgatcctcacgggcgggttgccgcaagacaaagggctcagtctgaactaagtcttccaaaaaagaaaaatgcctggaaaaatattgtgaaagcaaaggtatttggtcaggcaaacgttattgaaagagtagacctaactgtagccgacaaacttagaagtatggcacaaagcgttaagtcgggagatccagaaaatatagaggctcaggcggcaagactatattggcataatctatttggcgataagtcgtttcgtagattgcccgggttaggcgaaccgggcaaaaacgccctcttagattacgggtataccattttacgtggacaaagcatgagggctattgtgtcggcaggtttaataccaacacttggcatttttcacagggggagaggtaatcagtttgctttggcagatgaccttatagagccctttcgacctgttattgatgcggcagttttgcgaattggagatgagtgctgtattgaagacaaagaggtgcgtcgattattaattgaagcgacgcttgaaaagtttggcacgcttgatagtgtggtgcagacagcgatgacggattttgctcagcaatacggacgatttattgagggcgatattgaacgattatcggttccgatatggggttctcatgatcaataaaagcggaaagcaaaggtatgatgctatgtggtgtgttgttatgttcgacttacctgttcagacaaaaattcaacgacgcgaagcatcaaagtttagaaaaccgcttcaggataatgggttttcgatgattcaatttagtgtatatggaaaatattcacctacctataatgggaatattccaacagaaaagataatcaaggatggtttgccagcagacggcgaagtccgcattttgcacctcacagacgctcagtgggctaaggtagttaggtttatttctaagaaaaagcaaccagtagaagaaaaatacgagcaacttgtattgttttaatatatttttctaagcgatttccatctagaagaatcatagttttccctggttaaagccgagtaatacgtaggaaatggcacgtatctgttgagaatcactttctatctcatctgttaaactacaacaactacttacctattgtgaggagtttgttgagaatcactttctatctcatctgttaaactacttgccgcataaaactgctaagcaaattagttgagaatcactttctatctcatctgttaaactactatagcttgcgctttgttgctgtgctttggttgagaatcactttctatctcatctgttaaactacattttggcgtgcttataactggcggcatgttgagaatcactttctatctcatctgttaaactactacaaggaaatgtcgcacaacttttagggttgagaatcactttctatctcatctgttaaactacacgctaccgccgctgtgcgaagtgtcatgttgagaatcactctctatctcatctgttaaactaccttctctttgtatctgtgcaatccatttgttgagaatcactctctatctcatctattgggcagccagtcagcgcctatgcaatcgaagaggggtttaggggttaccgataaactttcacaagcgaatacaagttatctagatttgctttggcctttggagcggtgattgttttaagtcgatagccaaataagtatcgccattattttttatacgatcaattacacagcgcacgtgcttcaaaaggatgtgagcgcatgtcatatttttgtaatccgaaaacgatgaataataatcacgagtgctgttggtggtgtcgaagtctactggagcattcttgcttttggtcgcaagatagaactggatttctttattcgaagttgtttgcgttttgtatctagatgcaattgggcatttgtgtctttttgagacgtaaaaccaaacttttctgagaaagaaaaaggactacatttgcaaagtggccaactaatcaaaccaaaagtgaaacgtttgagtcaataataggattattcaagattcaggcatagcctactatttcattgaggcggaaggcgaggatgcttcgtcagtaactaacatcattgataaataaatccgtattgaagagatggatattggtgaaatattttagtgtttttggtaaacaattatcgtacgaatcctgacaaagcggatagggttagatttcgtgcggcttttataaaatggggtgcacgcatcggaaaactccatccagcccaaatattagtgagtttttgtgatgttgctttgcttatttaactaatctgtcatttgcgcgcttgcgatggcgcagtaccaacataaagctaagctcgctgacatctagtaaaagaaacgagagaaatattctctcaatttcggatcaagtacatagacgtgagttcccaatatgccgcgagttagtaatacgtaataaatatttttgatatagctatcaagctcttccttggaggcagttgcatatccgttacgatcaaaatagctacttttatttgaggccggtacgccattttcgtcaagaagcagatcatttccaatcaggacatatgcatagctgaggtcataaccttgaatagagtgtatgcatcccacttcgtgcgcaatgcgagagtcgtttgcgcctcgtcctacccaattatcgtatgtgtagttccatttgagaccaattccgtcaattataatatcttgagcgtccgaatcgtcttttgatgcccacttccaagcatagccagctatcattctgctcaaattatgctctttatagtcgcgttcaaagcaagctacgaaatcggagaagtcatcatgaagaataaaatcgtaatcttcgaaatcatgacattcttcctgactgccgtctaggatattttggatatattcaaggtaggcttttccgccttttactcgcatctggctatcgagcctgatagggttttctgcggcgtgtccaagagtttctttgactgtgttttgatcaagacaggaaggcccaatgctttgcaatgggtcatagaagaaaatgggaagctttacctggtcgagcacccattcaatctgagtggcatctcttggcagatcgagctccttgtttaccttgtcataatttgcaaactgtgtacctaaattaacgcggcgtttcagtttgtgagattcgtcgataagtacaatgtcaaaacatttcttttcgcctttacggtaacccatcgcaggtttaataaggtcagttggagcaataatgtctgttggcgacaaaccactaacgcttgctagtgaacttctaagcgtattgcgcagagaggtcactggttcaatgatgcggatattcatatccttatagcgcggatcatctcgcagcgctttaagcaagtaaattgcaagtatggtcttgcctgttccgggcataccctccactatgattggctcagctttttctagtccatcatctatggcgccaagtatcttatcaagagctacgcgttgatctggagtgagccccttgaatggggagtatttgaaaacctctgattcttcgatctcggcgatggtatgatcagcaagttctaaacgacgcaattcttcccacagttcttcgaacatggttgcatacgtgtctttgctgaaataattcgtatcggtcatgccgtcatttttattcgtgagttcatagcgaccatcggcatgcatatagccgatgagtcgatgctcgtaatctgttatgaccgaggtattaaactcttcgttgaatattacatttactgtgtcaaagtctcgtttttcttcattggagccatgttggctcattcgagttgcaaggcttgtggtttgtccaacatatgcaaagtctttgtttgcgagtatgtaaaccataggccaattaaagaccttgtcttcttctagttccagaaccccgtagtctatttgctcaccaaaacgaaacggacatctatcgacataaaaaggggagccttttggggtctcagcggagttgcttgtaggaattgttatcacagctcagtgtactttcttgcgttgcccttcgctttttctgcgggatatcttttagcattttcgtctagtttactactaatcacatctgcaaggtttaatccaagagtgtcggcaaggtaaatgcagtagataacaacgtcagcaatttcttcttttatcttttcgctttttgattcaactactacatcctggccggaccattgaaaaacttccagcagttctgctgcctctaggctgattgatatggcgagatctttggggttgtgaaactgagtccagtccctctcttctctgaatgccaatgtcttttctgttacttcatcaaagttcatatgcccctccattgtttgtagtcctattttaatgctaaatctatacattgttgagtaggtagatttagcaaaaaacgcctcagagagatctgtaaaaatgcatttcattaaaacatttcgtggaagagagaactgtggatcactatatccttttggggagaagagaagtgatcctatggggaaaatcctggcatgttagtttgcactcagcgaagactcttgctttgaggcttttacttcgtcgaatttgttgcactcatgaactatcgtcagtaatttcgaggttgtggctggaaaatgccccttgtcggcgatttggacgtgattcggacgcgatttgaacgtctaaaacaccgacaagggcactttttaagccatttcgccttcagattcaccgacgaggacacttttccagccacaacttgcaaattcctcgcgaaaagcagtgcgaaagtgtgccgcacccctgagttcgcactcagggtacggcgcatatcgtgtaacgcgcgcgaaacgaccagcgcaatgaggcgaacctcgtgggtatgctgcgtatacgcatgctgggtatgcggcgtcagcgctcaagctactcttcgataacgattccgagcatgctcgcgaaggtggcaagttggtttgtccccattttgcaaccttgcagctcactcatagaatccgagatggttacgccttctatcgtgcatgtcgtcaggtcaagtcctgcaaggcttgtcttaaaaaacgaagcgcacacaattttgcaatcttcaatggatgcagaagatagctgcatggcacagaagtctgcttcgcttaggtcgcattttgcaagtgaaatgtttttccatttgctttgagagcaggtggcgaatgtgagaagtgaattctggattacgacattctcgaaataggattcaaaaagtgttgtgccagtaagtttgcaattgtcgaaggcgcatcgcttgaatccggctgacgtaaagtctgcaacggaaaaatcgcagcccgagaaaacgacgtcctcgaagcttgtgtcagagaagtcgcattcttgaaaagagctattggtgaatgctgactcgcaaaagctgcgatggctgaaatttgcatcggttagttttgcgttggtcactgctttagaaacgaacaactcaccctcaaaaagctcagagggatcaagcggtttcaaacgatcgattttgagccgaggttttaccggcggcttcttttgtcgggctttctcgtactgttccaatatgagcttttggctaagcatgtgcagcactctctcttataaatatggcgagtttcgttttgtttctaagtttaacaaggatgaggtggcggtgtctcgctggctgcggcgttggctgtccgcaagtacgcgaaaccgccctgtcccatagttggacacatctcaggcgacgtttctggaaaaatacaatcaaccgtagaaattggagaacaccatgagagtttttgtgttaacagaaaacggcttgccgaagaatatcaattgtgctgtggcctggtacggctttcgtgaaatgggttttgaagtcgttggctacagtcaaccaagtgaacttgaggcagcaacacgctcagatatcgtcgtgggcgggatagggttgtgccagttggtgatgcgtcggtttggagtggaggttccgcgcattaattatcccgacacgcttaaaacttacctgggcagacgcttgtggacatccactataaatcgcgtgaacaacgacgttgagtcgtggccggtttttgtcaaaccagtgcaggataagaaatttacgggcgtggtagtgcgcagtacgagagacttgattggatgcggtacaagtggcgaagatgctgaggtgatctgcagcgaagtcgtcagctttgactcggaatggcgctgttttgtcagatatggcgaaatccttgacataagacgctataacggcagttggcggcgcagttttgacccgcgtgttgttgaggatatggtcgcggcttatttggatgcgccagctggctacgcgattgatattggagtgacctcgcgtggagagacgctgctcgttgaggtgaacgacggatacgcgcttggaagttatgggcttcagcaaaacctttatgcccagctcctcaacgctcggtggagccagcttatgggagttgaagatgagctcgcatacatcggcaggcatgggctacccgattgagcgcctcaagaagaacgaaacactctgcatttacctggccttttgcgtacgcacaacttttacgagctagttccgtgctgtttgccaggaaagatgcagcaaaactggagtaaactgacgcaaggtgagctctgtggctgctatacgaagtaggcaaggggatgattttgttgaaggagcatggcgaagtgaacagcgcatcaaggataaaaatttcgcacgatgcaaacatttttgaacccatttatgaggagcttaccacctatgataatggggataggctccctaatacgtgggtaacgcgcgcagtctatgacgatgacgacaattatctcgggcacacgtatacagcggtctatgtttctgagaatgaccccgatggtgaggatgctttgtattatggtggcggtctttacgatgaaggtatgtcgctgaccgatccagctcatgccgatgcgcggcacgattgttttaagaccgccgagctgctgtatcgtcatgcggcagcgaaaggtaacgcccttgcatttatgtgccttggctacgtctactactacgacagatgcaatggttcgtactgggtaaacctcgatgagcttaaaactgatgaggactatcggagaccctttccaacaaaagagcgcgcatttgcgtgttttaaggcggccgccgacacagggatagcagaggctttttataagcttggcgattgctacaaaaacggtattggttgcgacccggacgagcgcaaagcttttcaaagctacgagcaagcagcgaaacatgatgatggcaaatatgcctatctatcaggaagtattgccttgagacttgcgggttgtttcgaggaaggcattgggtgcgagcacgattttacgcgagcgcttgagtgctacgagacagctgagcggtacctggatcttgcggtttcgtgcggcgattattattatcaaggtgccttgcgtggtgcgcgcaatggcattgctcgctgcaagcaagaaatatcgcttggtgaacaatagcttggcgaacaatagcccgagcaacaccaattcgcgctcgggtgcaaacaaaacgctcgagcgtgcaaaacgacagctcaaacgacggagggaagcttcatgcgcagtagtgaagtggcgaaacttgctggcgtgtccgtgcgaacgctgcgacactatcacagtctcgggcttcttgtggagcccgagcgcttgcccaacgggtatcgcaactacaccaccgccgatcttgcgcgcttgttacgcataaagcgcctcgcgtcgttggggtttccactggcgcgcatcggagaaatcctcaacgacatggatgccgcctcagaggagctctcagatgaaaaggctggttctgtgaccacagctgcccttgatgagctcgatcgcgacctggctcttcagatcgaaaatctcaagcagcaacgccagatcatcgcccaattaaaagccgagcgtttgtctcctgatgtgcccattcgattcgctcgcatcttgcagtcgcttgcacaactgaaaggctcggaggaactcagttcctatagccgtaccgtgttggtgttagtaggtcatctttataacgaagtggagttggatgagctcgaacgtgtgattgacgtattgcaggatgtctccattacgaaatcgctcgaggagttggatgcacgatgcgcggctttagagccggatgcgtctgccgccatgcgcgatcaattcgtggaagatgcacttgttgttctgacgccacttattgcgcagtttgatgctgtgaactggactaatgaggaaaccgaacgcgatcgaattttggactcagcagcaagtgaagggcttaattccgcccaacttgatgtgatcaaacgcatcgaacaagccattgaagccaggttggttaaaccctccacaacgtgttcacaaatgaattgaccccgacgtagcgtcatagttttaactaccttctcgaagttattttgaaggaaggaactcgatgcgcgctcctgcacaacaccaccgtctatccatttcgccacgctatttactctcttgtgcgctgtctttgctgggcaattctgttgctggcgttattttgcccctcattttactcgcaaccactggtgacgctcttgccgcgggcacccttgcgctcatatgtgctttgcctcagtttgtcattggtcttgtgggtggcgcgctggttgaccgatttaaccgtcgcaatatttctatagcttcggatattttgtcggcagcaagtgttgccgcgcttcctgttgtggatgcaatctggggtctttcttttggttggtttgtggctttaggcctgatcggcgctatcggcgacatccctggcatgaccgcacgcgatgcgcttttgcctgcggtgtgcgaacgcgaggggagaagcttgcagaaatttatggggcttacgcaagcgctcgattctctcgttgtcatcatagggcccgcgctcgctgcttttctcatgacggtagtaggcgatgccagcgccctttggttcaccgccgctatgtcgctgttggcagcactggtaacactcacgttgccgcgctctataggaaatgtaaatggaggtatcgagtgcgaaattgagaataacccggcgaattcgcaagacggttcttcaaaagcagaagaccctcatcggccggcacgcgtaggcgcggctgcaattgcaagcgatgcgaagcgctctcttattgccggcatacgcgtactcttcaaaagcgacgctttgcttcgatcctctttgctgctcaccttcggcattgttatgattatggggtcgtttcaaggtcttgtgctgccggtgcactttacggctgcagacacgccagagttgcttggatatgtactttcggctatgtcggttggcatgctcataagctcgcttgcttactcggtgcttgctcatcgcatgcgccgtcgcagctggtttgtgctgtcccttacgggtatggcgctgagcctgcttatcatggggcttctgccagattttccgctcctgattgctggtgcgctgcttttggggttgtctgccggacctgcttcagcgcttttggggttcttcgttttcgatcgcattcctgcagaaaatcgcgga

SEQ ID NO: 3231 - DNA, 24092 bp, synthetic construct
  source 1..24092: mol_type = other DNA
  misc_feature 1..24092: note = Synthetic
gctcaagaaaattcaggatcgctacgaagagcaaatgaagccggaatatgccgctgctcgtttgtggaccgatgctattattgatcccttagacacccgtacttggattagcatgggaattgaaatggccaatcatgctcctattgaaagagcttacaacccgggcataattcaagcttaaagctgaaagacaataaatggggcttttccctgcggctttcagcatagaattgtgctaaattcgctgggaaaactctaccatgcctttgccccccattaagctctttaggcttttactatttgcattcctcttgccttttggcttatggagtcagggtcatcatggtattcagagctttagcatctcagatcctgaaatctacaatgccgactttagggattcactagtcgtaattgaggatttagaatctattcccttaaatgcggatcaatatagcttcatcaataaagaactgggagatcataaccaggggcaattcctttattttcgattggataatcgcagtggagcagatcttagtttgtttcttcgcttttgccgactcgcgaatcgcattgtgcttttccattttaaggaaaagggaattcaggttgatagtttaggtcaagctaaaaatgcgttacccagcgcgcatcattatttgccattacagttagggtctgatgaaggccaggccttattggtttatcaggaatttgagccctcaaataccaatccccattacacagaattattcctcttcgaggcctcggctttaagagcagaatactatcaaaaaactcgcattcaaaacctttatgctggtatgatactcttgatcggtctctttgcttttgtagcggcctatctaatcaaatatcgagcgctggtttattttggcttgcatatgcttttttggattccttatttccagattcgcagcaatttaaatcccttttggctaagctggttcaaggatattgatccctttaaacccagtttaattgtactttccttccttactctttttggagggctttttgtggaggaatacctacaactgaggaagaggagtaaaaaagccttttggtttttcagtattagccaccttattaccttgggcctcttacttatctccatctttggtcctctgctctattggatcaattatgctctggcctatgtactggtggtgcatctgtttatggtgatctactacagtatccaaaaagtggaagcggctcagcgattattaatttctttcgtgattttactggtcggcgctttattaatgactatcaccgaattgggctgggttcccaattcctactttagtccttatttctttcagatcggaacattgatcttctctttaatcctctttttctcactggcggccgaggtgactaaaatccagcaagagcgaagagaagcccaacaattgatccatattaagagtcgctttttcgaagacatctcccacgaattgcgcagtccccttacattggtggctgatccggttaagcgagtttggcaagatctgccagaaggcgatcagaaagaggccctgggtatcgctaaaaatgctacagaaggcttacaaaatctggtgaaccaaatcttagatttaagccgacaagagtttaaccctcctcagctgatcttaaagaagcaggacttaaacgccttcctcaattatcaattaagtcaatttagctctttggctcaggagcgtggtattcgactgaaatatcatggtaccgagaatcccctcttctttccctttgatggggagaaaatgcagcagattattgccaatttgctgagcaatgctataaagttcagtggcagcgatgcgcttgtgagcttaaaactgcaaagcttggagaatcagaaagtacggatacaagtggaagatcaaggtgcgggaataagcgccaaggcccttccctatgtattcgatcgattttaccaggatccagatgctcctcgcaatccgatggccggcaccggtattggcttagctctctgcaaagcgctggttgagcaacatggaggtgacataaaagtggaaagtcaaattaagcagggtagcctctttagcattgaaatcccttatcctgaaaactttaaagaccataccgaattagagtttatagaagaagatggatcagagccagattctggagaaatcaatccaagccataaggctacagtactagtagtagaagaccatccagacttgaggaaataccttaaatcttgcctggtctctgattttgaagtcctggttgccgaaaacggaaacagtggttgggagatagcccaggcgcaaatgccggatttgatcatcagcgatttaatgatgcccgaattggatggcaagggactaaccttgaaattaaagaaccatccccaaaccagtcatatccctattatcctgctaactgccaaaagcgaacagcaggccgttaatgaaggattagccgctggcgctgatgactatctggccaagccttttgattcggaagaactactgttgagagtcaagaatatcttaaagcaaagagcgctctggttgcaaaagcaagcacaggaaaacttacagcaagtacaggagaatactgttaataaggtagataaagcctttttgcaaaaactggaaacttgcctggataaggagttcagcaacccaagctttggcgtggagaatttggccgatgaagtggccatgagtaaaacccatctcaatcgaaagcttaaggccctcttaggcatatctgccaataagcttatccagaatttccgtttggataaggccaaggaaatgctgcagcaaaaggaaggcaatgtttcggagatagcctttgcctgtggctttaatagtgctgcctattttgtgaaatgctttaaggataaattcgaagaaactccaggacagtacttatagtcgattaccgatcgaattgcaaattcgatctagtgcagtaccggattgaattcgatactggattgaatttgtaattcaagcctgaatcctcattatcaacacctaagaacatataggtttcaaattttataaagcctggttcgattttaatatccagaatccgggactattcgctcctttgcggcagtaaatctttcaaaacaatacctatgaaaaaactactattttccgctttagccgcgatgaccctagtgagcaacttaaacgctcaaatcatcgacttttcgaatttttcggttccggcagccggctcggatatttaccaccgagctaatgtttcttcggtgagtccagctactccgggtagcggtcaaacctgggactattctaccttgatcccaacgtcattcgactccttagtttattttgatgccaaggatagtaccaccggctatcctgatgtttacaatttcgtttacgatgatctgaacagccctagtggagccagtattgatggctatgaattctataatattaatgccagtggcttttatgtagctgccttttatgtagaagactattgggagagtttaggggtttttactggaaatgccggcgatgaattggtgatcaataaacagcgtattccttttcaagacaccgtttatctattaaaattcccagtaaactcacaaagtagctggtctcgctctaataatcgtgtcgttaatttcgatttaaccattgccggttttggattaaaccaagctcctggatacatcaaaaacaccgatcaagaaactcgtactgtggtaggtgaaggtcaggttattattcctgatgaatttggaaatgccatgcctccggtagatgcatatatgatcgacgtaatgcataccaccaccgatagctttttcttaggtggacagcctgcacctccagccttaatgaatgcctttggacttactcagggaaattcacaaactacccactttgtagtgttttatgctaaaacaggatcgggctaccccgttcttagctacaatttagatggacttaataatattactggcttcttttaccgtccttacgtagtgcgtaattccttgggaattggattagaagagaatcaagcttctaatatccaggtttaccctaaccctattcaaagtggtgagaccttaagcattgcgcttgagaacgaaaatgaattagggcaaatcgaaattctgagcctcaatggtcaagtattgagtcaaatcaatcgcagcgaaattgctaacagcggcaagcaaataaatatcctcccccctgcacatcctggtttatacctggtgcaaatcaaaaaccaaaaaggagaagtactgaagatgcaaaagattcaggttctctaaagattaatttgttcgcatagcaatcctaaggccacggtccatcattacgatgatcgtggctttagtattttaaactggatcgaattgcaaattcgatccagttgcaaattcgatccagttgcaaattcgattcagggtcaatactggcttgaatttgtaataatggcttgaatttgtaattcaagcccgagctattcttcattaatcacccaacgaaatccaaattgcaaggatcgtatataggcctcgctactaatgccttcatagataatttgctgcaatccatggtaatagctagcctgaacttgcaaacgatcactaagggagtagagcaaagcgacttgtggaccaaaatcaagatacttataggcaagattattcggactaagcctgtagaactgatcctctcctgccggatgggcttcaccattgtctcgtctccaggcgtattctgttcgcacataataggccaataataaagaggtgttccaggctagctgaagctgaaacttatccaaattataggaatagtaaataggcaagcttaggtagcccaataggcgatgttcggttcttaaatcctggtaatcccgattattggctggaattttataataagggccaatggtcttttccttactgcctatttgctggaggtttaagctaaatccaagattggatttttcgctaagactcctttcggcaaaaactcccagggaataggcggcacccaaaaagcgctcttgttcctgcaaatcggcatcatagtctgtccaaatatgacttaaacccaattgcgctatagggccatagcggtattgtgcttgcaaattgaaaccgaggataaataaggcgaggcagaagaaggttttcatgttttaaaactggtttgaacttacaactaattcaaattaggttttgagctacgaatataaggggagaattggataggttgttgcttcaccgcccgcttcgctattgcctcaccgcccgcttcgctagaggcacaaaggacgcggaggtgcacggagggaccttagagttcctttgcgaaactttgctccttcgcttctttgcggttagattcaccgcccgcttcgctattgcctcaccgcccgctccttcgtcgctagaggcacaaagagcgcagaggtacacagaggtattttgtggtatgcttcaccgcccgcttcgctagagatgcagagagcacagagttacgcagagtgacctactggcagacagagagatacttttcgaaccttcccgcctaccggcaggcaggtgcttctttgcttcttcctacctatcggcaggcaggtgcggttaaacccgctgcaccaaattttgaaagaccaatcctacttccttggctccaatcaaatctaccgtctatggtctatctactatcgtctcaaacaaactaccaacgactaactaccaactacctaattcaccgcccgcttcgctattgcatcaccgcccgctcctttgtcgctcgaggcacaaagagcgcggaggtgcacagaggtctaaggagatgctttgcgaatctttgcttcttcgcgtctttgcggttaaacccacggcaccaaaatttgaaagaccaatcctacttccttggcttcaatccaatttatcgtcccggttctaaggagttcacaaaagctgagaacttgctaaactcctccctttccagatgaggagcaagtacatccaaatagtcaatttcgcgcagttcgaatcctttgctgtgatctgctctggcacgatccaataaactccgggcctcttttcctgatggttcactaaagaaggcataataattaccccctttcattttatgcagtttagaaaaatcattcaaaccgcgactaatggaagcaaactctattaagtgacgctctatggtatgagcttcggtattgaagtcgatggaaaagcctgctagcagggctccgtttttacctataaaatctaccttatgctctaggtaaatgctattgataaatttaggacttagggtatactctttatctatacgatcaaactcaggacgtttcaaacattctgaaaaatgacgcttgaaactgggcttcttctccgcgcttatggaatcagagccttcatccacataagtgcgaaaaagttgcagataagaatctagatttaattccaaagcaatcggatgaggcttatcgattgccattaaacccgcagaataggtgtttaaataattaaaatgacccggacttaaaaaacgatttttccactcggacctaaagatacccgaatccttttccagatctctaatttcttttcttaaagactttaaattacgttccaggctatttaagacatccttttccaaaaaaggacgcatccaatgcaattttcgtttcgaaaaatcaaaatgaacaaagctttcagatacggcatataagcccacgcagattttctcctcgttgagggaattggtgcgtatgtagagtttgcttataaaagtgttcatggccttagtatttacaaaaatccaaaaaatctacgaaaggcgcgggctatcgaatcccatcgctcttcatttagcagaaattcgctaattcgctggtgcagttctgggcttaatgcccattcttcaggaatagattgcttaagacgggccaatttgggggccaaggaaggcagtcggttttcataatcctgcagtacggctttaaaataactttgatctatatactttaaaatggaatgcccgtaattcgtacgcagcacagaattgccgatcgaagtttctggcactgccttaaagtcatttttataattaggacccttaaaaatttgggcatggtcaatcgctattatttgatctcccgagcccctttttaggagtaggttaaaattggcatcagatcgatcggtattggccatatgcaggtcgaaaatggcaatacgaattaaatccagtggattttgaatacagttaaagtcatgcttgcttcgtatcaaggcgctatgttgactcagcgcatcattttgaaggacttcctgggagccaaaacctagcgatccgactttaagccagggataatctcgctcgcgaaaagaacccgcctcggccttaattaaagctacggggggaatgggcagcccaaagtgatcccctactattttagcggtgtattcatagatcaggtcgatggtatccgttcgtggagaagggaatttggtccagtaccgcgaaaagtccgaggccaatagtaaaataggccagctatgggtagctcttttttcaataagctgaagactggaccgtatttccattttccaaaaaaccttaggcttgcaattcggaaattagcctttctccgggaatcatctttaaaaagaaggaagatttacgatttgcttcaccgcccgctgtgctattgcctcaccgcccgctcctttgtcgctagaggcacaaaggacgcggaggtttacagagaaactttgcgaacctttgccccttcgcatctttgcggttagattcaccgcccgctgcgctattgcctcaccgcccgctccttcgtcgctccccgcctaccggcaggcagggaggtacaaagagcgcagagttacgcagcgttacacagcgttactcaaaggaactttgcgatccttcccgcctaccggcaggcaggtgcttcttcgcgtcttcctacctatcggcaggcgggtgcggttaaacccgctgcaccataatttgaaagaccaatcctacttctttggctctaatcaaatctatcgtctcaaacaaactaccaacgactaactaccagctaccaattcaatcaaatctatcgtctatagtagttactatcgtctcaaactccccccttaagcaatacccgatgatgtacctccccggtatcacaatcatcccataatagaataagaaaacgatctcccggtttggggttttcgcaagcctcaatccagttttgaaaactttggaataaaccatttagggtattttcctccgaatcttttaccaccgttaacattacccttatgggtgcattgcagagcaacagcttttgaaaatcgtaacggataccttctagctttcggtcgcttacttcactttccaaacaaaggacaaccctttccaattccccatgttcatctaaggaataagcaacaaaatcatagagccattcggcatttttagtactgggacaatactccagtcgaaaggattccatgagcgtaccaagggcctgtacatagtcctttgtaaaatcaggctggattccattatgcttgagatcggaataatttgaacagaaagcttgcgtgcattgaagtattttctgttctaaatcaagtctaaaatttataagaaccatagaggtctaaatctattcatcaaataaggctagttttttccaagatttcctgggtgtacattaaaaaacaggaaaaacccccattttacagcttctacctcaattaccagctcataaaaccctaaattcctgatttaatttgctttaaactcaataaaaaaacctaatacatgtataatgctaaaaacatagtttggattaaaaatgtcaaacgaaatcaaggaaatgattgggcttatgaagaggtagattgcaagaaaccatttctattaaactggcctagtgctaaaggaggtagtgctcgtactccaaatgttggtgacattattgttttgtttcaaaagcctaataaaattaatggccgtaagaattatctagttcacctaacacatctggttagtcctatttcggaaaaggtaatagaagatccagataggcctgatcatagatggtgtagagaagttcaattaattgcaaaagcaaatccaatttacgccatttcgaatccaggttactacaatttttttaagcctaatcggggactaacaaatccaataatcaatcttgaaaatgacagagggtgggatcaagcacaaacgcaggaagatctctggcgactatttagtgatcatctatgtataaagtccgatgaggacttaaggattacccccgaagccttagaagattttggtgtagtagaaggggacagaattattaaagagcatattcaattagaattaagtcgacgtgatgcgtcgatagttcaaaaactaaaagaacaaacacttaagaaacatgggaaattgcaatgcgaatgttgctcttttgactttttggaattttatggaccaatcggggccaattttattgaatgtcatcataaaaaacacattgcggatggtgaaaggatcaccaaagctgaagacttggccctagtttgttccaattgccatagaatgctacatcgcaaattggaagatggaagctacaatagtacagattcattgaaagaaaaaattcaatgccaaaatcctcttgattcaaactaaaaaaagcgaccctagggccgctttagatgttttcacaacagaataatctttattgtgattagcttcaaattgacttcaaacatacaaattttgatttaaaaaattgagtccaagtcgcaattgaacactttgggaattccaaaaaacaagcatcaattactatttttaaataagattaaagctccttttaccctataccttaacctaaatattatcacatgaaaaaaattcttggacttgatattggctctggcagcattggctgggcatttgtaaatgaagctgaaaacaatgatccaaaaggattatcaaaaattgtaaagcttggagttcgagttgtgccttatggcgacaatatggtgaaaaaagatgccttaggaaatatttctacttctaaggagccaattaaggactttgaaaaaggtatggcactttctcttaatgctaggcggacccaaatgagaggtatgcgccgaaatttgcaacgctacaaactgcgaagagaaaatttagtagcgatattaaaagaaaatggccttattaccgatataaccgccctctttgaagctactaagaattctacattcgaaacacttagattgagagcaaaggcagctgaagatcgaattgaattagaggaatttgctcgagttcttcttatgatcaacaaaaagagaggatacaaaagcagtcggaaagctaagaatgaagaagaaggtgctgctattgattcaatgggaattgcaaagcagttatatgatcacaatttaagccctggagaatatgtggtccaactaattgaaaacggaaaaacaaccattcctaagttttacccttcagatttaagagccgaatttgaaagcatttggaagtatcaaagcactcattatcctgaagtattgactgcgaaggttcttaatgacttaaataattttagcagatctcaaacgacaaaatatttcctcaatcaattacaaacggactcgtccaagcttgtaggtaatccaaaggaaaaaaaggaagcgaaatatcgtttacgagcaaaagcgatacatgaaaaacttcccctagaagatctgattcatgtattcgctgaaataaatggtgatatttctaattcaagtggctatttaggtgcaattagtgatcggagtaaagaactctatttcaaacggataacggtcggtcagtatctctatgagcaagtggcaaataacccacatgcacaattaaaaaaacaagttttttaccgccaggattatttagatgaatttgagaaaatatgggaggtacaagcaaaagcacatcctatattgactaaaaaattaaagactgaaatacgagatactgtagttttttatcagagaagactcaaatcccaaaagcacttaattacagattgcgagctagagaaatatcataaagcaataccaaagtcctctcccctctttcaagaatttagaatttggcataaccttttgaacatcaggctctctaaaactaatgaaggggaatacgtattgaatgaagagcaattgaatattctagggcataaacttagttttaaagagcaaatctcaggagctgaactggtaaaagaactaaagctagaaaaaggctggaagtgtaatttcagcaaaatagaagggaataggacgaattgtaaaatgttgtccgcctttttaagaattgtggagcacgaaggatatgaattaaatcccgattctgaaactcttcttatagatcttaaagcaattttctcctccttaaattttgacactcaggttttagaatttgatattccttttaaggatgaaggatttgacaaacatccgaatttccaactttggcacctcctctattctgcagaagatgatcgcaagcttaaagatgttttagccaataaatacggttttaatgaatctgcctctgccattttagccaatattagttttgaatccgactacgggcggtacagcagtagagcgattcgaaaattacttccccttatgcaagagggtaatgatttatctgaatccttagctttaattggttaccaaaaaatcaaaccagaaattattgaagaattagagctccttaagttaggtgcccttcgaaatccagtggttgaaaaagtacttaatcaagtaatcaatctaattaatgcaattctcaagcatcctgaaatgggacgtccggatgaaatacggatagaattggcgcgagagttaaaaaagaatgcagagcaaagacgtgatatgaccaaaggaattgccgatgcaacggcaaataatgatcgtatacgtaaactcttaagttctgagtttggaattcaaaaagtgtccaagaacgatattattcgctataaactttgggaggagtgtggctatgtttcaatatactcaggcgaaattattcccaaatccgaattgttcggtaataaatatgatatcgaccatattatcccccgctctaaactatttgacgactcgtatagtaataaagtactttgtgaaagagcttggaatgaagaaaagggcaataaaacggccaaggaattcttagaagtaaagctcagtgccgatgattttgcaagctacctgaagagaattgaagatttaaaagctaaaaaagaaggtattagcaaaactaaatttttaaaactcagctgggacagcgctgacatccctgaagacttcataaagagacaattacaggaaagtcaatatatcgcgcgaaaagctaaagagattcttcaacaaataagccttaaagtaagcactaccattgggccaataactgatcgtttgagaacagattggggcttagtagacgttatgaaggaactcaattggaataaatatcagtcattggggttaacggaagaaatagttgataaaactggcaaaaaacacaggaaaattagggattggaataagcggaatgatcatcgacatcatgctatggacgccctgacggtggcttttaccaaaccaagttttatacaatatctgaattacctaaatgccagagatcgtcatgaccaaattggcaaggaggttttcggtattcagtccaaagaactctttaaggatgatgccaataaatggcggtttaagtcaccgatgccaggctttaggaatgaagctaaaaagcaccttgaagagattctcgtttcgaggaaagccaataacaaagtggtaaccttaaacgtcaataagattaagattgggtcaggaaaattccgcaaacagatcattgaaactccccgtggccaattgcacaatgaaactatatatggaagtttaaaaaggtataaaactaagttgattccgattaatgccagtttagacttagaaaccatattaaaagttgccaataaaggacatcgcgaagccttactattaagattagaggaaaatgacaatgacccaaagaaggcattttcaggcaagaatagcccatctaaaaagcccatcctttttaagggggggatagaaactttaccttctaaagtaaagatcagctatctggaagaggagtttagcattcgtaaagatgtaaaccctgagaactttaaaaatgttaagagtttagaaaaaataattgacgccggagctcggagggcattagaaaaaaggctcgaagaatctaatgatgctaaaacagctttctccgatctggaagaaaatcccatatggctaaatgaggaaaaacgaatttcgataaaaagtgtaaagattagtggggtaaaaaacgcggaagccttgcatcgtaaaagaggaatagatggagagctgatcttagatgatcaaggtaaggaaataccaactagttatgtgagtacaggcaataatcaccatgcggccatttatgaggattctgaaggaaacctttatgatgaagtagtgtctttctacgaagcagtgcagcggtacaagcaggataaaacagtagtttggaatccaaatagccttgggcacccactgaagttcactctaaagaaaaatgaatacttcgtattccctgctgaaggatttgatcctctagaaatagatttaagggatcctgaaaattattcgataataagcccaaatctttatcgtgttcaagcagtttcacgcttagcatatggcactgccattattcgggaatatgttttccgtcaccatcttgaaacgctagttgaaacgaataaagcattacaaaacattacctataaaaagataaaaagcttagaaccactaaagcaaattgtaaaagtgcgagttaattatttaggtgaaattgttcaagttggagagtattgattaagcgaaccttatacttcggtaacccggcttacttacataaagaaaagctgcaactcaaagtagatttcccatcagaagaggggaaatcagccaaaacaattcctattgaagatattggaattttaatcctggaccatccgaggatcactatttcacaggctcttttagcagatctaattgatcataatgcagctatacttagctgcgacagccatcatttaccggcgggtctctttatgccaatgagcgctaatcataccttcacagagaaattgcgctttcaattagaatcatcagaacccttgcgaaaaaacctttggcaacagaccgtaaaatcaaaaattgagaatcaagcacaggtccttaagggtataggaaaagaggccagcaatatggaaaactgggcttctaaggttcgaagtggggatcctgataattatgaaggacgtgcagcagcgaattattgggtaaagctaatcgagtccgatttcccttttaggagaggtcgatatgaagatgttcccaataatctcttgaactatggttacgccattttgcgtgccattgtcgcacgaagcttagttgcgagtggaatgcttcctgcagtaggcattcatcatcgcaataaatacaatcctttttgccttgcggatgatatcatggaaccctatcgaccatttgtggacttattagttcttgacattgttgagaattttgatactaaagatattgaggttttaagcccagcaataaagagggagctcctagccttgcctacaatcgatgtttacattgacgatatgaaaagtccattaatggtaggaatgcagcgaacaacggccagcttaatgcaatgttatgaaggtgaacgtcgcaaaatagcttaccctaaaatacaaattggcaatgttaagccacgatcagtttaatgcttatcgcatcatgtgggtatttgtgcactatgacctaccgactgatacaaaaagagaccgaaggcaaggtgcgctttttagaaaaaaccttctaaaggatgggtttacgatgatgcaatattcgatttatacacgacattgctccagtcgagataatgctaatgttcacataaaaagggtaaaaagcttcttaccgcccaagggggaagtgatactattttctcttacagataaacagtttggcatgatggaattttttcgtggtaaatcagaaatagaaaaaccagataccccgcagcaattggagctattctaggtcatttttcaattccaaaatcggagcctacccgcctgattgtcaacctagtccgtcacagtaccctgtgacagaactaagttacaattcaatttgaaagctaatcacaactacatttgtaagacaaaacgaatcaattacctgtgacagaactaagttacaattcaatttgaaagctaatcacaacatactgaatgtagcgccgcaagggagtgctcctgtgacagaactaagttacaattcaatttgaaagctaatcacaaccatcactaattcgcctatttccaaatattacctgtgacagaactaagttacaattcaatttgaaagctaatcacaacttgcaccgataggcccctatgagcgcgtaacctgtgacagaactaagttacaattcaatttgaaagctaatcacaacccttaagtaatgagcccagcggcaacggcccctgtgacagaactaagttacaattcaatttgaaagctaatcacaacttttagcttcaaggggcaaaccgaggaagtcctgtgacagaactaagttacaattcaatttgaaagctaatcacaacatttgtccttgcttaatgtgcttctgaaagcctgtgacagaactaagttacaattcaatttgaaagctaatcacaacctcagaaatacgcaggtgatgcgcaattttcctgtgacagaactaagttacaattcaatttgaaagctaatcacaacatatggccgccactgaaggggatatgaatacctgtgacagaactaagttacaattcaatttgaaagctaatcacaaccattgagcacggcggacattttaggcgagccctgtgacagaactaagttacaattcaatttgaaagctaatcacaaccaaaaccaggcgcgcttagagaatagtgtacctgtgacagaactaagttacaattcaatttgaaagctaatcacaacttataatcccttcagcagtatgattgaggccctgtgacagaactaagttacaattcaatttgaaagctaatcacaacaccctgaatgagcttaatgcgctcattatgcctgtgacagaactaagttacaattcaatttgaaagctaatcacaactgatccaaacgggatttacaatattaatcccctgtgacagaactaagttacaattcaatttgaaagctaatcacaacctaaaggtaacattgactggtacgctcttacctgtgacagaactaagttacaattcaatttgaaagctaatcacaacatggcagagcctgtagcttgggccgaaggccctgtgacagaactaagttacaattcaatttgaaagctaatcacaactgcctgaagagcttattgaatcctttttaacctgtgacagaactaagttacaattcaatttgaaagctaatcacaacggcacggcctgtttaacaacctcccttaatcctgtgacagaactaagttacaattcaatttgaaagctaatcacaacttttcagctgccgtcgcgctagccgccgcacctgtgacagaactaagttacaattcaatttgaaagctaatcacaactcatcattgaacccttcgccaaacaggaatcctgtgacagaactaagttacaattcaatttgaaagctaatcacaacaagctttcacctgggccatctgtaagtcccccaaaaaatccaacagtttaaaagtgtgtaaatttaaactgttgactatgaaaaaatcaagatttagtgaaagccagatcagccaggctttaaaggagcatgaggctggtaagaaagtacaggatatctgcaaggagttaggtataagcgccaatactttttatatctggcgcaagaagtacgggggcatggattcagcaatgctacgcaagtacaaggagttagagcgagaaaacacgaagctaaagcagatgtatgcggatttgagcttagaccacaggatccttaaggatgtggtggaaaaaaagctctagggctctgtcagaagaggtttttagcaaagcagattaaagcggattacgctgtcagtactgccagggcctgtaaaatcattagccttgagcgctctggatattactatatatccaagcgagacgataaggaggtagaggaaaagctacgctggtacgcggagcattatcctgcgcgtggctgcccattttataccaagcgtattcgtaaagagggttatgcctggaacaagaaacgtatccgcagggtgtacatcaaactggggatgaacaagcgcaagaggaaatggaagcgacgtattcctaaccctgacaaagaggtgttgctgcagcctttagctcctaacctatgttggagtgccgacttcatgcaggaccgcttagagaatggtgtgaaaatgcgtgtgctcaacattattgacgactacaaccgcgaagctttggcttgcaaggtatccagcagtttcccttccgaacatgtagtagagcaatttgagcagctaatagagtggcacggtaagccatttaccataagaactgataacggaacagagtttatggcagaagcctttcaaaagttttgcaaacgacatcagataaaacacttaagaatacagaaaggaaaacctatgcagaatggcttttgtgaacgctttaaccgcaccctgagagaagacgtgctcaacgcttatctctttgaaacgaagacgcagatgcaagagttaatcaatcattggatggaagactacaatcaaaaccatccgcattcttctcttggagacatgtctccaagagaatttaaacaaaggcttattgcctaaaatcgataatttagacctgttggaataatgggggacttacacatccggggccacccctgtgacagaactaagttacaattcaatttgaaagctaatcacaacaaaatgttctcgtgcgctttcaaaggcatccctgtgacagaactaagttacaattcaatttgaaagctaatcacaacatatcgaggtgacagaagatgctagagtagcctgtgacagaactaagttacaattcaatttgaaagctaatcacaactgccaaagggtttcgtctgtgtcttttagacctgtgacagaactaagttacaattcaatttgaaagctaatcacaaccggtcgttaaaaataggagttcttttccgcctgtgacagaactaagttacaattcaatttgaaagctaatcacaacagcataatagtggttgtcagctgttagcatcctgtgacagaactaagttacaattcaatttgaaagctaatcacaacaatatttttgtttatttgtgtaaaatcaatcctgtgacagaactaagttacaattcaatttgaaagctaatcacaacttgcaaggtttggacatacctgcagcgattcctgtgacagaactaagttacaattcaatttgaaagctaatcacaactggtatgacaccagtgtagtaccggatccacctgtgacagaactaagttacaattcaatttgaaagctaatcacaacttaaaatatactgatattaaacagaaaaaacctgtgacagaactaagttacaattcaatttgaaagctaatcacaaccaatatgcttggcaatcatttcaagggcagcctgtgacagaactaagttacaattcaatttgaaagctaatcacaactttacggcacagcggatgactttattagtacctgtgacagaactaagttacaattcaatttgaaagctaatcacaacgaccaaagagattctaagctttgtcaaatccctgtgacagaactaagttacaattcaatttgaaagctaatcacaacacttttacactgctcaagaagcaaaggatgcctgtgacagaactaagttacaattcaatttgaaagctaatcacaacgggcaattcttttatgtacactcaaaaggacctgtgacagaactaagttacaattcaatttgaaagctaatcacaacttgcaactgaactaaggagtgtttatcattcctgtgacagaactaagttacaattcaatttgaaagctaatcacaactatttatatacctttgattttaactcttgtcctgtgacagaactaagttacaattcaatttgaaagctaatcacaacgcacactacgatcaccatctacccccagatcctgtgacagaactaagttacaattcaatttgaaagctaatcacaacttgtttacattgggctagtgaaaatggtaccctgtgacagaactaagttacaattcaatttgaaagctaatcacaacctcgtggtggtagtcgttattctgaaagtacctgtgacagaactaagttacaattcaatttgaaagctaatcacaacttgaaaacaaaattaaacgtattgaatctgcctgtgacagaactaagttacaattcaatttgaaagctaatcacaacctatctctagagaagaagttgatgaacgtgcctgtgacagaactaagttacaattcaatttgaaagctaatcacaacgagtgcgaaaaggaaacggccaacaaatgacctgtgacagaactaagttacaattcaatttgaaagctaatcacaactacaccgggttaaagtttacggaggtaaaacctgtgacagaactaagttacaattcaatttgaaagctaatcacaacatgttatcacttgtaagagtgcaacgcaggcctgtgacagaactaagttacaattcaatttgaaagctaatcacaaccaccgttaaatattacgtttagatggccttcctgtgacagaactatttacaattcaatttgaaagctaatcacaactactttcaagctctgagattaaccattcaacctgtgacagaactatttacaattcaatttgaaagctaatcacaacccgctcacccgcacacgcgtattataatgaacctgcgacagaactatttacaattcaatttgaaagctaatcacaacttccgggggtggtttccattgcggatatgccctgtgacagaactatttgcattttttaacaccaaaagataagaaactaaaggaaaataatttttaaaacctcctttaaaatattaagaagaaaacggttctacaatgctcctttacaccttatcctaatctccccttccctcaagtccaagtttacctcccctcctatctcaaagcctaggctttccagccatttcccttccaggcggatctcaggtactttggtagagtcataagatcgttggcgatgcttggcatgtattttaagagttctattgcgagtcatatctgttcgttaaagcgaacacaatataaaaaagatttgatcaagtttggaatagtgaacaaatcagatgagaaatatctacagttcttaggttccaggatcaaagaacttcgcgaaataaaaggcttagatcaaaaagcttttgctttccattgcgatataggtcgtactcaattgcacaaaatagaaaaagctgaaaccaacccacgggttctaaccctcttaaaaatcgcagcaggccttgaaataagtctggccgaacttctaaaagactaatcacttaaagctgtcctatccttatgtaggtttgacacatttcagttaggcttataccttttgataaaaactggctactgcacagcttaccgaaaggttagcgaggttaaactcgcctcacatcattcatagaagaaaacaacatctcttgtcctcagtccgaccagcgaccaaagaccaactaccagctatcttctctcccgctccttctcacaaatcctccggtattttcacgcagaacaaggttctcccattatggaaatacattacccgtcggtcagggtcgatcactattttgctgtatatatttccaaaagtcctaagcatggcattgggatcatttaaaaggtcacctgtaagcaggtctacaatcaccaattcttgggtagacataaataatttgccttcaaaataggtcacccggtcttcaataccatcgggcaattcattattcgatctaaacagactgccatcacttttatgtaagatgaccagctccggtcccaccccttttatatagactttgtagtcggacagatacatcatcccctgatcaatattactaagacgtggttgggcgataattccgctaaaatcattagtccatatcgaatccccggtcattaaatcaaggcaaaaaaccctgcgttccaccgctccgtaaactctttgattatctacctgcaggggtaatatgccaccaaacacattaaaatcgcggtttcgccacaataaggaatcggcggtgagatcataggcgaaaatgtcggtttgatctttattggtataactactgcgatttttccaaactacaatatcatggccatcctctgtttcaccaaatcccaaagcggagaaaaaggggacatactcatcggtccgagtaaagggatagaccgtctgccaatcttcatggtctaaggggctgcgcaataccgctgctccatcatcaccattatactgtatagttgtatagacaaaacctttatagatatagttataggggtgattgcgagaaattaaagaagcccattgccggctgcgggtctccaggttcacacagtccaccgatctttgagtgttcagaactaaaaattcaccttccgaactggcactttcatctatatatggtaccgcgccatcaataaaatcggaccaaagatcaataatatggccatcggcagaatccaagaacatcaggggactctctaccccctccatggtatattctgaactcacgattaccatccccttatagagaaatggattaattgacaaactaaaatagagttcggggtctggtacgatgggccgctgccaaagaatttcataggctggcttagactgaggttttggtggctccttatctttacaagtcaccagcaacaagcaaagcaggactaagaataaaggacttattctaggggagttattattagggatcagtttcatttagctaattcataaaatactaatactcgttctagcaagaggtccaaagccagagtcgaattttgcttcaccgcccgcttcgctacccgcctaccggcaggcagggaggcacaaagagcgcagaggtgcaaagaggtctaaggagatgctttgcgaaccttcccgcctaccggcaggcagtcgcagtttaatccataagtccctatttagggaagaaaacaacatctcttgtcctcagtccgaccagcgaccagcgaccaaagaccaactaccagctaccttctctcccgctccttctcacaaatcctccggtattttcacgcaaaacaaggttctcccattatggaaatacattacccgtcgatctgggtcgatcactattttgctgtatatatttccaaaagtcctaagcatggcattgggatcatttaaaaggtcacctgtaagcaggtctacaatcactagttcttgggtagacataaataatttgccttcaaaataggtcacccggtcttcaataccatcgggtaattcatcattagtcctaaacagactaccatcacttttatgtaagatgaccagctctggtcctcccccctttaaataaaccttataatccgacagatacatcatcccttgatcaaaattatagagctttggtttggatacaatcccactaaaatcattagtccatatcgaatccccggtcattaaatcaaggcaaaaaaccctgctttccaccgctccgtagactctttgattatctacctgcaggggtaatatgccgccaaattcattaaaatctcgatttcgccacattaaggaatcggcggtaagatcataggcaaaaatgtcagtttgattttttatacctcctgaactactcctatttttccaaaccacgatttcatgtccatcctctgtttcaccaaatcccaaagcagagaaaaaaggatgataaaaatcggtacgagtaaagggatagaccgtctgccaatcttcatggtctaaggggctgcgcaataccgccgcgccatcatcaccattatactgtatagttgtatagacaaaacctttatagatatagttataggggtgattgcgagaaattaaagaagcccattgccggctgcgagtctccaggttcacacagtccaccgatctttgagtgttcagaactaaaaattcaccttccgaactggcacattcatctatatatggtaccgcgccatcaataaaatcggaccaaagatcaataatatggccatcggcagaatccaagaacatcaggggactctctaccccctccatggtatattctgaactcacgattaccattcccttatagagaaatggattaattgacaaactaaaatagagttcagggtctggtacgatgggccgctgccaaagaatctcataggctggtttaagctggggcttggggggctccttatctttacaagtcaccagcatcaggcaaagcaggactaagaataatggacttattctaggggagttattattagggatcagtttcatttagctaattcataaaatagtactactcgttctggtaagatgtccaaagcctgagtcgaattttgcttcaccgcccactgcgctattgcttcaccacccgctccttcgtcgctacccgcctactggcaggcaggtgcccctttgcttcttcctacctatcggcaggcgggtgc

SEQ ID NO: 3232 - DNA, 23225 bp, synthetic construct
  misc_feature 1..23225: note = Synthetic
  source 1..23225: mol_type = other DNA
aaagttccgaaaggctcgaaaccacgggcagacgccctataaattcggggatgaaaccgaactttacaaggtcttcgggttggacatccgccataagctcggcttcggtcggagcttcggagggcgcattaaagccgagcatcttgccctccttgcgacgctccacaatcttgtcaagcccgacaaacgcgccgccacaaataaagagaatgttgcgcgtgtcaatgcggatatactcctgatcgggatgcttgcgcccgcctttgggcggcacattgcagaccgtgccttcgagaattttcaggagagcctgctgaacgccttcgccgccgacatcgcgcgtgattgaaacattctccatcttgcggcaaattttgtcgatttcgtcaatatatataatgccgcattgggcgcgttccacattgaagtcggcggcgcgaagaagattgaggacaatgttttcgacgtcttcgcccacatagcccgcttcggtgacattcgtggcgtcgccgattgcaaatgggacattgagcattttcgcaagcgtccgcgcaagatacgtcttacccgaacccgtaggaccgattagcaaaatgttgcttttttcgatttcgacgccgtcgaattcgccactctgcgcggaagctttcggggactttttcgcgccatccgccgctatgcccgcgtttttgagaagctcggcgcgcaaacgtttatagtggttgtagaccgccaccgaaagaactttcttggcgttgtcctgcccgattacatacttgtcaagctccgccttcatcgccgagggggaacgcagctcgaagtcgagcataccctcgaccttgcgccgattctgctcttgctgctttacaacgaaaagattattgagcactccaatacactcgcggcagattgccgagttgtccgcgcccgcgacaagttcgccaacttcctttgccgaacgcccgcaaaagctgcacctgtggtcttttgcgcccatacactaagcgtctttcttgttttcgataaccttgtcgacaatgccgtatttgagagcttcttcggcggtcataaagaagtcgcggtcggaatccttcgcgattttttcgacactgttgcccgtgagtttcgacaaaatttcgttgaccttttcgcgccagcgcagaatttcgttcgcggcaatcgtgacatcgcgcgcctgacccgttgcgccgccgtagggctggtgaatcatcacacgcgaattcggcagcgaatagcgtttgccctttgtgccggcggcaagtagaatcgtcgccatactggcacattgccccacacagtaggttacgacatcgcaactgaggaaattcatcgtgtcgaaaatcgccatacccgcagtaagcgagcctccggggctgtttatgtaaatgtggacgtcctttttagggtcttccatttgcagaaaaagcaactgtgctattaccgagttcgccacgccgtcggttatcggagtgccgataaaaacaatgcggtcgcgcaaaagcctcgaataaacgtcccacgagcgttcgccgcgcccgtccctttcgacaactgtcggtatgtaatattcgcccataatttctttttatattatcgacttttttagagaaaaaaaagttccgacgcaacagaaaaaacaaaacccgcgaccgaaacccccaaaaatggattctcgtagtggttcacgcgcggacattcggacacaataagaagtcgcaccgaaatcccccatcccgcgcgacaaactctattccgccccaaaccgcgccgacgtccaaaaccgttcgcccgcacacaacacacaaaaaagcccgcgcggaacttgccgcaacggacgtttttgaagttctccaaacgggaactacttgatttcgaccaccgctttttcggcgatgaagttgattgccttttgcaaaagggcgtccgagcgcaaacggttggcgcgggcggcgtccttcttcaactgtttgatgagctcttcgggcttcgtgcgggtgcgcattgcttcctgccacaaagtgcggctcatgtcttcgttgtcgattgtgaggtcgttcgccttggcgacgcggttgaggaaaatgcgcatcttggcacggttttcggcttcggatttcgaagtttcaatcagtgcgtccttgttcttttcgatgtcctcgcgcgacgcgcccgacgacataaagcgcatcatcatttcctgaatgatagagtcgcgttcgtcttcaagcgcgctttcgggaatcgggaacgaaaccttttctacaagctgttcgactgccgactgacgcttcataacctcgttgttgttcttcttttcggcctcgatattttccttgattttggctttaagattatctaaatccttggcttcaaaactcttcaaaaactcttcgttaatttcgggcagaaccttttcgcggatttcgaaaatctccacatcgtagtcggccttcttacccgccaagtccttaatcgggaattctttggggaattcgtgcgaaatggttttcttttcgcccttcttcataccgataatcccctgaacaatgccttgaactccgggggcatcggcgttgcccgcttcttcccaagtcgatttctggtcgccgaaaagcggcatatccttggcgagttccgcaatgggcttgccgtcgattttgcccgagtaagcaaggcgcacaaagtcgcccttcttgatttcgcggtctacttcgtcatacttggcgcgctgattgcgatagtattcgattgcctgatcgacttcctccgcagtggcgtcggtcgatttaagctcgactttcgtttcgagcgtttcgggcatttttacttcgggataaacgtcggcagtgaacgtcaaaacaaaaccgtccttattgtcgttttcgatgttgacgattgagtaaaggtcgaagtcttcaatcttgttcatcgcgtcgatagccttgcttgtgagcgcgcgttcggattgggcttttatagcgtcggaataagacttttcgaccattgctttcggggcgtgccccacgcggaaccccgcaattttagcctcgcggacaaactggtcggtaattttcgccgtttcgtcggccgcctctttcgcggtaaaggaaactacgattttctttctcgtatcgttgatgttttcgatgtttgtattcataataaaatttccgaaaaatgttaatcctccataatctcgcatttcccccgtgcgtcaagcttttttattgttccgaaagcggcgcaattggctttgccaatgtgcatttgcttctttgttgaagtttttttataatttcggaagcggcgcgaagacaaagccctcgacggagagcgttttttatacgttcggaagcgacggcgattgccaaaggtaattacgcctttacctacccattaaatcgaaaaggatttcccaaatgggaaagacttttacacattataaatcggcttagaaccagctttatgttgtaaaacgggcgaggcgcgtgccataaaatcgcggctttgcgagccgacgcatacttaggtatgtgaggcgaagcgaaaccgatttttggctgcgagtgcgcccgttttagttagtgggaactgcgcacaagcctgtcccttaccgcaagccattcatcgacttcgggcggacgctgacaatacatacgctcgctcgaaaccttgtcgagagcgcgtaaaagcgcaaaaacattccgctgcacttccgcgggcgaaccatcttcgctcaaccagtagtggttttcgaggggcttctcaggccgcgccaaaaaaattacatcgcccgcaaagttcggcggaagctccgaaacatcgtcaaaaagcgagagcggccgcgtcggactataatggcttttgagcattccgggggcttgcggatgcgcttcattgaccttgggattgcggataacctcctcgcccaaaacggcttcaatctcgttgacgggaacggggccggggcgcaaaagcttcttgggcgaggcggtcatcaacacaatcgtcgattccaccccgcattcacacgcgccgccgtcgagaacgaagtcgattttgtcgccgagctgctcaacgacgtgctcggcagtcgtagggctgacatagccgaacggattcgcactcggggcggcaatcggcacccccgcacacttgataagctcgcgcatcattttgtgcgacggcattctgacggcgacagtgtccatacccgccgttacaatgtcgggcacacagccgcggcgcggcaaaatcatcgtaagcggcccgggccagaacgctgcggcaagcgcgcgggcggcgtcagaaaacactgcaacacgctcggccatagccatatcgcaaacgtggacaatgagcgggtcgatgaacggacgcgacttcgcccgaaaaatcctgcgcaccgcgtcgggattgagcgcgttcgcggcaagcccgtagacagtctcggtggggactccgccgatgccgcctccggaaataaaacgagccgccccaagaacatcttgcgacggccgtaaagtgcgggaattgtccattctgccgcttatttcatcaagagcatgttgcgcgcgtgcttgatagtctttttgacgtggcgctgctctttcgacgacaagcccgtgaacttgcggggcaagattttacccgtttccgtgacatagcggttcatcgaatcggcgtcgatgaaagacaattccattacgttcttcttttttgattcttttgtttcttctgccatatttgttttcagttttataaattgaaattccgagttttccggcccgattgcgccgcacataaacggcacaataaatcggatttaaggcgtcaatactgccttatgaaaaaatcaatgcaagcattttttttcaaaatcgccgttttttgaatttttcgaaagacagcaccgacaccgacaaacacacacttcgcctattttttcgcgccgcttgcgacttccgcgcccttcaaaacaaatccgtattcggagttgaattcggggttcgacgccgatttcacgacaatcgcaaacctgtcgcccctgatttcgggaagcttgattttcgtcgagacaatcttgacattgcggttctcggcggtcgtcttgcccgcaaattcgccaacaagcgtttcctttccgtcggcctttatgaaaagcaacaccttgcccgaggcgactttcgcaaacgtgtcgttcaaaagccaaatgtcgacgggaatttccgcgccgcgctcccagtcgaaagacaacaccttcgcgctgagcataacggggcggcacgactccttcaccgcaaagaacgccggttttggcgttgcgggatactcgacaagcgcattgcccgcggcggctggccaggcttcgttgtagtcccagtttaccgccattgaacagtgcggcttttggcgacgggcttcctcgaacaacgccttgtagccctgcgcctgcataaactgactcttttcaatcaggtcttcaagcgacttcgccttgccgcagaatttctcgacaatcgaggctctcagccagccgtatttgtcgaacaccataaaagcgtggtgcgcttcccaactgggcgtgtgctctatcggccaaagctccttttcgggaatgcagcttttgagcgcggcaagcgaggctatcccgttcacgccgaattccgtatacgcaaccatatcgcatttcgagaagattttgaacgcgtcgctccctctgtggacaaagaaatattgcccgtgccccaccccgttgagcggagacgtatacataaacggcgtcccgccgtcaagctccaaacagaccgcattcagcattctaagcggaatcgattgcggcgacattctcgaccacgagcagaaaagctcgttgcccccgccccaaatcgcaatgcacggatttttgcggattcgctttacaatcgcctccgcctcggatttcagaaccgacacataagacgggtcgtcgggataatagttgcacgccagcggaaattcctgccagaccaaaatgccgtattcgttgcagaggtcgaaaaagctgtccttgtttacaatcgccccgccccaaatgcggaaaatgttgaagtgcgcgtctttggcaaacttcacaagcggctcatagcgggcgcggtcaagctccgaaaagaaaacttcggggttcgcccagttcgagcctttcgcgaaaatccgcttgccgttaagctcaatctgcatcggagcttcggcgcattggttgacggggaacgcctgaggcttctcccacgccccctcattcataacaagacgaacgcggcggaacccgaccttctccgcgcgcgtttcgagctttttgccttcgggcgaaagcagcgtcagcttgaacgtgtagagatagggcttgccgtggtcgtgggtccaccaaagctcggggttcataaatgcgccttcgtcaatcgaaacactgtcggcgtcgattgccccgctctgctgaacggcgcatttgccgtccatatcgagcagctcccaaaaatacgtgcagcccttgatgttttcgccttcaagttcgagcgtgagattcgcgcttttgaggtcgtcgcccattttgtataaaagcgcgctgtatgtcaaattcgaggcattgcgcacttcgagattgaggtcgtcccaaacgcccgagggaatcagacgcgggtgccagtcccaaccgtagctgactgcgggttttgccgatttcgaggcgtttgtcctatacgagtgaaacccgaattttttttcggggaacgccttcggcacgggatttatgcggatttccaagacattgcccgatgctttgagctggtcggtgatgtccagctgaaatcccttgaacataccctcatacgcatggattttctggccgttaagcaaaaccgcatacttgtagtcaatgcccttgccgtttaaaaccagacgctgaccgcgcgaaagcagcggcttgtcgaaaaccgtcctgtatgtgaagaacacgtcttccgtccagcggaattggtcggcattcgtgccgaaacggtagtcgggatagtttttcgccttcgctatgtcgagctgcgccgaccccgggacagtcgcgggtatgaattcggcacactttccgtccgccgatttcgaccaccccaaacgccagtcgagcgcgattttgtcgcccaccgacacgcgctccgatttcgagttcgccgcaaacctgtcgggattgcacccgcacaaaaccgccgcgacggcaaccattgctataatcttcttcatataatatgcagttttttattttgattgtttttcgaaatttttgttcgcacaaaaatcaacctttacgccttttgtcaagctcgttgagcgcgaaaacatacgcccccaccgacaccgcattgctcgttccgagcttcgaaacacaaacgcccacgcgcttctcgaaattcgaaaccacaaccctgtccgaacccaaaacgcggacattcttcattccgccttcggcaaacgccgccagccccgactccgattcgagattgaaaaccttctgcacaatgcgcggaaaccttttgccctctccattgcggacaaacccgcccattcgcgccacaagcgcgtccataaaaagcccgtgcccgtatgaaagccctccgcctatgacaatcggacagtctacaatgcagactatctccgcgagaacgtcgccgagattttcgcccataatttcataggctctccgcgccgccgcaacatcgcccgacatcctgccaagcgcgatgtcttcaatgtccttgggcgagtattttttgtagtcgccaatgcccgcaagcttcgcgtagttcttctgaaccgcgcgtatgcaggcagtctcttcggcaaaactcccgggattggacttgttcgccataagccagatttcggcggcattcgagttgtcgcccgtgtagagacgcccgtcgacaacaaacccgccgccaagccccgttccgagcgttatgccgaaaagattccgataccgcttctggttgcccgccgcctccaaatgcgagtttatccggacaagagcccccgccatcgcctcgccatacgcaaaaaggtcgccgtcgttgttgataaatacgggcacaccgaattcgtccgaaagaatgtcgccgagcgcaacgccgtcggcaaacgctggaatgttgcctatgttgaaaatcacgccgcgcgtgtagtcggcggggccggggaacgcaaaacttatcgccgcgggcttctcgccgagctttcgggcaagcattttaaagccgcgctttatgttgcccacactcttttcgagactgcccgattccgacggcagcgttatcgattcgcccaattttttgcccccgcgcactgcggcaaatacgtagtttgtcccgcccgcgtcgagcgtgaaaacggttctggtatcgttttgatagtccattaacgtgtgtcttatttcaaagttgtaagcagaagctcgcagccgccgaccgcagtaaataccgcattttcgcccgcgggaacgaggacgttttccgaaaccgaaaccgcattgttttcggcgtccgcaagcccccccgaaacaatccccaaaagcttcgccttcgacgccgcaagcccgagctcctccccgtccgaaagcttcatatgctcaatcgtaaatctgggggcgtcgcaaattatgcgcggctcacagtctcgagccgtgctgattaactcgggcttcgccgacaaatcaatgctcatagccgattcccttatgcgaagttcgcgcggcttgccgtcaatcccgagcctgtcccagtcataaagccgatacgtcgtgtctgaattttcctgaatttcgagaatcaaattccccgcgccgattgcgtgcacacacccgctttcgatgtaaaccgagtcgcccgcggaaaccgaaatttcattgagatgcccgcgaagccagtcggggttcgcaatcgttttttcgtcaaccgccacgacaccgcctttaaaacccgcaatcaacttcgccccgcagtcggcttgcgcaacgaaccagttttcattcttgcgctccgaaccgggcgcggcggcggcattgccgctcgggtgaacctgaatgctcagcgcggaagcggcatcaatccattttacaagcacgggaaaacgcgaccccgcaacatacccttcacccatgatgtagcgaggctcggcggcaattatctgtgcaagcgtcatcgagtcgaaccgcccgccgattgccaccgattccgcttcgggacggtctgaaatctcccaactttcgccgattgattcccccttgtcgcccacatcgcgcccgaaaaaatcgcggagtttgcttccgccccaaaccttgccgaagtaaaacggtttaaatctgataaaattcatagttcaagggctaccacacattcacccgtaaatcaacagaaatttatcgatacacccacccgccacttttcgagcccatatcccctccatcataccccttcattcctaaacacaatactactccgccttcctcaacaccacctttttcccccaatacactgcccacccgcccaacacaacaccacactaaaaatgcaataataaagaaaatttttgccgaaaaagaaaaaaaagcttgcatcgagcgaaaaaatcgccacagtggtggctttattaaaacaaacggtgttgcgcctgtagctcaattggatagagcgtctgactacggatcagaaggttgggagttcgactctctccaggcgcgccaccgtttttttgtgcctgaataaagcgcaaccactctacggccaacccaattcttccgcctcccgtgggaagcgcggccaccgctgcggaaaaacccgcaaaacccgtttgcccccgtgtcggaccgcgcaataaataaaaacttgaaaaaagcgaacccgcccactaacatttctccattaaggttgattaaaaataactttcaacaaaacggagaattatgcatacaaaagaaactgtttggggattcgacatcggcaagggctcgctcggcgaagccgtgagggtcggaaacgaatttaaacacgtcctatcgatggaaatcgacgcggattttgccgaaatcaaaacggcggcggcaactcggcgggcttggcgcacgcgcgaggcgcacaaggcgcgcgaaatgtggcttgaaaaatgcctgtccgatgcggacatcgaaattctcgggcggcgcaaagtcgacatcgtcgacgggacttggaagctcgtttcgcgcggagacgggcggctcgaacgagaattccccgccgacggagaaaacgtctgctacaattcaatcgcgctcagatgcaaacttctgctcggcgaaaaactcgaaagctggcaggttttcaaggcattgaattcggcgatacaaaaccgaggctacgacgcgcaaattccgtggggcgacgaagacggcaagtcgtccgaaacaaaacgctcgggaaagtccgactccgcaaaaaaatcgggcgaagacgaatcatacgccgaacgactcgccctcttcgaacgcgagttcgacaaacttcttgcggaagtcgaaaaccgcgagaaatacgactttccctgctttttcaaagccgcaaaaatgggcttgtggtcgcccgaaaatcccgacaaagtcggaatccgaatcgacaacaccgccgaaaaggcaaagggctacgtcgtcccgcgcaacgccgtgattgcggagttccgcgccctcgtaaacgccgcggcaaaacagtatccgaaactcaaaggcaaggcggatttcatcatgttcggcaaggcagaagaggcatacgcctcgtataaacccgaacttcggcgcaagttcggactcagacggggggcggattccgattggaccgcgctcggacaaaaaacaccgcgcttcgacaatcgaattatcggcaaatgcaaactgattccgcgccttaacgtttgcaaaatcaagcccctcaaagagtgcaaaaccgaagacgactttctgccgcacacaataaccctcgcgctaaaactgcttaatttgcggtttttcaggggcgcgggaatcgattcgctttccttcgacgaatttttgcgcgcattcgaaatcgcccgccaaaacaaattcgcgctaaacaaaacgaatctgaaaaaattcttcaaaacaatcggcgcggaaattatggatgaaaaccagtcgagcgtggaacagccccgcgagggcggccgcgcggcgtattcgcgccccgcaatgcgcctgctgcgcgacctgattttttcgggcaaaagccccgccgaattctacgcctcgcgaatctgcaaaatcgaaaacaccgacaaaaacagggggcttgtcgccgaagacttggcgttcataaaactcatgggagacattccgtggaacggaatcttcgtccccgacgtcgacacgttcaacttcgcaaacatccgcgaaagcgaacgcgccgacaaaataaacaaactcatcggctcgcaaaacgaccccatcgtgcgccaccgcctcgcgttcttctacgagcgaatcaaactgctcgaatccaaattcggcgcgcccgataaaatcgtgctcgaattcgtgcgcgacgatttcctcggcagcaaagccaaaaaggaaatgtcgcagggcataaaaaagcggttcgaagaaaagaaaaaactcgccgaagagctcgattcgcagcgcgcggaattcgggaataaatacgcgtcgaaaaaaatgctgctgaaattcgagctgtataaaaaacagcgcggcagatgcgtctataccgacaacgccctgccgctttccgaacttgaaaatctggaagtagaacacattttcccgcgtagcaggggcggcgcggacgcgatgtacaactacgttctgaccgacgaaaacacgaacaaacaaaagggcgaaagaacgccgttcgagtggctttcctccgacaaaacaaaatgggaaagttattgcgaccgcgtccgcagcctgacgcagtcgctcggggcgaaacgctgcaaactgctcgtttcgccgaacgccgaagaactcatgcaaaaatacacagccctcgccgaaaccgcgtggatttcgaaactcgcgcagaaaatctgctgcattcatttcggcttccagttcggaggcctcaaaggcgagaaaaaagtctggaccgtctcgggcaacaccacggcaatgattcgcggccgctacggactcaaccggcttcttcataacgaagaaatatcggaagacttgcctctcttggacagaatcgtcaaggagaagaatttcgaagaaaagaaccgcgacaacaaaaagcaccacgctttggacgcaatgtgtatctgctttgcgccgacatcaaacgccaaaaaagccctgtctcgcaaaaatatcctgcccgaagaaatcgcgaaaaatcccgaaagcgacgacgcccgaaaattctttgccaaatatctcgcggaagtcgtcccgacaaaagtcgcaatcaaaaagcccgagctcgaacaaaccatatattccaaacgcgtaatcggcggcaggcaaacaatcgtaaaaaaatgcaacgtccgcgatttggcatacaagggacaaaacccgaaatacgatttcgacacattgaccaagcgcataaaggacatcataaatcccgtttcaaaacgcgtgattgaagatttcgcaaaaaccgaaccgaccgaggcggagtgggaggattggtgcaaatacgaagccgcaatcccctccaaaaacggttctcccacccgcctactgcgcgtgctcgtcgaaatcgggaatccggaagaatataaggatttatcgaaggacggttgcggcgcataccgcaaaggtgattcgcataaaggccagttcatttggaaaaataaaaaaggccgctatatcgtggccccgatttacgcacacgcttcaaaggcaaaagttctcgacgacctgcaaaacaaccccgattgcgcggaaatatgcgggttcttccgcacaaactgcctcgtaaaaatcccgaacgacgttgcggataaagacggaaaaattttactaaaagccggtttttataaatcaaatacaataaaaacagaagggcgcgtaaaattaacaaacccaaatggaatcatcacagaaataggcttgcaacacctaatgaacgcgggaatgaagcgggttgaaacaaatacaatataatgagctatcatattctgcacattatggattacgggtgcaagctcacgcgcgagcgcggcttgctcgtatgtaaaaaagacggcggaatattgggtaaaatcgcgttggaggacttgcgcgcggtcgtgctcgcgaacgaaaccgtgtctattagcggcaacgtaatcgcggctctcgccgagtgcgacgccgtaatcctccattgcaaaaatttcaaacccgtaggcataacaatccccaacaatagaacgtatgacacaagcgttgttctgaaccaatcggctggaaacaaaaacctgaacgccgcaatctggcggcggctgctcgcggcaaaagtccgcaataacgccgaatgcctaaaactcgcaggagtcaaagattgccgcctctttgcaatggcacaggtttcgggttcggctctaaacgagtcgctttgcgcccgcgagtattggaaacactacttcccgcttttgggcgaatacggcgtcggacgcgaccccgaaaacgaagattcaaaaacaaacatgctgctcaattacggctacggcataatgtcggcaataatacaccgcgcaattatcgtcgcagggttgaaccccctcttgggagtaaaccataaaacatattacaaaaacacaccgcttgtccacgatgcaatcgagccgttcagggcttttgtcgatttcgccctgttcaaatttctgacgacaaaaaacgatacttctgtttcgaattgggcggtatttttcggaaaatttttgcgggatagacgcgtcaaaaagggaatcgtctcgatgaaattatgcgacgctcccgactacctctgccaaacgctcgcaaacacataccgccgcaaaaattccgaagaattatggacaccgaaactgtaaaacaaaaaccgcaaccacgccccgcaaatgccgcgcgaaatcagaaaaaggagtccgtttagaatgggctggttaatggcgatgttcgacctgcccgttttgctggacgaagaacgcaaagaggccacccgtttcagaaacgccctactcgacgacggcttcataatgattcagtattccgtctattcaaggccgtgcgtttccatggagcggatgaaaaagtattacgaacgcgtaaaatcatacgcgcccacaacgggagacattcgacttctgttctttacggacaagcaatgggctacaagcaaattcgtgtgccgacgccccaaaaaactcgaaaaagtccccgaacaaatcgaattttttacggaacataacggggagctctatccgaaagaaccgccgaaatacgaggtcgacaaaaaagacaataacttcctgcttttttgaaaaaataaaaaatatgccgaattccaaggtactatgtagagcttaaaattcggcaaaatcagttaagactttacaactaaaaagcatgacaattgtctaacacaaaataaattgcgtcaagcataatctaaaaaagaacactttgttgtaaagtcaaaacgatttgcgtaattcgaactcgtttgtaatcaatctaaaaaagaacactttgttgtaaagtcaaaaccgacgaggaatgcacaaaaacaacagccccaatctaaaaaagaacactttgttgtaaagtcaaaacacccattacttacgcttaccgcgtttacggaatctaaaaaagaacactttgttgtaaagtcaaaacaacggagcgattgcgccgcgaacaggtcgaatctaaaaaagaacactttgttgtaaagtcaaaacaacggctccaacagctcgtccagctcgaacaatctaaaaaagaacactttgttgtaaagtcaaaacgtggcaaaggatggcaatggacgcgcgtgaaatctaaaaaagaacactttgttgtaaagtcaaaaccattcgcttacattcggcgtagtggttgttaatctaaaaaagaacactttgttgtaaagtcaaaactatggattcatcatagttgcgcgactcggcaatctaaaaaagaacactttgttgtaaagtcaaaacgaaaatgacaatgcaatggccgcaggcacgaatctaaaaaagaacactttgttgtaaagtcaaaactaacgttctcgactatcgttgaatcgtccgaatctaaaaaagaacactttgttgtaaagtcaaaacttcaaaattcgagtgaattattaaattattaatctaaaaaagaacactttgttgtaaagtcaaaacattatgctttaatcattggatattttttgcaatctaaaaaagaacactttgttgtaaagtcaaaacatatatgcgatggataggcagacatacccaaatctaaaaaaaaacactttgttgtaaagtcaaaacatagctcgcaacgtcctcaaccatgattttaatctaaaaaagaacactttataagaataggcttattaaaaaaaacttacaatatttttattatatcatcgttttgacgcgccctttttcgagttccagtttgcgggtaagacattttggcagacgcgtttcgtaatgccccacatagattattgttttgccgtattggctcagctcgtcgagggcggcgttaaagcggtttgtttgcgcgctatcaagcccttggcacggctcgtcgagtatcaacaatggcggatttttcaccaccgtccgcgcaagcaacgccattcgctgcttcccgagaggaagctcgtttagcaaaatgtttttctcggcagtcaagtcgaaaaattcgagagtctgctcgattttttgactgtccgaaaaactcacgtccaaaaaccatcccatcgtatccaaaagccccgacgctacggaattccacacagtcgcgttcgggtcgaaataccagtgcatttcgggcgaaattatgcccattttctttttgatgtcccaaatgctctcgccgctgccgcgcggcttgccgaaaaggcggatatcgttgccgtaagcctgcggattgtcgccgcagacaagactcagcagcgttgatttccccgaaccattgcgcccctgcaagagccatttttcgcccgcgcggacagtccaggaaacgttgtccaaaataattttttcgccgtagcgcacacagacattgttcgcctctataaaagtttcggagggaatttcgggcgactgctgcaaaaaatagggaaccgtttttttcgaaacggaaacttcgggcgaatcaaccgcgacgccatcggtttctacaattttccctcccgaaattttcgcgaaacggttgattgatttcggcagctcggtgtcgttcgttgcgatgacgacagtcgtgcccgccgcgcattcctcgtcgacaatgtcgttgagcgtcttgcgcgaagccgcgtccaaccccgtatacgggtcgtccaaaagcagaagccgaggtttgagccacaacgcgcggacaagttgaagctttttgtgctctccgctcgaaagctctatcaactgcgtctcgcggcatttcgcaaaacctaaccgctccaaaatcggctcgacatcggcaatatcgagcccgcgctcgcgcccgaaaacttcaagctcgccgtaaaccgtcagcgtgtcgcgctcggcatggtagttgtagcgttgctgataatagaaatttctgtcgccttcaagatttgtgaacttataccaattatcaacataaaatatcttttcgcgacaaccgcaatcatcgccgaaatccgccgaaatccgcccgcccgaaatttccgtcttgcccgcaatagccttcaacagacacgatttccccgttccgctcccgcccgagacaacccagttttcgccgcgggaaattttccagtcaagcccgtcgaacaccgttttcgcgccatagcggatttgcaaagattctaccgatacaagttccatctctaaaaaaaaatcagacataaaaaagttgcggcggaggaaaacctctcccccgccgcgagtttgcgcaactcgattaaagcgtcttaatcgggcgcatcgccgtcatatacttgcgcagctttatgccgacaatttcgacagggtggttgcggatagcctcgttgacgtggacaagctggacgttgtcgaccgaaccgtctttgccttcgttgaagtttttgccgcaaagttccggcgtaatcttcttcataaagtcggcgagcagcggcttgcaggcgttatagaaaagatagttgccgtattcggcggtgtcggaaatcactcggttcatttcgtagagcttcctgcgcgcaatggtgttggcaataagcggagtttcgtgcagcgattcgtagtatgccgacggcggctgaatgcccgcttcgcacatcgtttcgaacgcgagctcaatgcccgccgcaatgaacgccgaaagcagcagatagttgtcgaagtattcctgctcggaaatcttcatatcgcccgcgggcgtctgctcgaaagcggtcttgcccgtttcttcgcgccatttcaaaagctttgcgtcgccgttgcgccagtcttccatcattgtggagctgaattcgcccgacataatgtcgtcctgatgcttgcggaaaagcggacgcataatgcctttaagctcctgcgccaactcgtaggccttgattttggcggggttcgaaagcctgtcgagcatgcccgtaatgccgccgtgcttcaaagcttcggtgataacctcgacgccgtattggccgagctttgccgcatacgagggattgatgccgttttcgaccattttgtcgaagcacaaaatcgtggcagtctgcaacagaccgcaaagaatcgtctgttcgcccatgaggtccgatttcacttccgccacgaacgacgacttcaacacgcctgccttgttcgcgcccagacccacacagtaggctttcgcataagcccagcccttgccttcgggatcgttttctggatggacagccgcgagcgcgggaacgccgaagccgcgcaaatactcggcgcgaacttccgtgccggggcccttcggggcgaccataatcaccgtgatgtccttgcgaatttgcatgccctcttcgacaatgttaaagccgtgcgaatacgacaacgccgagttctgcttcataagcggcatgaccgccgaaatcacattcgagtgctgcttgtcgggcgtgaggttgataaccaagtcggcagtcggaatgagttcgtcataagtgccgaccttgaaattgttgcccgtcgcattcttccacgacgcgcgcttttcgtcgatagccgactgacgcagcgcataggaaatatccaagccgctgtcgcgcaaattaagaccctgattgagcccctgcgcgccgcagcccacgattacgattttcttgcctttgagtgcctcgacaccgccgtcgaattccgagcggtccataagctgggcctggttgagctgcctgagcttttccctcaacggcagtgtattaaaataattagccataatattttcctttcgtgttttgattttgtttagatattgaaaataaaaaaacgctttgtttttattaaatttcgataaaaattactatgcaaaattaaaaatcaagtccgcccgtgttttatgatttcctcggcgaccctccacgcgcccgcgctgtcgcccctccttatgagctccacaagctcgcggtgcagtccgaaagccgagccgaaaatttcggacgacttgtaaatgcgcgcataccacttgcgcaagtgctccgacgcaagcccgtaaaattcgagcagtatctcgttgtgcgacgcctccgcaagagccgtatggaacttgatgtcggcatcaatgctcttctccaagtcgcccgacgcatttgccgcgtcgatttcggcaagccgcgcctcgatgtttttcaagtccctcttagtgcgcttttgcgcagccttttcggcgattttcatttcgagaatctggcggatttcgtccaagtcgcagctttgggcgcgtttgagacgctgggcgataggctcgttcgtcgcgtgttgcgacaccacaaacgtcccccgcccctgcattacgcgcaaaagccctatgttcgaaagcacgctgacggcctcgcgtatagtcgaacgccccacgccgtaaatgtcggaaagctccttttcgggcggaagcttcgcgcccacaggcatctctcccgacgcgattctgcttcggattaaatccgaaacctcgccggcaagcgatttcttttcgactttcattgccactttcatttcacaccatacaccgtccgataccgcgccgccccgcaaaacgcgcgccccgacaaaatcgaccgccctaccaaccgcgtctaaaaaaaacgctttcggagggggccgacgacgcgcggcaggcaacatcatatcatcagatgatatgcttattaattccccttccccgcgccttgtcaagatttttccgaaaaaatttcaaaaaaaaacgtcccgcccgcaaaaaacaaacaccccaaaaacaccgcaaaaatattaacaacataaacgggcaatttaacgttcccaatttcgccgcaaagttgagcaacaaaatccaaagctgcgaaggcttaccagataacactaaatagaaatcatatgataaaaagaggagatttcacaaagggctcgttggcgacagacgcgccgatgatgttgccccgtgtaaaacagtcatggcaaagggcgcgaacgaaagactcaacgtcgcaatcatcggcgtcggcggacgcggagaggcagccgttgcccccttcaccgaaatgtgcctgttttcgatgatttcgcccaactttcagggcgaaaaactccattacaatcaggacaaaatggcgtctgccaactgcaaagaggcaaacgcccacctgcgaagcctctatgcctacaacaaggaatgtccgccgtagtccgaaccccgaaacatcaaaaaccagccctcgcccattcgcgcggggcgacaacaaaaagcggcgtcattcgacgccgcttttttgctcactccactactacttttcagcccgcatacccataagcggcaccacgattttcgcgcagtagaccgccgcgcaaacggctatcacaccgcccgcaaaaccgatacacgacatcgaaaccctctcgcagacttcgccgccaagccacgttccgcagccgatgccgagattgaaaatccccgaaaatatcgacatcgcaaccgtagccgcccccaccgaagtcgccctgattgtctccgcctgaaacgccacattgaaggcagtcgccgccattccccaaaaggcgcacaacacaaccacagcccacggaacaaacgaagccggatacaacaataaaagggcggccgctacaatggaagtcatacacaccgcaaaccttccgcggttgcgctcatagtagcgcgaaaagagaagcccgcccacaagccccgacgcgccgaaaagcgagagcgtcgcggttatcccgtcctctgacatctccgcgacctgtttgagaaacggctcaatgtagctatacgccgtataatacgcagccgacaccgaaagcgacatcgcaaaaaccgccacgagcattctgtttttgaaaagctcgggaacctgcctgaacctgaacggaacgcctccgacaaccttcggcataacgaaaaacagatacaccgccgccgaaaacgcgacacaggctatcgacaaaaacgtcgcacgccagccgacataaagcccgaccgcgcgtccgagcggcagcccgaaaatcatcgcaaccgacgtccccgtaataatcatacccatggcaagaggcctgtgcctttcgggcacgacgcgcaccgccataggggtcgcaatcgaccaaaataccgcgtgcgcacacgcaaccccgacgcgcgaacacgtcagcataaaaaacgactgcgacaccgccgacaacacctgagacacgccgaagagaatcacaacccccagcaacagtctccgcaaatcaatgcgcgaggcaagcaccataagcggcagcgaaagcagcataaccgcccacgcgtaaattgttatcacaaaacccgcccgcgcttcgctcatgcggaaatctgcggctatgtccgtaagcaaccctatcggcataaattccgacgtattgaatacgaacgccgaaaccgtcataccagcaagcgcgagccattgccccaatgtaacatcattcgacatctccaacaaaccccgattccccgcacgcccgcgccaactccaaacccgcggcaattaacgcgccgcaaaaaaacggttcggcttgcgcgggggaacttgtggatattcgccgtcgacatagccgatggcgcagtgcccgattccctcatattcgccctcgattccgatggaacgcaaaatttcgcgcccctcggacgtctcgaattcctccttcgcgcggtgaatccagcagctgccaagcccgagcgagtgcgcggcaagcataagatttcccataaccagacttccgtcatagacgcggtttgcgcagtccttttccgcaaggactatcaacatcgcgggcgcgccgtaaaacgggtcgaacccctgctgccagccgccaatgcggcggttcatttccgaaatcctgtcgcgcagttcgcggtttgaaacttcgacaatcacagacctctgcccgcccatcgcgcttgccgcataaagccccgcccgcgcaatttcttcaagtaactcccgcgccaccggagtcgacttaaatttgcggatactcctgcgttcgatgatgtttttcaaaacttcgttcatattacagcctttctttgaagattaaattgcgttaagaaatcgccgcgaacaacgccgccagcgtctgccacgacagattcaccacggctatgaaaacggcgaaactgcccatatccttggcggctttcgcatatttgtcgaactcgggagaaactatgtcgacaacacattcgaccgccgaatttagcacttccgccacgagcaaaaacgcgcacgaaaacaccaccgccccgaccgccaaaggattaaacccagccgcgacgaacgcgaccgcgagacagaatacgcaaaaatagacgtcgtgcctgaacgcagtttcacgcgcccaaatccatttaagcccatcgattgaatagccgaaagccttgaaaaaatgcgccatccccgttgaattgtttttcatatttcgtatctcgttatgggtttaagaaatattatttaatattacaccccccgctttccgaccccgaagcgttccgctccgacaccggaaccgcgggcaaaacactaccctttgttttcagataatgcgccaccgcaaaaagcttgcgcctgaaatccgcgagtctcggagggaagtccctgtgggatacgttgaagaactttccgccgtcgtaaaccgcataaacactcgctttcggcgacgtcttcggtgcggacatcggcgttccgaacgaggcatattcgaatccgcgcggggcgacaatttcaagcagcgtcggcatgatatcgagctgagacgcgccgtcggggctgccgcatccgagcgttttttcgaccgccgcgccgtagaaaattatcggcacacaaatgtcgaaaagcggattcatctgcgtattttccggacttatgcgcgacggatggtcgcccgtgattatgaaaaccgcgtcgggatatttttctaacgcggctcggacaaaacgccctattgcgagatcggcaaaccagttgtgataaagcttgacttcgttttcggtcgcaagcggggcgcggcagccttcggcttttaggtcgatattgtagggcgggtggttggaaatcgtcagaatcaaattgaacgtattttcgggaacgccttttttgagaatcgcgtcgaacatatcggtatcgtgcattccccattctgtgtagagaaccttgccgtcgagatgttccgaaccgaagacttcgtcgaacccctgcttgcgcataaacggcccgaccccgttccaattcgaggggcccgcatagtagaacgcactcttatag

SEQ ID NO: 3233 - DNA, 23222 bp, synthetic construct
  source 1..23222: mol_type = other DNA
  misc_feature 1..23222: note = Synthetic
tgtggagcgagaggggggcaggggcgaaggaaaatgaaaattcgcgctttattctattgacattacaaactccttcttcattttttcattatactaaacaataaccatctatgagaaaaacagcaacaatagtctctctttttgccgcaagctgcgcttttgcggcattcaccgaagtcgatacagacttcaatggcgtaaacggctggacaatttctggcagcggctccgcttccgaactgggcgcgcaggacaccaccgccctgttgctcgacaacgctacaatcgatttcgattcgacagacggcttggaaatcaaggtcggcagcggtgctgcgttccagtacgcaaattattcaatcggcattaagggcgatgtcgtcctcaatttcaagagcggctcgaacgccagccttaccgcaagcaaaggcattgcgacctcctacagcggcggcaccatcggcggcaatttgacagtcaacgtcgaaaaaggctacctcggaaaattgagcgttcccgtttttggctgcgcctacaatggcggtcagactttcgccaagctcactatgaacctgcacagcgcatacgcactcaaagagacgcgtatgttcgttagcaaacagacaacagtcagcatgagcgccgaccagagcattaggtgggacgtccgcaattccaaggacaaaggcattttaggcctgaatattaccgacggcgcgtcgctctttgtagttgggggcgattacgcagttaactatgcgtcgggttcgtccgtgatgctcatgggcgacgacctcatggacggctacatttactttgtaagctccatggttgcaagcttcgacaacgacgccaagaccatcacattgaagggcatgaacaacggcgttgaaaacctgcacacagtctcgtttgtagacaaggacggcaatgcggttaacggcgactcctacgcaaacttcgaaatcggcgaaaagacaatcgacggcgttaaatacacctatgcgacaatggcggctatccccgaacccgcgacatgggcggcgattttcggggcaatcgcgttcggcttggcagtctaccgccgccgcaagtaaaaaagtaaatttggcacgcaaaagacgcttcggagaaattcgaagcgtttttttgtgttgcaagtccgaaagtcgggcttaactgtgcggcgcgtacaaggtgggtgaaacgcgttgctgctgcttttttatgccgtatgccgcgttattgcgtctgctcgcattcttttagaatgcgagctttttgaatgtttcggcttcgtcggcgagttccgctaccgacgcgtcgattgccttgcgcgaaaaatcgttgatttcaagcccctgcacgatttccacgtttttgccgtcgctgcgaataggcattgaggtaatcagccctttttgcgttccgtacgagccgtcggagcagacgcctatgctgtggaaatcgccgtcgggcgtgggattgatgattgactgcacggtatcgacaatcgcgcttgccgcactcgccgcgctcgacgccccgcgctcctcaatcaccgccgcgcctctgtttcggacgatgtgcacgaagtcgttttcaagccagtgtctgtcggcgataacttcggttgcgggtttgccgcagattttcgcgttgaagaagtccgggaactgcgtgttggaatggttgccccaaacgcacatgttgctcacgtcgccgacatgcacgccggccttttttgcaagctgcgcctttgcgcggttttcgtcgagtcgcgtgagggcgaaccacctgtcggcgggcacgccctcggcgttgttcatggcaatccatgcgtttgtgttgcacgggttgccgacaacgagaatccgcacgtcgtcggcggcgttttttgcaatgctgtgtccctgcccgatgaacattctgccgttcatttcaaggaggtcggcgcgttccattccctttttgcgcggggcgcagccgagcatgataatccagttcgcgcccgaaaagccctcgtcgaggtcggtcgttgacgacatcgaattgagggtggggtaggcgcagtcttcaagctccatggcaagccccacgcgcatcgagccagcccctgggtagacgccgagcatcatcaaatcgacgggctggtcgggcccgaacattccgccgtttgcgattttgaacaaaagggagtatcctatgtgccccgtagagcctgttatagtaattttaatcggttttttcatcatgcgtaaaatcctctaataatttgcgcgggcggcgcgaatgtcaacattatatcggggcgttccgccgcgggcgcgcgccgttttgtgcggataatattttgcgaaatgtctttgcaatcgggggcgtttttgcgataatccgaatctttaaaaccgaagaatttttcaatgaatcaagaccacatcattaaaatcgcaagcgacctcaacctgcccgttatgggcgtcggagctgtcgcaaaacttttggaggagggcgcgaccgttccgttcatcgcgcggtacagaaaagaggcgacaggttcgctcgacgaagtagccgtcacgaaaatccgcgacgacatcgaacgccttgccgcgctcgacgaacgccgcgccgccgtcaagaaatcgctcgacgagcgcaagctgcttacccccgaaatctccgcgtcgctcgatgccgccgagacgctcgcgcggattgaggacatctaccagcctttcaaacccaaacgccgcacccgcgcgacaatcgcgaaagagcgcgggcttgagccgcttgcccagttcctgattgaaaatcaggacgccgactgctcgtcgaaagccgccgaatacgtctcagcggaaaaggaagttcccgacgccgacgccgcgctcgcgggcgcgcgcgacatcatcgccgagaacatcgccgacgacgccgaagcccgcgcggcggtccgcgcgtacttcgagaaagagtctaacatgtcgtcgaaagtcatgttcggcaaggaggaggagggcgcgaaataccgcgactacttccagtggactgaacgcgccaaggacgcccccagccatagaatcctcgcagtccgccgcggcgaggcggagggctttctcataatgcgcataattccggaggacgcgtcgggggcggtgtcgattctcaaaaagctgttcgtaaagggcggcggagaggcggcgaagcaggttgcgctcgccgcggaggactcgtacaaccgcctgctcgcctccacttccgaaacctacatgcgcttggaggtcaagaaacgcgccgacgaggacgccgttaaaattttcgcaaacaacctgcgcgagcttctcatggcgtcgccgctcggccgccgaaacgttcttgcgatagacccaggcttccgcacgggctgcaaagtcgtctgcctgaaccgtcagggcgacctcctccacaacgacgtaatctaccccgaacagggcgcgatgaaagccgaggaggcgcggaacaaggttcttgccttctgcaaacgtttcgaaatagaggcgattgcaatcggcaacggcacggcggggcgcgaaaccgaggcgtttgtgcgctcgctcgggctgcccgcgtcgattcccgtggtgatggtaaacgaaagcggggcgtcgatttattcggcgtcggaagtcgcgcgcgaggagttcccgaacttcgacatcaccgtgcgcggcgcggtgtccatcgggcgcaggctgatggacccgctcgcggagcttgtaaaaatcgacccgcagtcaatcggcgtcgggcagtaccagcacgacgtcaaccagaccatgctcaaacgctcgctcgacgacaccgtcatcagctgcgtaaacagcgttggcgtagaggtcaacaccgcgagcaaacagctgctctcctacgtttcggggcttaacgcgacgaccgccgcgaatatcgtggagtaccgcaacgcgaacgggccgttcaagtcgcgccgcgatttgctgaaagtcaaggggcttggcgcaaaaacctacgagcaggcggcgggctttctgcgcattcgcggcggcgacaacccgctcgacgcaagcgcggttcaccccgaacgctacgccgtcgtagagcgcatggcttccgacatcggcgcggacgttgctacgcttcttcgcgaccccgcagtccgcgcgaaaatcgacctcaaaaaatacgtcgacggcgagctcggcatgccgaccctcaaagacatcatgcaggaactcggcaagcccggtcgcgacccgcgcgaaaagttcgaggtgttctcgttcgccgagggcgtcaacaaaatagaggacttgcgcgagggcatgcgcctcccaggaattgtcacaaacgtaaccgcgttcggcgcgtttgtcgatataggcgtccatcaggacgggcttgtgcacatcagcgagctttccgacacttttgtgaaagaccccaacgacgtcgtgaagccgcaacagaaagtgaacgtgtgcgtcatggaagtggacatcgcccgcaagcggatagggctttcgatgaagacgaacccccagaagcgcgtcaagagcgcgggcgacaccgcaaatcaggggcgtccgcgcgcgccgcgttcgggaggcggattcgcgccgcgccgttcgtccgagcctttcggaaactcgttcggagacgcgttttcgaagctttcaaaaaagtagttttcccgccgcccgcgcgggtttgcgcggcgcaaaaaacaagagccgtcccgttcgggcggctcttttgttttatccttatttgataaaaagcggcggtttttatctttttgtgttttaaggcggttttgcgtgtttgcgcttttctttgcggtcagagcaggtttttgcgctttgccgcaaaaatcagctgctgtgcgaatcccgcgtgcgcgccgaatttttgcgcggcaaattccctgattttgtcggggttgtcgggcgtgccgtatagctcggacatcgcctttcgaatccatgtatcgacggggaaggcgtccattttcgccgcgccgaaaagcagaatgcagtcggcgactttctcgcccacgccgctaagcgacgtcaaatatttcttcgcctcgcggtacggcatttcgcgcagtccgttcgggtcgaaagagtcggcgacgattttctgcgcggattttttcaggtattccgcgcggaatccgagcttgcatttcctgattttcgaaatgtcggcgtcggcgattttttcgaagctcggcagcgcgcggattccgtcggcaatctcttccccgaaattttccgacagcagttttacgcactgctttatctgcacaatgcgcttgctcgaactgcaaataaagcacatcagcgcttcggctggcggctggcggagtatgcgcagggtcgggtagattctgagcgcggctcgcatgtgggcgtctgcggtatcgaaaagcgattgtctgagcgcggcgtagtcgcggtcggcgtcgaggtattcggcgattttccgcgcggcgtcggggcttgcgttttcgggcactgagtacagcacctctcccgcgccgtcgagcctcagctttgccgcggtgttcccgaatgcccccgtgaattggggcgcgtcggagttcgcgtcggcataccagcggaacgactgtccgccgtcgagcgtttcggcgaagtcggacggcgtaaatttcggcacgccgagcgggcgaaaatcagtccaccgcattttttttgatttttgaatcgccgtgttttaccgaccacagccacgactgtttttgcgtgaggattttccccgacggcgaaaggagcgtcagacgccacgcgttgactttttcgtcgcgcccaagccagtccgaacctgtcagaccgagctttacttcgcgcagtacggagcttgtttcgggcacgtcgaatacgaacttgcgcacatgcgggtgctttgttgaatcgacttccaaaatgaagcggcaggcgagggagatgtcgtctggctcgaagccgaacatcacaaagaagtacatgccagcgcgttttttcggctggctgcgcataatcaggtgtccgtgcgcgaactcgtctcccgaaaatacttccgcaattgtccgtgtttcggcgtcggtcaggtagcgcggcaggcagtatgtgattttcggctcgttcttcattcccgcgccgattatatacgactgctccgcggattccgtcgtcttgtcgtctcccgcgcacgcgcagagcagcgcgagcagcgaaagcggaaaaagttttagggcgtttttcatatctgcgagcatggacgcgcggacgcgttcggtcaagagtattacacgagtccgttgagcattccgtaaaaatacatcggtttgagcgcgtacactttaagcagccacgcaaggcggctctctttcgacatgtccatgagcgaaagcgggaacgagcttttgcggtttttccggtagtcgaactcgcacatgagaatgtgcccgtagtcggtgatgatggggcacgcggcgtagccgtcgtactggcgcgtcggcgttttgccctctatgagggaaacgaggttctcggcggcaatcggcgcctgttttcttatcgcggcggaagtcttgcttgtggggattcccgcgacgtctccgcacgaaattatgttcggatattttttgtggagaagcgtgaatttgtcggtgtcaacccagccctccgccgcgttcttgcccgaggtcttcgacagccccgactgcgggacgaagacgggggcggtcatcggcggcaggaagtggaggaagtcgtagtcttccgcgaccgacttcacgactttcccgtcctttacggtgtcgagccagacttttttcgccgccgtgtcgattgccttcacgcgcgtcgagagattcagctttacattgcgctctgcgtagatttcgagcaggcgcggcgtgaagtaggggacgtcgtagagctgcttcgacgccgtgtagaagttgatgtcgagcgcgtcgcggcggtttttctttcgcgacaaatgctccgtaagcaggcagatttttttcggcgcgccgccgcatttgtgctttgtgtaggtgtcggtgaaaattccctttccgcccttctcggcgaatttttgcacggcgttccgcgtcttgattgcgcccgaatggcagtagatgcagtgcgcgtttccgacgccgagcgacttttcgtcgatgccgtcaatcaagtcccagcgcaggacaaggccgggggtgagcacaaggaagtcgtagccgattttctgcccgccgagagtcgcaaccgttttcgcgtcggggtcaaccgcaacgaccgagtctttcacccatttcgcgccgtcgggaatgcagtctttctgcggcttgtacacttcgtcgggcttgtagacgccgcccgcgattagcgtgaatcccggctggtagtagtgcgtttcggcggggtcgataatcgtgatgtctggcgattcgagcatgcgcagcagtctcgccgaaatgtcgattcccgcagcacccgcgccgattaccacaaccttcgccttcgcgccgcttttcggcgcggcgtaggtgttggaaaccgcagtcgcggcggctgcggttgcggtaagcttcaaaaatttgcgtctgtcgatatttgccatttttcctcctgaaaatttaggaagaaattaaaatgcggctttgcgctttcgcaagaagaatcgtcgcgcccgcttttatgattgcaaaaattttttttgtattttagtttttattaaatcaaaaatactaatatgatttccgcaccgcacagattcgtaaaatgcgcagcatgcgcgcttcttgccgcattttccatctcagtctcgcatgcctccgacaaggcaatgctcgacgcgttcgtcgcaaaagggcttttgacgccgcaggaggcgtccgtgcttgcaaaggaatcggcggaagtcgtccgctccgttgaatcgacaaaatcgctgaaattgagcgcgcgcttccagcttcaatacgagtggattgacgccgaatcgtacaatccattccgagactacgcgtgttcgcagggcttcatcgtgcgcaggttcttcattcaggcggacgccgacctcggcggaggctgggacgcccgcgtttccgtcgatatggcgcgctcgcgcatgaacagcattctgaccgacacatacgtttcgaaaaaaatagacgcgctcgacggccgcattttcctcggctacatgaaaccggggttttctgtcgaggacatgttttcgtcgttcgggctgaacgcaatcgaacgctccgccgcaaccatgtactggacgggagctgcgaacaaccgcaggctcggcgtcggcaaccgctacatgggcgtgcgctggaacggcgacatcggcggcggactctcgtatatgctcgcaatcaccaacgcctaccagctctcgccgaccgaactcgacgaactttcataccagtataccgacaaccacttcgcatattgggcaagcgtccattataaaacttcgggcgacgattggagcatcaaaacgggcgtttacaccgcttattcgagcgacgcaaattacaacatgggtgcgacaagctctgcatcgattctctcgctcaacccgtacttcgtcgcagagtgcggcggattgcggctgtggggcgacttccttgcatcgggggtagccgacggcaaaaaagtcggcggcaactatactcaggcaaatccgtacggactgaacttttcggtcgaataccgcttcgccgcgggcgaattcggggaaatcgcgccgacattcagatactcgtgggtcaataccgacggcaggggcttgcggatagtcgacgcacagcggcagtcgaaaaacataggcaaactgtataatagcgtgcaggaattctacgtcggacttaattggtatctgcgcggcgataatttgaaattccaactcggctacgattatttgcaatattcgggcggcggcttcgcagactcttcgtcaatccgcgtgcaaatgcaaatgaaattgtagcccaaccgtgctgaaacagggcggacgcaaaacaatcagcgctgcgaacatggcgcaaacgaacaagccaaacatcgaaagagcatgtcggaatataacaataagagcagctcaactccaaaaacaccgacaataaaaattcggataaaaaactttacaaacggcagtaaaaggtgtttgctaaaaaacaatcgcgggcgtagctcaattggcagagcgcgagcttcccaagcttgaggttatgggttcgacccccaccgcccgctgttttaaaaagcccgcaaattttcacccttgcgggtttttttgtcatttctccttttctcacttaaaaccgcccgccaaatcgaaaaatcttgcgtttccccgtcaaatctgtactattgcgcacgaaaacggataatgccgccttccaaacaatgccacacattccgcggccgaagcgttttttagggctttggttgctgggcaatcccgcaagacaatgaaacgcaaaaacaagctaaacgacgactttgatgacggaaaaatcggcatagacgactataccgacatgaagtgctgcgatgacgccttgacaatcatcggcgcaatcatagtcattttgctgattattatccttccgtaggattgaatatcaatcgagcgcaaacgaaaacgactcgaaagagcgggcaaagacgacggagctcctatcgtcttttttccgttgcatgattatgcgcttaatattttgcgttccttttaatcccggccgtctgttgctggggctatcgcatttttcaatgtattatgcgcaggcttcgctgcaggaatagggtaaaattcgcgccggaattttcgctttttgcgggtttttgaggtgccgcgcggattttatttgcgttaaaaaagcttgattgttgtatttatactaataatataattttgttttaactgataaacatgttttttatttaatatgcacacgaaagatattatttggggttttgatattggcaagggttctcttggcgaggctgtaagagtggggaacgaatttaaacatgtgcagtcgcttgaaattgcgcccgactttgccgaaacaaaaaccaccgcagccgcccgccgcgcgtggcgcacgcgcgaagcccataaggcgcgcgaattgtggcttgaaaaatgtctttccgaagcgggaattgaggttcttttgcggaggaaggtcggcgttgttgacggcgcgtggaagcttgtctcgaaaggcgatgtgcgtttggagcgcgaatttccgcctgcgggcgaagatctctgttataattcaatcgctttgcgctgtaaattgctgctcggcgaaaaactcgaaagttggcaggtcttcaaagctctgaattcggcgattcaaaaccgcggctatgacgcaaacattccgtggggggacgaagacgcggcggacggcggagacggcagctcgcggaaatcttccgattccgacgcaagcggagacggcgagtcttatgccgaaaagcttgcccactatgagcgcgaatttgacggtattctcgcggagcttgacaatcgcgaaaaatacgaatttccgtgctttttcaaagcggcgaaaatgggcttgtggtcgcccgaaaatcccgattttgtcggcgtcagaatcgacaataccgccgaaaaggcaaaaggatatgtcgtgccgcgagaggcggttgtccgcgaattccgcgcgctcgtaaacgccgccgcgttgcagtatccgaatctgaaaggcaaggcggatttcatcatgttcggcagggcttgtgagccgtacgcttcgtataatccagagcttcgcaagcggttcgggcttaaacgcggcgcggcgaccgactggaccgcgctggggcagaaaacgccgcgcttcgacaaccgcgtaatcgacaaatgcaaactgattccgcggctaaacgtttgcaaaatcaagccgcttgacgaatgcaaaaccgacgacgactttctgtcatacacaattacattgtcgttaaaattgttaaatctgcgttttttccgtggcgcgggtgtggattctctttcgttcgacgaatttttacgagctttcgaacttgccaaaaactcgaaattcaaattgggcaaggcggctttgaaaaagtttttcaaaacaatcggcgcggaggtgatggacgagagccagtcggaaatcgaacagccgaggaacggaggcagggcggcgttttcgcgccccgcaatgcggatattgcgcgacctgattttttcgggcaagtcgcccgcggaattttacgcgacggaactcgggaagattgcaaacaccgacaaaaacaaggggcttgtcgctggggatttggactttctgaaactcatgtccgacgcgccgtggagcggaattttcattcccgatgtcggtttgtccgactttgccgatacttccgaagccgcccgcgcggcgcaaatcaacaagctaatcggaagccagaacgaccccattgtgcgccacaggctttcgttcttctacgagcgtatcaaatcgctcgaagcaaagttcggcgttcccgataaaatcgtgctcgaatttgtgcgcgacgattttctcggcaaaaaggcaaaaagcgacctgaacaaggcaatcaaaacgcgcttcgatgagaagaaaaagcttgccgaagatcttgattcaaagcgggaggagttcggtctcaaatacgcctcgaaaaaaatgctgttaaaattcgaattgtacaaaaaacagggcggagaatgcgtttacacgggaaatgcgctgccgctttcggagcttgaaaatttggaggttgaacacattgtccctcgcagccgcggcggcccagacgcgatgtacaattacgtattgaccgacgaaaaaacgaacaaggaaaagggcgaccgcacgccttacgaatggcattctttaaaaggcgcggagtgggatagctattgcgaccgcgtccgcgaattgacaaaaaatctcggcgcaaagcgttgcaggctcttgcttgcgcctaacgcggcggagcttgtggaaaaatatacggctcttgccgaaaccgcatggatttcaaagcttgcgcagcggatttgctgcctgcatttcggtttccaattcggcggacttgcgggcgcaaaaaaggtttggacggtttcgggcaataccaccgccatgattcgcgggcgctacggcttgaacaggcttctccacgacgaagaggcggcggaggatttgtctttgttcgaccggatttgcatggaaaagaaattcgaggaaaagaaccgcaaaaacaaaaagcaccacgcgctcgacgccatgtgtctttgctttgcgccgacttcgaacgcaaagaaagcctccgcctacaaaaatattcttcccgaagaaatcacgcgcaaccctgaaagcgacgaagcccgcaagtttttcggcaggtatctggcaacagtaattccgaataaggttgcggtggaaaagtcaaaacttgaacagacgatttactctttgcgcaagggacgcattgtgaaaaagtgcaatgtccgcgatttggcatacgaaggaataaatcccaaatacaattatacgaaattggttaaacgcatagaaagtatcgttggagatgtttcaaaacgcataatttccgattttgtattgtctaatcccgatttaaaagaatccgaatgggaggattggtgcaaatatgaagcagcaattccctccaaaaacggtgcgccgacaaagttgctgcgggtgctgtgcgaagtcggcagtcccgaagaatataaggatttgtcgaaggacggctgcggcgcgtaccgcaagggtgattcacacaaagggcagttcatctggaaaactcaaaagggcaagtatatggttgcgcctgtttacgcgtatgcgtcgaaggcgaaagtttttgccgctttgaaaagcaatcccgattgcgccgaagtttgcggattttttagacagaactgccttgtcgaaatttcgaacgatgtcatcgataaatcgggaaaaatgctcttaaagtctggtatttacaagtctaatacgataatgtcagacgggcgggcgaaatttacaaattccgatgggatttctacgaatcccatttccattcaatacctaatgcccgcgggaatgaagcgcataaaattggataccgtataatgagctatcatattttgcacgtcatggattacggttgcaggctcgtgcgcgagcgcggtctgctggtatgcaaaaaagacggcaaaatattgggcaaaatagcattggaggatttgcgcgcggtgattcttctcaacggcgcggtttcgattagcggagacgtcattgccgcgctgtcggaattcgacgccgtgatagttcattgcagggattttaagcccgtcggcatcaccgttccgaacaaccgcacatacgacgcaaaagtggttttaaaccagtccgccggaaacaagaatctgaacggagcaatctggcgtcgcctgcttgccgcaaaaatccgcaacaacgccgagtgcctcaggcaaatcggaatcaaaaaatgccgattgttttcaatggcgcaatcgcaaaacgcattgttgaacgaatcgctttgcgctcgggaatattggaagcattatttcccgcaactcggcgagtacggagtagggcgcgaccccaaaaacggagattcgaaaataaatgttttgctaaattacggatacggaatgatgtcggcgataatccaccgcgcgattatcgtggcgggcttgaattgtctgctcggcgtaaaccacaaaacatattacaaaaatacgccgcttgtccacgacgtgattgagccattccgcgcgtttgtggattttgcgctctaccaatttatcactgccgacggcggcgcttcgattgcggcttggtcagtgttctttggcaagtttttgcgcgacaggcgcgtaaaaaaagcttcggtttcgatgaaattgtgcgacgccgccgactatctttgcgaaacacttgcaaacgcatatcggcgcaaagattctggtgaattgtggacgccgaaattataaatttcaatggcatgcaaaatcgaaaaaaggagtccgtatagaatggggtggctgatggcgatgttcgacttgcccgtgttgctcgacgaagagcgcaaagaggcgacccgattccgaaacgctttgctcgacgacggatttatcatgattcaatactccgtgtattcgcgtccgtgcgtatcaatggagcgcatgaaaaaatattatgaacgtgttaaatcctacgctcctacgacgggagacataaggcttttgttttttacggataagcagtgggcgacgagcaaactggtttgccgtcgaccgaagcggcttgaaaaagtccccgagcagattgaatttttttcggagggggcggaagagtttttcgcaaaaccgtcgccacagtacgaattggacaagacggataataattttctgctgttttaggtgtgaataaaaaaaatgccgaattttaaggtactatgtagagcttaaaattcggcataatcagttaagactttatagcaaaattatggactaattatttggcacgccataaattatgtcaagtataatctaagaaagaacactttgctgtaaagtcaaaacgtggagtccgaaaagccgtttgcttctgcgaatctaagaaagaacactttgctgtaaagtcaaaacacgcagttcgtcgatataaacactccctttaatctaagaaagaacactttgctgtaaagtcaaaactacgacgcgtggaaatcaaacgtcatcgtcaatctaagaaagaacactttgctgtaaagtcaaaacacttggtttaataaacctgcttttgtgccgaatctaagaaagaacactttgctgtaaagtcaaaaccttgggcgtcgagctctttgtcgatttcttaatctaagaaagaacactttgctgtaaagtcaaaactcgggcgcgagtacgacaaaatcgggcgtaaatctaagaaagaacactttgctgtaaagtcaaaacgcggaatggttgcaaactccccagtgatgaaatctaagaaagaacactttgctgtaaagtcaaaactcaatggcaaaggcgagctaatcgcttttgaatctaagaaagaacactttgctgtaaagtcaaaacggcagatgtacgacggcgcgggaatcaagaaatctaagaaagatcactttgctataaagtcaaaactaataagtctttccattatgggaaaaagaaaatttaagaaagatcattttgctgtaaagtcaaaactgagcatatctgtttccttttggttgatggaatctaagaaagatcactttgctaaatacaatgaacgcgttggcggggcaagtggggcttgcggggtgcgcaacgcgttcgttgggggagggttattttcttcggcggtagattgccagtgcgagggcgagtgtgccgaagactgccgcgtaggcggcgggttcggggactgtcgagagccagtagccttggactccgtcgtagttgccctttatccatttgaggtcgtcttttgtataggtgttgccttcggtgtcggagagggagacgctttcgagttcgtcccagcccgaaatatctttgaagaatatgctatattctgtgaagttatttattatcagcgttgcggtgttgcttgtgtaggactggaattcgattgagttgaagtacacccgcgcgccgttgtttacggagagtgtaagtttctcgttgctatcctgtcggttgaatctaagctggttgaatttgttatcagccgaaattgtgagcttggcgttcattgcgtcgcttacgaaaatatcggcgagtccgccttcgtaggagagggcgttttttgcggaaattatcaatgtgcctgttgattcgataatcattcgcgattttacggcagccgtttcttttgtaagtttcacggctgcgttgtcggaaatttcgagtgtcgagttgccggcaacttcgattgcgcccgcggcgttgattacgccgtttccgctcaatttcgacgtgccgctcttaaatgtgatgtattgcgccgagaatgtgcccgtgatttttgtttctccgaggtctattcccgagtttttataattaaaagtaccgccgactataaaattaattccaaatctgtctgaatttaattttccgtatgcgttgagggtagagcctttgtcgatgctgatgattgcgttgcttttgagcgtgctttcgctgacgcggtagtcgacatttgaattgttcgaaaccgaaattgcgggagtttcgtagccgttcaagcccgccgagaaggacgttcctgcaacgtttgcgttggttttgaagttaagtccgtgagcttcggagtaggattccgacgccaaggacaatgtgcccaaatcgacgtatgctgtcgccgaattgccggcggagtttacaatgtcgagcgaagtgccctcggcccaagtcattgagccgttgtttacgaacgcctcgaactcaccggagccggcttggttgatgtcgattgtggttttgccgcccgcgatattccagtttgcgggcgtgccggacgttttcagcgagccgattgtgttgccgttgcccttgaagaaagcctcggcggaggcgtcggtctggttggggttgaggacgacgtcgtggtttccagcgtcggctttaatttcggcggcgtcggagcttgaaaggccgccgtagatgttggaaatatccgcctgtgcggcacatgcgaaaatgccgattgcggcgagtgttgtgtagtatttgcttttcatataatcttgggcattcgattttacgaatgcgcatttgttgtattttgattatataatctaaaaataaccgcgccgaattttcaagtgaattattggattttagagcataaatactcggctattttcaaagccaatctgcgcaaaatagaaaaaggcgcgaaaatgattttccgcgccctgttttattaaattgtattgttttttttacgcagtctccgtttcctccgcctcgatgaaattgtcggcgcaggcgattttaagtggattgcgcgaggcgacagttcccgcagggattccgtttgcaggttcgccgattttcgctcgccaaatgacggtcttctgtccgtcgatttcggtgaatgccccggggaaaggcttgctcacgccgcggattaggttgaagacttcgcgggcggttttcgagaagtcgatgcgtccgtcttcgggggtgcgtttgccgaaatacgaggctttcgacaagtcttgcgggacggttttcgggttgccgtcgagtagcgattcgagcgagcgggtgaagacgcgtagggcggcgtcggaaatgcgcggctgaatgtcgccgacatattcgttttctccgaaatcgactttttcttggtccacgactgcgcccgtgtcgaactttttttcgagcacgtggagggagacgccgccgtaggattcgccgtttataatcgcccagttaagcggggcgcggccgcggtaggcgggcaggtaggagccgtgcatgttgtacgcgccaagctttgcctgcgagaaaatttcttcggggataatattgcggtagtagagcgacaaaatcaaatcgggctgcatgtatttgactttgcggtaccacttttccgttttgagcgtttcgggcttgaagacggggataaagttttcctttgcgagcgattccggcgttttgaaccagtgcgcttcgtgcgggtcggtgtcgtgggtgaagacgccgattacgttgtagccctcgtcgagcatgtatttcaggcagcggtagccgacgtcgctgaacccgaaaaacaggattttcttgtccttattttccatcgccgaacccgattgtttccttgatgacgtacttcgggcgcgattgcacaatctggtagattcgcccgatgtattcgccgataagcccgatgccgacaatcgtcacgctgatgaggaagaagaggattgcaaagagggtgaaaacgccctccgcctcgccctcggagaagaggaaaattctgcggaagaggagaatcacgacaagaccgagcgagcctatgctcgacaaaaatccgaaaatcgtgaacagttgcaggggcatgattgtaaagcccgtgatgaggtcgaaattcagcctgatgagcttgtacatgctgtattttgattctcccgcctcgcgcgcggcgtgctcgacctctatttccgcgggcttcgaagagaacgtgtacgcgagcgcgggaatgaacagcgagcgttcgtttgttttgagaatcgcctcgaccacgttgcgtctgtacgcgcggagcatgcagccttggtctttcattctgatgttcgtcattttgtcccgcgcgaagttcacgattttcgagcagtagcgtcgcagggcggtgtcctcgcgctgtttgcggtagccgccgacgctgtcgcaaccctcgtcgattttcgcgagcagtttgccgatttcttccggcggattttggaggtcggcgtcgagcgttacgataacgtcgccctgcgctcgttcgaacgcggcgatgattgccgtgtgctgtccgtagttgccgttaaagtctatgagtttgacggtttcggggcgctgcatgcaaaagcccctgagcatttcgcccgacctgtccttgctgccgtcgtttacaaaaattacttcccacgacctgccgagcgcgtccatcgccttgcagagtctggtaaagaggtggtcgaggtttccctcttcgttgtatacggggattacgactgatacgtccatgatatttttgtttgttttagggggggtaaattaggaggggggattagaagccgaatctgggtaggttgcgcatttggagcttcgggccggtcatcgtgttttcttcgaggcagcccttgaacgctacgcacgacagcacgattgcgcgtttcattagaatcgcccccggttggagaaccgagttgcagcccgcttcggcgtgttcggcgaccattgcgccgagcttgcgcatgttcgagtctatcctgccttcggggagcgaaagaatcacgttcttgcggtcgagcctgaggtttgcgcagattacgcccgcgccgaggtgtgcgcgcgttcccagaacggagtctcccacgtaattatagtggggggtttcgaccttgtccatgagcatgctgtttttgtattcgcacgaatttcccattacgcagccctcgccgacaatcacgtttccgcggacgaagcagcctatgcggatttccgtatttgcgccaatccacgcggggcctttgatatgcgcgtaggggggcaaggagacggtcgggtggatatacacgtcgccttcgatacacacacccgcgggaatgtctttttttgattcgagcgaggagaagtccacgcttgcgagtgcgtttttgatattttttacccattcccacggagccatgtcgggcgtgaagaatccggaaaatctttcgagggatttgggcaggtcgaagaggtcgcttgctttcattttatgggggtcgagattactccaaaccgattttattacaattaaatttttcggtttttaagcacaaaaaaagcgcggcgtgcaaaacgccgcgcttcggtttcaaatattagtccgcctcggcgaacgaaacctgctttacgcccgatttcgcgcaggcgttgagcactgcgattgccgcttggtgcggagcgtcggcgtcggggtaaattgtgacgatcgtcgagattccgcttttgtccgcgcttgtgcgcagtctgcggagggtggaggcaagttcgttgagttcgatttcgccggcgtggtcgattggcgagccgttgaggaatatgcttccgtcgggcgcgatttcgacaatctgctcgctggggagggcgacgttcttttcctgcggcgcggattcggcggggagcgagaaaagcaggtcggcttcctgttgaatcggcaggtacatgaagtaaatcagaagaaggaatacgacgtcaatcatcgaggtcaagtcgaacgagtcttccgattgcaaaatatccgaatttttcgccatggcttagtccttcaaagttccgaatagaatgttgtagacgcccgcttccgcgcaggttttcatcaagtcgttgacgtacctgaacggcgtgtgcgcgtcggcgcggatatacgcgcccttgaacccttcgcgttggttgcgcgccatgagtgtctctttgatggtgggcaggtcggacgcgaacgctccgaggaagaatgttccgttttccgaaaccgacaggaattgcctgtcgccgacgtcttcgggaactttcgcttccggggcaatcggcatggcaacctgcaccaactccgcagaagcgtagctggttacggtcatgaagaaagtgatgagaaggaacacgacgtcaatcatgggcgtcatttcgaacttcccgtcatcttccgatggtttccaaactttcataaaaagtttttccgaacggctttacttgttttcttcgggcgtttcgggagcttgttcgacgggtgcctccgcagcgtctgccacgatttcttcgatgtcttgcgggccgtacttgatggagagcttcatcgtgtagatgatgtcgccgatgatgcgcgatgagctggaaataatcgcgccgtatttgttcttgaacatgaagaagaagaacattgaggggatacctacaatcatgcccgttgcagttgtgatgagggcttcggcgatgttgtcggcaagtttcgacgcgctgcccgcgccttccgcggcgattgtgttgaacgccttgaccataccggaaaccgtaccgtacagaccaagcataggagcaagcgacgccgtaaccgaaaggtagttaatcaaaacatagggcgatgcgaattcttccaccgaagcttcttccattgccgactctacagacgaaacgtcgatttcgcgttcgtccgcgcgggaaagaccgcaaccgatgatgtttgtaatcggcgaggggtgtttttcgcaatagtcgatagcgtcgctgattttgagctggtttacaagcttttccacttcctttacgccgtcgggattgaggaacttctttttgcggagcgcgattgcattgtaaacgataagcgttgtcgcaaaaatgccgaagaagccgagcggatacattgtccaaccgccggcgcgccatatgtcggcgaaggatttttccacgacttggggcgcgtcgggctttttgggggcgtccgccgcgggggcgtctgcctgcgcgaacgaaactcccgctccggcgagcagaaggactgcgattgacattatcgagagtgcttttcttttcatttagttataatgttagggtgttgttttttgtaaaaaaaatttatgcgttgcgttgggtatacagcgcgttttcgggattgaatattgtccgcattcaacgcgcttttcaagcatattatgatttttttttagggcggtttttatcgggattgcgctttgtggaattcggcgaattcggcgattttcttgcagagctggctcagcccgttgcggcggttgggcgtcaggtgcgcggtgatgccaagttcttcgaggaacgacgggtcgaattgcagcacctcttcgggggtaagtccgtcgtacattgagcacacaagcgacgctattccgcgcgtaatcacggagtctgcgtccgacttgaaatggcatttgccgtccgagaaagtcggcacgagccacaggctcgacacgcagcccttcacgagaaattcggcgattttcagctccttgtcgagcggcgttgccgacttgtttttcagcacgatgtattcgaacaattcctgcggcgttccgaaatatccgtattcttcgcgcacggcgttttttctgtcgtctatgatacccattttatattcccaaaattcttattccgttttcctcggcgagtttctttactttgtccttttcgagcactatgactttgtctgcctcgacgaccacgttttttatgtccgccgccgcgagtttgcgcattgtgcgttcgccgattacgggcacgtcgaagcggtagtcctgattcggttttacggtttttgcgaaaatgcagtcttttgccccgaatgtcgcggcgcgttcgagcattgcgtcggtgccctcgaaagcttcgatggcaagcaccgttccgcgcgagaccacgcagccctgtccgatgtcgagtcttgcgcattcgcgggcgatgtgcattgcgtgttcgatgtgttcgggcagaatgtttttcatgttcgccccgcagaaaaagcctttcggcgcgagggagtcgtcgaggaacgagcgtgcgtcgagcatgtatacgccgattttttgcagttggtcggcgatagccccgaagatggtttcggcgtttttgcgtttgagggttgcgagcacgagaattgctttgaggtcgggcttcatgcccttaaagagctttttgggcgtgatttgcccagccattattgcgtatcgcgccccgacttttttgaggtttttcagcagatgtccgagctgtccgacgtttgcgcacgcgcgttgcgagtcgtcgaacctctcccacagttcgggggcggtttcgccctcgaacgccatgagcgcgttggggattcccgccgcgtcgagcctgtctttcaggagcgacgggtatgcgcccttgccggcgaggattgcgattttcgcggatttgtcgaagtctgttggcaggaattttgaaatcatgctagtcgaaattttgaccgtagccgaagaacgattttttcacggagcgttcagccgaaattttttctccgcatttaaacagcgttgtatctgcggcggatttgcattgggcgattttcttttttgcggcttcgagttccgagacccgcgcgtagtctatcgttatttttccgccgcatacaaccgcgcgttgtcccgtttttacgatgtcggttttgccattttttgtttttacgaacagtgcgccttcgacgggcagaacttcggtttttccgccgttggtcgataccgaaaatccgcggctttcggcttcgagttcggcttcgggcgtctttattttcagcgagcttgtcgggcgaagttggggcgcgcggacgtgcaacg

SEQ ID NO: 3234 - DNA, 23189 bp, synthetic construct
  source 1..23189: mol_type = other DNA
  misc_feature 1..23189: note = Synthetic
ttccaggacagcctcggacgagagcatctcgcagtttctcgtatccaagaattctttcgcaacaacatccgcggcatataattcctttgcgcgctcaagatttgttttggctagctccacgcgcgcttttgcctctgccaattcagcttccgccgatgccaaggctgcctcgtacggcctcgggtctattacaaatagcaaatcaccctttttaatattctgcccctctttaaagttgacggatttcaaatatcctccgacttgcgccctgatgtcgacgctggcaacagcttcaatttttgcggtgtattcgtcccaaagaacgacatcctttaaaacaggacgcgtaaaaattacttcgggcgtatctttgcttcccgaattttcagactcgccgccgcagccgcagagaaataataatagtgatgcggcggaggtatacgccgccgcgtttattcgctttaagttaaacataaattattgccttaaaattttgtccacaaattccgagtttatggactttactttttccgcctcgcgctctccgaaggttttccattccaaatcgattttaacccctgttctggcggaattaaacaaatgtgtctgccccaataaaattttcgccgaaattctggctttttccccgcttattctcccttttgtggctatttctataagttctgccgtaatccttgttctgggaataaaaagcttgcgcaaaaataaattaaacggggctccgttgcaaagttcctcccgcattaaaatcaaaactatatatcttgaatacttattgtcttttgattcacaccttattcttgaagacaacacatcttttatcaattctatggctttatccgaatccttagacgcctttatttcgtcaaatctcttgatatagggctcgtattggatttggaaaaggcgcacaattatatttgcgacttccatatacaatgcgtcttttgtcctaaagtggtagttcaccgcggcaagattaacacccgcctcccgcgcgaaatcccgcattctaacggccgcgggagttgctaccgcgaacattttcaacgccgtgcgcagaattttctccgccgtatccgacttgtattggcttaatatagaatctagtatgctgtccattgcacccttcctttccgagcgtcaacatttcatacatttgtttcatacatttgtttatcaagaataaaaatccttcccattaaaaaattcaggcgccccaaaagccgggacaagcctacgcattcgctaaaacgaaaaaaaaggaacttccagttaagggaaattcctcggcttagccaaattctacaaataagaaaattaccttcgtctccttagcgcaaatatcaaagccaaagagccaatgatagcggacaatgccgaaggttcaggaacttcggatatgcctattatattgccgtcgccgtcataggcaaaatctacatcattatagacttctcccgagctgttcatcaccgatatatttgttgtttccgccgaaaatacgatcgatgtaccgtcagacgcgctgaatatgtccgcaaagctaacaggcgaaatatcgtctaaaataatatttaaattgtccacggacaagtctgaagccgatgaaacagacacgcgagcgttttgtgaaacgctcaaattagatgcgcttagcgaatcgaccttcacgctggcgctatttaagagtgaaagcttattcgtattctcaaccaaaagcgacgtgccggtaaatgaagtattgcctgaaaaaaacaacgtttgcatcgtttattgaaacgccgtcgtttccaaaccttccgccgtctatgagaactttgtcatttgcagtaaaaaccacattgtttaagttcatttcgccgctaattttatacgtgtaggtagtagatgttcctgtcaacgttaaagagcctccgtccatgttaaaatgtccgtatgcataaacattcaaataagtagtgctaacttcggcgtttgttgcggaaaaaactcccgtaacggtagtggatccgctcatattaagcttcacaccgtctctaagcgtcaaactggaattaactgacttgtcaggtcctgatccgtattcatggtctccatacacatagagagttgtaaaatagaactcgcccgtttgacctgcttcagaaccttttgaaaaaataacgtcaacaggagttctctctccgttccaataagcgttttcaattgtggcattctggcggcttgaatcagacccgaaagaaaagtgtatgttttctccgtacgtggacgttgtattattctggcctatagtataagtacgcgcatggagggctgaagaagccgaaaatacggcggcggcaaatacgcttagttttgcgattgaaaaaatattagaattcatcttcctcataatttttattgaattattgcgtcgttattatgaaatcgttcataagtcaactcattaaatgttagagttctgcaaggaagcctaagaagcaatacttatgcaaataatttcatttgcggacaatagaatggcccattgcccaggcagaaatccttgagcaaaaagctaaaggcctaaatagtggaaaacttatattttaagccgccggcagaattattccgctttcgattatatctgcatccttactgcaccgcgttttccattgactaaaacaaagcgcaaaccatttggcaaaaatagaataactgcttatttgcctgataatttataaaatcctttaaaattcctcaaaaaccccaaggaactttaatcctttaatttaggcaacagcgatttttcaaactcgcccaatttccttgtgtaaatattggaatattccttccttggaattgcagcttttgttagcggacaaaacatgctctccaaagaattcatttcgtattcaaaagacgcagcccttattgcggcgcctaatgccgcggaattttggcaagcctcaaggcggtatatttcggagccaaaaacatctgcaagcgtttgtgcaatgcctgagctttttgacgcgcctccggtcaatattatttttttaggaatggctcctattttttttgcctgaagataaatgttaaatacttgcccttccacgaacgccctgatgcggctttgctttgaatcttccgggctgaatccaaaaaattccggcgaatcagatgaaagtttgggggaaatttcatctacaaaaaacggcaatatgattttcccgtcgtctctgggcacgtaattttcaaaggatatttcgtcaaaaaatttccaatctacccccataagttccctaaacttctcgcgtgccaatgagccgttgcggaaacacaccagtcccatatatccgccgtttggattgcaaaaaacatgggcattttcaactggactgaaattctttgtcgagcaaaagaaagtatcgctggtgcccagactcacagcagaaacgccgtctcctgaagctccaagccccactaggcttgacggattgtctcccgtaaatacaacaacttttgcgcctctatcaaatccatatttttcgcaaaaatactgggatatgtttccggcaaccgacgatggacaggctaacgggggaagcttttcgcaaagatttggggcacacgctgaaaccatgtctaaatcccaggaaaagtttgcgatatccatcaaattcatccctgctccgtcgcagtagtcaatcggagaatcagccccgcataatgccgaacacataaaagatgaattgagatgtattctttgcgtcgcactataaacagcaggttcggacttgaatatttttctgatttgggcgcctgaaaaacgctccgtcattattgatccggtttttctcaagacatttttttcgccacctgcgcggtccgccatctccctgcactcaacagacgtggaggcgtccatccaaacaggcgatttttccctgcttaaaaatggccttatgttctcggatagacttttggaaatgtcgtatgacgaaaatgcttttctagaattcagccataccgttgcatgctgctgcccggaaccgcttatggcagatatttttttcatatctaccagctttgaaattctccccaaaagcacttccagcgcgtcaagccacattagaggataagaccaaacttcaagagggttttccgcagacgagcaaacgcctgccgaagttccgtaatctggcaaatccctttcaaaattcacgctctctgaaagcaaaacagtggaagacacgcaatctatgaccgtacccgtcatagattgcgtgctggcgtctatccccaaataaagcggcttcatggcagttatttttttagtctctgggcggcccttttatggatgtcgtccgaagtttttacagactctgagagctttgccaacaacttattgcgctgcggttcctccaagcgttcaaacgcggacgttaaaatctttacgatatctggaatatcatcggcctttattgaattaaaatcagaaacaagcttttccgcagtcaatgatgttgcaacaacccgcaaggcttccgcgcaaatgcgcttgaatttggcgtcactagcattcaaatatgcgttcagcaaatcaggttcggcctcagagcaagcgcgcaactttgccgcaactactcctatatcctccgagtttcgcaccgaggcaattatttcaccctccgcgtttttggagcatgccaatgccggagcaaaatctgtagcctcatttccgtattctctggctatggatattatttttctcgcgcagctgtcgtctgcagaatccattctggccagcgcatagcattgagctatggcaacgcgtttgttttttgccttataattggagacaaagccgcaaaaatccggagttgtttccaaaagacctagagctgcgacttttaagttgtcgtccaaattgtcgaattcttttagaaccgacggatttaaaaagccgcattcaaattccccgcgcatccacaaagcggtttttgctgtattggatcccttccccgccaactcttttaaatcggacatgctttttgatgtgccgtattcagccaacgctaaaactgcggatgggcagccgtccatctctttatgcgctatcgccaaaatcttttcataagcaggaacgctcttcaactttccgagagaatatatcacgccgtcgcgaagtttcttttcggaaattttttccaatgcggcaagaagctctctttcggcgccgagctgctgcaaatccattctggcgttgtcggctatatgaatatctggattatatatgtcgcgctttgcggattcaatatcggccgcaaacatgcaaactggcgacattaacaccaacgctgatagtattgtagaaattttcatggcttatgctcccaaataatatggcgcgcggcgcggacgcgatatcattgccgccgcagctggattgtttgttatagtttcagttttcggatcccaattaacgtgtgagtttaaccttctggcaaacgacattaagtggcatacggtcgcgctgcgatgccctatctcggccggacaaatgttctttttaccgtaaattattgcatccaaaaaattctttcggtggtcgtcggacacctggagacgaatgtctttagcgcgcattggaatgctccttaaaaccgacggagaagtttctatgcgggcgccgcggctgactaaaatttcgccctcgtcgcctataaaatgaatcatatggttatttttcatcggagtgttcacgtaaacggtcggaccgttggcgtatctataatggcggaattcggatccgtcggaattttcgggatagaaatctgtaggcccagagtcgtccatgccaagcgcccattggataatatcaaaatggtgtgcgccccagtcgccgtcctttctaattccatactcataaaatctacgtcatccaccgccgtaatttcccaaaacacgttcggcattataagggcgccaaggagtttgtccaagccacttatcgtaattaaaaccttcgggtatcggctcctcctttagatttttaggttctggcgggaactctccgatggccgtcttaattgtatggatattgcctatatatccgttcctgacaagctctgcagccttgcggaaagcccactcgctgcgctgctgcgagcctacctgcaaaactcctccgctcttcttcactgcgtctgcaagaatccgaccctcctcaatagtgaggctcataggtttttcaacatatacggctttaccggcttgaatagccttgagagctatttggacgtgccaatggtccggagtgcagactgcgacggcgtcgatatccggccttgcgagaatttcctgataatcttctgtcgtaaaaatggggtggttcccaatatcatcgcgcgtcttattgatggattcgacctccttctttgccgactccaaacgcccgcgatggacgtcgcaaagcgccaaaacttgggtctgcttgcaccacgcaaaatacttgcggtgcccttcggagatcaatccgttgccaattatggccatatttattttgccgtttggagaaactcctccgcgccctaaaacgcgcgacggcacaatttgcgttccgagaattgcggccaatgcagccttaccgataaaatttcgtctgtttattttcattatgctataaaatattaatgttagcgtctctaatgaataatgcgtttccttcctgagctaggcgcgtaaaaatataaaataaattttcaaaatcaatccgcctaacctctcccgttaaaatgcaggcatatttcaaaatcccccagttttccggagccgtttttccggctccggaaattgctgcaaatcaatcaaacggattttctccttcgtaaagcggcttcaattccggagtgtatatttccttaacccccaactgcctaagcgcctcgaacaaaactcctccgcaatgggaaaaagcgatcgctacgtggtggtggaatttccccaatatgcaattccgataaaagcgcataaagcccggaacatacgcaacgccagttgacccgaaagttttcggatcaacatccaaaaaagagccttcgcaaatatacgcgcgcagtccgtcccccgatccgtgaatctgaagtattgtaatgtccgaaggcttaattgagccctccaatgttccgcgagtcaagtcaggcttttttcccggctccatcagccttgacattataagctggtagcaaacctttggcgacttcataaattttgaaggaacgtttccgcaatgaaataaccctatgacatcatctttgttttctatgtccaaaccgccaagcatgtcagacggtatggtatggtttaaatccaacatcgttggagcgtttccgctggcgtattggcacataagttcgcaaaccaaagaataggcgtcattttcgcacgctatcggaaatcccctctccgtaagcctggaatttataaagcacggcacatgctttgagtactcctcctgcctggtccagcattgagtggttgccccagacaattttagctttttgcgcatgctcaacaatgcctgctcgtacacggaaaatctttcagccaacacgggatcgtccacgccgtctgttttcgatatggatttttttgactcgtccgcgcattcgggggactctgccctgattcttgcaatttcgttttccaaatcaaaaagcccaaactcctctacttccacgccaatcgacgccaaagaagccacattgtagttgcagctttcaaaatccctgggacgtggcccaaataggcctatcgtagcgttcgacactccctttatcacttttacaattttagaaaaacgctctatttccaaagctccacgcttggcgtcaaccagcggtttttttggcatggaaaccctttgccaaagccccctctttgctattgccaatgttgcactcatgagcccgcagagggcgtcgccgcgagccgacgacacgctttccgagttttcctccgcagcagccataagcaagacaggcttgttgaaagcttttacaaaattggcgtcctcgatttcgggggagaaattgccaagatacaaaacagccgcgtcgcatccgtttttcagcaaatcctcggcagccgcgcacgcgtcggcctttgactctataatcgaacatcttccggatggcctgacaacatttacccccaatggggcaagttcttttagcagactttccgtccgcttttcagacagttcgcgcgggaaacaattgcgcgaagcgctcacaacgcctatttttacgtctggagagaatttatcaagttcaagaaacataccagtcaactccttttatttttccgtttgtcattataaaatttacgagcctgcaaaatcggttttgccgtttgccaaagcaacgccatcaaacttacattagaaattataacctgtttcgtcaaagattactttcataatatttcagtgaaaaattttattaaagcaaagtcgaacaagcgccctaaaacctaaaaaattatccgctatcatatttgcgagctttgagcccaatggcatagcgtattttcaacgtcaaaagccgcagtttttttgcgcagccttgcatatagaaattccctgccccgcaatttaaaaaaacgccgcccattgcgcatagccgacgcgcaaacgcaatcgggatcagaaaatccatttttgaaggatttttactttactaaactgtctgccgaggtttaatttaaacaccggtatgtatcgaaggatatgagaaaggcaaagccgacagtttttgtaagccaggactacaaatatgtatgcgattcttgcgaacccctaaaaaaggcgatatccaagggggaagtcgtttggcgcggatttaaaagggggttgtatccgggagatgaagccgattttgcggaattggaaggcataaggctctgcgcgtattgggacgcaaaaagcaaccaatcatggcgccttccgtttcatagaaacgaggggctggaaattgggtttgtttcaaacgggtccgtcgatttttccgccgacatagctgaaaacaaatttacaacgctcacgtcagagcatatcacagtcacaaagccatggcaggaacacgccatagggaatccggttctgacttcgtcgaaaatgttgtttttgataatagacttcgggataaggcgcccgaaccaagactgggaatggccaaactgggttatactgagcgattccgacaaaagagaattttcccaatacgtacccttacaatttttaagtcaacgggagaattgagggcgatttttagggaaatattcagcattatcgacgagaacaaaataagggaatcaatctcaatgctgtccatactgtttaatcggattcttcttgagttgctgtctatatttaggggggattcaaacgactactcaaaggattccccgaacataaacgtagtaaaatgctttttgcagcaacttgaaacatactgccatgaaaattggacactggcggcaatggcggaagactgcgggctgaaaactacaagattcacatattactgcaagcttctggcaaattccacgcccatgaacttattgaacttggcgcgcctcaacagggcaaagaaaatcatagagcaatctcctccgggcgagaacctgtctatgaccgacgtggcaatggattgcggcttttcaaccagccaatatttcgccactaaatttaaggaaacatacggatgcagccccagggagtatcttgccaagatccacatgaaataagcaatccgacataaaacaataaacctgtccggaatgcctacggcacagaaagaatcccgggagcctttcgttttaccgccgtaatttcaatccgcaaaaaactgtatttaaacaaatattttcgtgtaattcataaatctacataaatattgacaaattttgaagccaatattattaacaatttatgaataacaacaacactcaaatatggggatttgacataggaaaggcttctttgggagaagccgtttggtgcggaggaaaatttaaacatgttgagtctctaatacttgacaaagactttgccgagataaaaacctcagccggcaggcggcgtcaagccaggacccgcaaagcgcacaaagcaagagaagaatggcttgaaaagtgcttagaagattgcggaatagaaattctcaaacggaggaaagttggcattgtaaatgggcaatggaaacttatttccaaaggagacgctcgccttgaaaaagaatttccggcggaaggcgaagaagtctgctacaattcaatcgcactgcgctgcaagctaattctaggagaaaagctggaaagctggcaaatttttaaagcgcttaattcctcgattcaacaccgcggatacgacgaaaatatcccctggaaggaaacccaaaacgaatcaaaaaaagaagacggagattactttaagaaaatcgttctctacgagtcagagaaggaagatattttaaaccgccttccgcaagaatgcaaaagggaggattttgattttccgtgttttttcaaggcaaaaaagatgggcatttggtcggaggagaacccatataaagtcggtttgagaatatcaaacaacgcgcaaaaagcaaaggggtatgtgattcctcgaaaatacgtcgaaaacgaatttgtgcgacttgttcaaatggcatcactgcaatatcccaaacttaaggacaagcaaatgttcatattgtacgggatatctgagaccccgtacgcgtcgcggttcaaagacgcgcgcaaaaaattcggattgaaaaggggagccgactctgactggacggctctcggccaaaagataccgcgtttcgacaacagaatgataggcaaatgcaagctgataccaagattaaacacatgcaaaataaaatccccggagaagataaaatccgaagaagatctgctgcactacgacataacgcttgctctaaaactgttgaatttgcgattttttaaagattctgaaatatgcgcgttgagtttcgaggaatttaagaaactttttgaaataggcaaatctaacaaatacaaaatatcaaaaaccgaccttaaaaagttcttaaaatcaattggagcgtcggttttaagccaagaccattcggaaatagaggcgccaaggacttctggaagatcgtcgttttcccgcccggcgatgaaaattctaaaggaactgattttctcgggagaacctccgtctaaattcctaaaggcaaaaatagacaaaattgcaaacacggatcccaacaaaggaataatccgcgaagatctcgattttataagaataatgggagactgcccttggaacggaatttttatcccggatgtggaaacatataaatatgcctcgcaaacgcaggaaagctcggaggctcagataaacaaacttataggttcacaaaacgaccccattgtgcggcataggctttctttcttttatgagaggataaaggccctttccgaaaaattcggtgttccagataaaatagtacttgaattcgtgcgcgaggattttatgggcaaacaagcaaaaaaagacttaagcttgtctatgaaaaagcgttttgaagagaaaatcgacatagccaagaagctggatgatatcggatacaaaggaaataaaatgctgttaaagatggaactcttgcaaaaacagggattcgcatgcctatacactggggaagcgctgcaagagactgatctgccaatccttgaaatagagcatattgttccaaggagcctcggaggaccggacgcagcatacaactacgttctaacaagcgaatccacaaataaagcaaaaggcaatcaaacgccgtacaaatggctttctcccgatagagacaaatggcgcgcgtacactgaaagagtccgcgcccgcgctgcagaacttggttccaaacgctgcaggctattgctgtccgaaaacgcggaggaactcataaacaaatatacggctctggcggaaacagcctggatttcaaagcttgcccaacgcatagtatgcatgcattttggattccaatttggtggaaacaccggagaaaaacgcgtatttaccgtgcccgggaatattaccgcaaaaatccgcagcgcgtttggattaaacaagattcttcataatatcgacgcagacaagaaaaatatgtcagaattcgatattgtgaaactcgactacgaactagataaaaaaaatcgaaaaaacaagaagcaccacgccctggacgcaatgtgcctatgctttgcaccgacggggcccaacgctcaaaagcttggaataggcgcgctattgcctcctgaaatagccgcaaaagcggaagaattttttagggggtatatcgaaaaagtagtccccaacgaagtggcgccaaaaaaacccaaactggaagaaagcatatattccaaaagaacaataaacagaaaagaatgtattgtaagaaaatttaatcttgtagatttggcgtacaaaagcggcttgaaaccagtatacgatatctccgcaatcgaaaaactgcttgaagataaaccgaaaaagattccgcctatcataaatccaaccgttcggagaatcgtgagagattttgtttccacaaatccaaatgaagacgaatggcgcaattggtgcaaaaccgtgcggatgccgtccaagaacagaaacggcacgcgcataatcagagtgctggtttatgtaggaactcccgaagaatacaaagatttgtcaaaagatggatgcggggcatttcgaaagggagactcccacaaaggacaaattatttggatggataaaaacggcagatacaaagtttctccggtatatgttcattcatcaaaatcccaaacaatggaatcgattaaatcaaatcccgattttataaaaatagcaggattttttaaaagccattgcttggtggaaattgaaagtcccgtagtcaacggcaaaggagatgttcttctatctcctggaacatatatgataaacactataatggcagcaggaatggcaattctgagcgatacaaacggagtaaaaagcccggcaatcaatataaactaccttatgaacgctggtatgagacggatttcaatcaaatataaatgagctaccacattcttcacattaacgactacggctgccgccttacaaaagagcgcggtcttttggtatgcgaaaaagacggaagacaaatgggcaaaattgcctttgaggacttgcgcgctgtggttctgcttaacgaagcccagtcgataagcggagcggttctgtcggcaataaccgcaaacgacgccataataatacactgtaaaaatttcaagccggtcggaattacaattcctaataaccgcacatatgacgcaaaagtcgtgctaaaccaggcgcgcggcaacaagaatttgaactcggcaatttggcgcaaattgctgggagcaaaaattgaaaacagcgcttcgtgccttgagttgataggcgtaaaatgcgcaaacatcccgcaaataagcttgaatgggcaaaaaaatttgaatgaagcccggtatgcaagggaatactggaaacgctacttcccaatgttgggagaatacgggatgcgccgaaacccggaagataaaacgtctcctgccaatatttttctaaattacggatacggaataatgggaggtttgatacagcgcagcgttatagtgtcgggactaaactatctgctcggcgtaaaccataaaacatattataaaaatatcccgcttgtatacgatataatagaacctttcagatcatttgtcgactacgcgctatacaaatacaacctttccgacaacacgccaaatatacggtcatgggcggtatacctaggaaaatttctatccaatacccgcgtgcgcaaaggatcacgaacaataaaattaatggatgccacggatgctttgtgcgaaagcctcgcaaatgcataccgggaaaaaaaggcagacaatctgtgggttcctaaatttcataaatgaaatttgaaagaaagagtcctcttagaatgggatggttaatggcaatgttcgatttacccgtcatcctcgacgaggagcggaaagaagccgccagatttagaaaggcgctcttagacgacggatttataatgatacaatattctgtttactctcggccctgcgtatcgcttgaacgcatggcaaaatattacgaacgtgtaaaatcctacgctccgacgacaggagaagttagattgttattttttaccgaccgacaatggggaatgagtaaaatagttagcagaataccgaaagagttggagaaagtccccgaacaagttgagtttttttctgaattgatggaaaacgagaaaaacgaaaaattggatgagaacaataatttttttgttgtataaaaaaattgccgaatttcatggtacaatgtagagcataaaattcggcataatcagttaagactttacagctaaaaattttgttaagtatcgagcataaaataaattatgtcaatactattctgagaaagatcattttgctgtaaagtcaaaacagactttccgcaataagcttttacatactcattctgagaaagatcattttgctgtaaagtcaaaaccaagcggattgtgcacaaatactgttgcatattctgagaaagatcattttgctgtaaagtcaaaaccacagttcataaagtcaataattcggatgaattctgagaaagatcattttgctgtaaagtcaaaaccgttgccattgttttcctttctttgtccctattctgagaaagatcattttgctgtaaagtcaaaactctttttaaagaaatagaagatgaagatgaattctgagaaagatcattttgctgtaaagtcaaaacaggagtttttgtcgaaagtcaggcagtgggattctgagaaagatcattttgctgtaaagtcaaaaccaacgtaaggaaaggaaatagaagagcaatattctgagaaagatcattttgctgtaaagtcaaaacgatatgcaatgagtccaaaaatgggaatccattctgagaaagatcattttgctgtaaagtcaaaacaaagctctccagatgcgcaaaagcgcaaccattctgagaaagatcattttgctgtaaagtcaaaacagaatctcaactaattgactgcgcgttgatattctgagaaagatcattttgctgtaaagtcaaaactagcggacaatttgctaaaccaagtcacaattctgagaaagatcattttgctgtaaagtcaaaacaccgtttgcaatcaattttgaaaagcaacgattctgagaaagatcattttgctgtaaagtcaaaacagagttttttcgtcgtaaaaatagcaatttgattctgagaaagatcattttgctgtaaagtcaaaacaacattttttaaaagaggctcaccgtcacttattctgagaaagatcattttgctgtaaagtcaaaacacattcaatctcaataccgttcttgtctttattctgagaaagatcattttgctgtaaagtcaaaactagcggacaatttgctaaaccaagtcacaattctgagaaagatcattttgctgtaaagtcaaaactagcggctttcaaagtgaaaagccttaattattctgagaaagatcattttgctgtaaagtcaaaacacacccccactgtcaaaaacctcaaaaatgattctgagaaagatcattttgctgtaaagtcaaaacttcctttcttctaaaatccatttttgaaatattctgagaaagatcattttgctgtaaagtcaaaactcgtacatttgagcgcatccgagcataggaattctgagaaagatcattttgctgtaaagtcaaaactcgttttatcaaattattttttacattatcaatatataagtttgttctcttacataaaaagactcatttattttgcccatttttcttctttatgtaatctctgtcataaagaagcccggcgtttaacacaactagcacggaaccggcattatgcacgagcgcaccagtgacaggattcagcaatgccattacagaaagcgttatagctataatatttatagccatagacaggcttatgttaaattttataaggctgacagtcgccatggacaatcgctttaaatacggtatttttgatacatcgtcgcccatgagggctatttctgccgcatcaacagctatatcgctgcccattgcccccattgcaacccctacatcggcaatttttaaagcgggcgcgtcattcacgccgtcgcctaccatgcatacctttttgccggcagatctaagttcctttatcttttctacctttcccaacggcaaaagccccgcgaaaactctctttattccaatctttgacgcaataaattctgcagcctgcgggttatctccagtcaaaagaatcgattctgttcccatttcttccagttcggaaacaatagaagatgcattctcttttaaaacatcggaaagccccattgcgccggcaaatctgcctccgattgccactaatataactgcctttccggcattccgcaaccctccaatcccagttgcctcctctatttcgacggagttttcatccatgaattcggcgttcccacaaagaactttgcgccccccgacgaccgcgcataccccccgaccgggaaccattgtaaaatcatcaggcgccgacaagccaatcccttcctccgccgcgcgggaaacaaccgccttgcctaacgggtgttcagaacgtgattccgctgaagccgcataaaaaagcaaatcggattcagagaaagatttatccaaaacaattatgtcgcttaccgatggcttgcctaaagttaaagttcctgtcttgtcgaacgccgcgcaatcaactttccccattttctccaatgcagccccagattttactatgactccgtattttgcagcctgccctattgctgccattacggatgtgggtgtcgccaacacaagcgcgcagggacaaaacactactagcacagtgactgcacgggttatgtctcccgtaaataaatatgtcgcaacggctatcaccaaagccgaaggaactagccatgacgcccatttgtcgacaatccgctcggtaggagacttattctgttctgcctcgcggacgatttcaacaagtttcccaaacgacgaatccttgccaacctttaaagccttaatgtctatcgagccaaagcggttaattgtgccgcaatatactttgtcgcctattcccttatctaccggcagtgattctccggtcataaccgattggtccacagacgtctgccccgatattatttctccgtcaacgggaatcgattccccaggcaaaaccctcaatatatctccggcttttatatcttccagcacaacctctttttccccgccctcggtcacgattctaccgcgggcaggcgcaagcgataccagattttttatacccctctttgcgcgctccacagtcatatcctcaagaatgccgcctatagccattataaaagccacctctcccgcggcaaaaacttccccgatataaaccgccgcaaacatcgctatcgaaataagcatcggagacgatattttgcgccgaaaaattatctgcttgaacgccttaaacacaataggtattccgcagattgcaaccgttatccacgccggattaattggcagctcaactttcgctagcatgcatacaaggctcgccgccaaaaaaattccgccggctaccgtcatttttaatcccgataataattccaccgttttttccatagcattttctccgtcaaaatttcaaagctccatagctccaattgctttcttattaaaaaccgccaggcaatactgcgcgttgttaataaatccccatctaaaaattgcccccaattctaaactattctagaaaattgctctaaagccgcggaaagcttttttaaagcttcctctccttttcccgcatttaccgcgtccatcacgcaatggcgcaagtgcgattcaagtatggactgccccgccttgtgcagcccagccttcgccgcccctatttgaacgagaatgtcctcgcaatccttttcctgctccatcatccttattattccgcctatctgcccctgtatgcgcctcaaacgcttcacagccttttccgaatcaatgcactgtttcatatcttttttttgattatgccatatacccgtattgggtattttaaattttgtaaagaaaatttttcatgtttttgtgtcattaagattttatgcgcaaaaatgaaggtgcgcagaaatccgcagattgcgcattaatgcaaaataaacgcggcaaatagaaaaaaattgcgcgctggaaaaaacttcagcgcgcccaaattaaaaaattccaaattccccgcttatctgcgcctgcggagagccgcaaaagcaagcgccaacgcgccaaaacaagccgcaaaagccgctggttcgggaactgcggaagtcgcatttatccaataaccgccgtccccagcgtcgcgtatgtatgcaaaatctccgattgaatcctctattacacgaatattttctgcgcgcaagaaaccgtcgtcgtcgtaaaaagtgtcaatattgtcaagctccatgagcttcaatgtaaagtcgttatggttcgacagattaagggtgaaagtcgcgccatcggcatagcctataaaacttccgattgtcgaagaaaagccgtttgtctccattgccagagacgatccgtcgaagtatgtaaaacttccgaaatcattgtttgcgcctaaaacaattttggcatgcgacgcttcaaaatgctccgtttggacattgtcttggtatgtaagataataatttattatattaaagttagatgccccttgcgacgccgcgccctcggtattaatcgcgtttgaagagttgagagtcagcacgtacggattatccgaagaagtgcttattaaatacgttttctgggaaaagctgacggcatttgcggcagcatatgaagttaaagacccgcttagcaaaacgcaaccagtagaatcttccgtagttgatttcaaacttgcatttgcgccaataacattagtgccgttcaattttatagccattcttgtatcagcccagctgtatcttccggttacggtcacattgccctgtatgtcccaatttcccccgttaatagccgtaacagtcgcattggtgttctctgaaaggaaaaattttccaaatgcgataattgtacttgttgaaaaagtagaaccgtttacggaaaccgtcgatccgctgaaattggactgtccgtaaattttaaaatttttgtttatagttatgtttgcagtcgaatctgtattaaaataattgccccaatgggcctttccttctacgtttacatcaaatactatcgtagatttgccgattagaggatcggccagcttagaaaagcccaatgcaagagttccgtctcctgtaaaattaatggtatttgaagcagaacttgaggtaataagatcttttggagaatcgcagcctcctattgaaaaagtcaccccgctatctattacgatagtagtatctgtataatctccgacgttcaacctgtcaacccactggtctgaatcaacttcaagcgtaattccgctggagcccatagtaagcgatgtgtaaggagattccaacgagcttgacggaacttctccttcagaccatgtggatgaagagctccatttgccgctctccacaacatcggcatttgctgctgaaaaagctaataaaattactagcgaataaaaggacttgtatctttgcatttcaatattcctactctttaagtttttatttttatatataatagaatgcagtgttttcaagtataaaattctgtattaaaatggagggccaatggcagtaaatatataaaagtttacttatagcaaaaaccttttccaaattcagcggcttcaaaatgcgttttgatcggcgcgcaacacatggaaatacaacgtttaaataaaatctattttttaatagacctataatatattctatttccaaatagaaaatattttcttttgaacgggaaaaaaatcggcggcgggaaaaatccgccgccgaaaccgtaaactcttggcaagttattgggcgctttttgcgtcgtccttgaagaacagcataaacgcaaccaacaacaccgccgaaattccgctttctacaaggaagattgttttccaatcgacggccgttcctgttgccgcaacctgttttacagcatcgacagtagcggtgacgctctcaaccgacagcgtaactgtattggtttctattagccatgttgagaagaacgttcccaaaatttgcgctatcccatagaagaagaagaaaagtccttgcgcctgagctttgatgtctgcgggagcttttatgtcaatgtacatctgcgcgacgacaaagaagaatccgaaaatgattccgtgcacggcgattgcaccccagtacaacccgttgatttccggggcaaaagcgctgagcaaatagcgcaatagcatcgcaaatatgcctaaacccatagtcttcttgaatcctaaaaatttaatagaaatgggaaccaacaccataaaaagaagttctgaaatttgcccgacattaagcgttggagtaatattttctatgttcaaagtcgacaagaaagacgcatacatccaataaattgtaaatgccacagtccacacgacaaccgacgccataaaaattgcgatatttgtgtctttcagcattacgaaagcctttaatccaagagcctcggtaattgacatggactctcccttggatttcggcggagtgaccggcaggaaaagcgcaaataccgcagcaacggcggcaaccccggcgccgcaagccagaggaatggctgtgccgtcaatcacgacgtcgaacatccatttagccgcaagcgcaaaaacagccgcgcaaacccatccaagagacccgaacacgcgaatatacgggaaagcttcgggagtgctgtttgccattgcgatagtggctgtaagcccccatgttggcatataggcgcacatagcgagcactagccatacaaatatcagagtcggggatgtcgtgacataagcagctcccaaaaatacggctacggcaacgttcaagacgaacagaactttttccgcgctcgcgactctgtccgcaaacattcccattagcggcgaaaatatcgagcctattgccattgtggacatgataagggaaaacattaccccctttatctccattttatccaggtagctcgacagctgcacccagaatgccgccacaagcataaactgcaaaaacatcattagactcaattttgttcttaaaataaatgacatataattttactcctgttgggttataattggttgaatatggctgaatttttaggcaaaggcaatcttttttcacgccaaaattgcaagagcttggcctccgctcattccgggttttattcccaaagcctcggcggctttgcttacggcgacaaccggctttaagcgcatgtcgtcgtaagaatttaccccggttacgattgcgagaacgtcgccgagcttgtcggctgtttcaacttttacatacccgcaggccagcatccccttttttccatttattatcagcagcgaagcattggttgtttttatagtgtaagcttgaaacgattttccgtctatatttatattgtccatacgccgacattagagtatattataatataaaagaaaagactagaatttgaatttttgacaagaagcgcattgtaccaaaaaaatcgaacatacggcaaatagaaaggtcaatattacatatgataaaaacaaaatacttccttgtagcggcggttttgtctgccgcattgttgccattaggctgctcaagcccaaacggcaaaaaagcctcgtaccccaacgaatgcccctatgcaaaggcggaaggcgcctgcgcaaaaacgccccaatgcaaacctgacccaaatgaaaaatttgaggacggcaaagtcatggagcctcttttttcaaaacttaaagacacggtctggactccagtatctctggcaaaccaaggagacttgaaagcgccaaccactaacgggaaatacgaagtttatatgttcttcgactccaactgccgcgtaaacggcaaagcgggcgacaatcttttcggaggaagcccttcaataacgccgagcggcaattttaaggcagacaagtttttcacaacccgcatgatgggtccaaacttcaaatatgaagacgctttcttaaaaacaatttcaaacgccgatttcatttgcgtaaaaggagactcgctgaaattgtacaaggacggtaaaatagccgccgatttcaaaaaaatatcccccgaacaaacaaccgcaaaacccggcaaataaatgtccgaaacaaccgctccaataatagtcgaagcaggactccgcgtcaaggatgcggaagcctttaaaagactcgcggcagacgtagtcgcccaaacccgcaaagaacctggatgcttgcgctacgatctgctgcaagacgttgaagatccaaacatatttctttttatagaggaatacaaggacgaagacgcgtttcaaacgcataggaatatgccctacatggctccttttagaattgagcgagaaaagcttctggatagatttacgggactccgcaaactcaaggcgctatagctaatacattccggacaatattcgcaggcccggcttagaagaatattccgccgcaaaatttttacgggggaatataggtcttttttggctagaatgcttgacaccacagccgaagaatatagattcttactcaatcgtttgacggattactttaacaacaaaaaattctatgaatagacgtgaattcattaaaaatgttgcgcgcgcaggagtggctgtcggatttccgaccattattccggcttccgcgctaggcaaggacggagcggtcgcgccaagcgagcgcattactattgcttcaataggccttgggacccaggggactgccaatacaaaaaacttctttagc

SEQ ID NO: 3235 - DNA, 23186 bp, synthetic construct
  source 1..23186: mol_type = other DNA
  misc_feature 1..23186: note = Synthetic
ctcaaaaagatggtttcggaggtgggcgccgccatatccaggtgacgccgcaaagcggctttccgggcggccggtctgcggcgcgcgccggcccgcccgcgccgcaaaaagcgcaggcgggatataaaagtgttgccattttgcgccttcgccggataacttgtccggaagttttttttgcatatggaaattgaaagccagctcgaaatattcgcgcagaacgccgagactttcatcggcgcagaagatttgaaggaaaagctcgccgccggcaggaagctcagggtgaagctcggagtcgacccgacgcgccccgacctcacgttcgggcacatggtggtcttcaacaagatgaggcagtttcaggacctcgggcaccaggccgttctgattataggcgactacaccgcgtgcatcggcgacccgagcggccgctccgccctgcgtccggttctcaccccggaggaggtggaggcaaacagccgcacatacctcgagcaggcgttcaaggttttggacgagtcccgcacggaggtgcaccgcaacagcgagtggttttcaaagatgtcgttcggggacgcgctggagctcgcgcgcaagatgacggtggccagaatgctggagcgcgacgacttcgcaaagaggtacgcctccaagacgcccgtttcgatagtagagttcctctatccgctcgtgcaggggtacgactccgtgatggtggagtccgacgtggagctcggcggcagcgaccagctcttcaacaacctcgtcggccgcgacctccagggccagcgcggggcggcggggcaggcggtgataaccatgccgctgctggtggggctcgacggcgagaaaaaaatgtccaagagctacaacaactacatcgcattcaacgacgacccgcgccagatgttcggcaagataatgtcggtaggcgacgacacgatgtggaagtactaccaataccttttgctctattcgcccgagcggattgccgccctcaaatcggggcacccgatggcggcgaaaaaggagcttgcgcggctgatggtcgaaaagttcgccggcgcggaaattgcgcgcggagagctcgaaaatttcgagagggttttctccaaaaacgaaattcccgagaccatgccggagttcaagtgggcggatgttgccgaatccggcgagtgcaggctcgccgacatcatggcaaagaccggtttcttcccgagcaaaaaggagattcgcaggctgattgagcagggcgcggtgaaggttgattcgcagagggtgtcggatccgtttgcggcgctccggcggcccgcggattccgccgtcgtccaggcgggcaagaggacctttttcagggtcagggcgtagcgcgccggcagccgtatggacgcagcccacgtcgaggctctcggcaccgagaggatatcgaagctcatcgtgcgctattcgatgcccacgatgctctcgaccgtcgtgaacgcctcctacaatgtcgccgaccgcatattcgtggggcgcacttgcggcgaggacgcgctcgcggcaatcacggtgtgcttttctccgacactttttctgctcgcggtggccatgacgatcggccacggcagcgccactatgatttcgatatgcctcggggcgggcaggcgcgaggccgccgaaaagtttctggggcaggcggtgtttctgttcggagtgttttacgcggtcgtggcggccgtcgcgctctcgttgatgccgcaaatattgacgttcttcggggcgaccccaaaaatcctccccgacgcctgcgcgtattattcaataatcataggcggtctgattttcgacaagatttcctttggtgtaaacaacctcgttcgcgccgagggcaggccggtcgtcgcaatggcgacaattctcatcggaggggcgacgaacgtgtttctcgactggctgttcctcgtgaagtggaattggggcgtgcggggcgccgccatagcgaccgtcatagcgcaggcgtgcgcctccgcgtgggtaatagggtattatttcagcgggaggaactttttgaaaatccgcctgcgcaacgtccgcgcattcccgaggcttttgaggcagatggcgtcagcgggttcgccgtcctttataatacaggcgttcgcggcgctctcggtttcggtgttcgtggtgcaggcgcgctcctacgggtcggagtcggcgctcgcggtgataggcgtgtgcacaacggtgacgacttttctcttcctgccgatagtcgggctgagcatgggcgtgcagccgatagtcggctacaactggggcgccaaaaacttcaaaagggttcgccgcgcgttctcccgcgcgctgtgggcagccaccgccgtgtgcgccgccggatttgcgcttgcggagctcttcccgggggcgatattcgagttgttcctcggttcagactccccgctgctctccaccggagagggcgcgctgcggctcatggtagcgggcatggcgtttatcggcgcgaacattgtggcgtcggggtatttccaggccaccaagcgcccggcggtttccatattcgtcacaaccctccgccagataatattcctcgtgcccgccatgcttctgcttccgcggattttggggctcgacgggctgtgggcgagcttcccgataggcgacataagcgcgttttttgcaaccctgtttttcatcgtccgcgaaatgcgctcgctgagacgcaaagtcggggaagaggaggcggcgcgggcgcgatttgcctaattccgttttttgcgcgccgaaaaaacctcccgcgcggcaaaaagatattgaaaagcgcgcatttttggaaatactcggcgcaatatgttaagaaggactttcatagccactttgccgtctttcgtcgcggcggcggccctcgggcagtcgcacatagacgccggcaccgtccagacggaggcggggcggctcggcgtgcccgtgtattccgtcgcgataacctctcccgacgctaatttggcggctctggccaagcgcgcgttcggccttcacgggagctataaaatagtcccgcggcagagcgcccagttcgtgttcgatttctcccgcgcgggcgccaattccgtaaggatagcgatttcaaaggggctttcgttcgagagcgtatgcgagggttcaagcgcggtagaggctctcatgaaggcttgcgacgccgccgttttgcgcacgctgcgctcgccaggatttttcgcgggctcgatagcgttttcatattcgtccgacaactggaatacttccgaaatatgcgtttcggatatcgtgttccaaaacgtgcgcatgataacgcgcgacaagtctgactccctcatgccgcacttttcgcccgacggcaggagaatcctctataccggctattacaggacgggatttatggatttgtactccatagatttggcgaacaacacgcggaaggtgttcgcgtcgttcaagggcagcaacacgggagggtcgttttctcccgacggctcgaaagtcgccctcattttgacttccagcggaaacgcggaggtgtggattgccaacgcttcgggcgggggattcaggaggctaaccaataacaaggcaaccgagagctccccgggattttcccccgacggctcgaaaatcgtattcgcaagcgacgacatgggcggcccccagatttacaccatgccgtcttccggcggaaagatgcggcgcgtcaacacccgcatgagcggctactgctccgagccctcatggaacccgcgcgaccctaacaaaatcgccttcaccgcggcggtaggcaggggctttcaggtcgccgtgtacgacttcgcgtcccgctcgtccaaatgggtgagttcgggcgagaacacttcgggcgcggtgtggctcaacgacggcaggcacctgatatgcacaaagtcaaggggcaaggcccgcaagctgtacgtcgtggacaccgaaaccaacagccagaagcccctccacacgtcgtctttcaacgcaaaggaggcggacttcgtgtacgccccgcgccgataaaaacaatccgcccgctcccaaaaatgaatctcgtaacgctcgacctcgaaggcgtgctcatccccgaaatctggatagcgttcgccgacgccgcgggaatccccgaactgcgcagaaccacccgcgacgagcccgactacgacaagctaatgcgctaccgcctgggcatactcgccgagcgcggcgtgaagctcgctgacataagccgcgtcatatcggggctcgagcccctcgacggcgcgcgggagttcatggactggctgaagtcgaggacgcgcgcgataattttgtccgacacgttcgagcagttcgctgcgcccctcatggccaaactcggctctccgacgctattctgccacgagcttgaaatcgcctccggcggcgcggtctccggataccgcctcagaatgcccgaccagaaacgcagggctgtcgaggccttccgttctctcaacttcgaggtgatctccaccggcgactcatacaacgacctttccatgctgcgcgccgccgaccgcgcggtgcttttccgccccaccgacaaattcgcggcggaaaatcccgaccttcccgtcgcgcgcgactacgccgaattgagggagtttttttcgcgctatgtcggcgaatgacttttttatgaaatcccaaaagacaaacggcagatacgccgcccgcggagtttcggcgggcaaggaggaagtccacgcggcggtcgacaggctcgacagggggctcttcaagggagctttttgcaaaatcacggaggactacctcacgggctcgaagactcgctgcaacgttatacactcggacggcagcggaaccaagtctatcatcgcctacctccactacaaggagacgggcgacgcctcggtttttaggggcatatcccaggattcgattgtgatgaacatcgacgacctgctctgcataggggcggccgagaggattctaatatccaacaccgtcaaccgcaacgcccgcaatttcggcggcgcggccctcgcggagctcataaacggagcggaggatttcatcgcgcgcctgcgctccctcggcgtgaaaatctattccggagggggcgaaaccgccgatgtgggcgacctcaccggagcggtagtggtggattcgtgcgcggtggcggtcatgcgccgcgacagggtgatatcgggcgccggcataaagccggggctcgcgatagtggggctttcatcggcgggcagggcagcgtacgaggactttgaaaacagcggaatcggctcaaacggcctgacgagcgctcgccacgacatgctgtgcccgtactaccgcgaaagctaccccgagactttcgacccgaaaaccgacaaaagcctcgtatactgcggcccgcacaggctcgacgaccccctcgagggctcgaatatgacggtggggcaggcgcttttgtcgccaacgcggacttacgcgcccgtgataatgaaaatcatgaagaagcgcccggggctcataaaagggctggtgcattgttcgggcggcgggcagaccaagtgcgtgcgcttcggcaggggcgttcatttcgtcaaggacaacctcatggaagtccccccgattttcagggcaatacagaaggcgagcggcacttccgacagggagatgttcgaggtctacaatatggggcaccgcatggaggtctactgcaagaaatccgacgcggcgaaggtcgtggaaatttcggagtctttcggaatcgcggcccaggtggtcgggcgcaccgaaaagtcgtcgcgcgcggacggcaaaaaccatgtgacgataatgcgagcgggcggggcgatagagtacggcccgcgggattgacgccttgcgggcgcggcgcaaatccgccgcaaaatccggaaatttcaaaaaaataaaaaatgttaaaagcaggcatagtcgggctgcccaatgtgggcaagagcacccttttcaacgccctcacgcgcagcagaaaggcggaggcggcgaattatcccttttgcacgatagagcctaacgtcggggtcgtggaggttccggacgacaggctcaagcccctcgcgcagatcgcaaagacgaacgtcataatacccgctgcggtggagttcgtcgacattgcgggccttgtcgccggcgcgagcaggggcgaggggctcggcaacaaatttttggcgaacatcagggaggtcgacgcgatagtgcacgtcgtccggtgcttcgacgacggcgacattctgcacagcatgggcagcgtcgatcccgtccgcgatatagaagtcataacgaccgagctggttttgagcgacatgcagagctgcgaaaagcagctcgaatccaactcccgcaaagccaagggcatggacaaggaggccgtcaagaacgtcgagctcttgaagcggctgatggcgcacctcgacgggggcaggcccgccattacgcttccggacgtttcggaggacgacctcgcgcggataaaatctttctttctcctgacttcaaagcccgtgatatacgcatgcaacgtcgcggagtccgacatcggcgacggcggggcgtccaacgggtatgtcgccaaagtgcgcgagttcgccaagctctcccacggcgcggattcgtgcgttatatgcgcgcggctcgaagaggagctttcgtcgctcgagccggcggaggcaaaagagtaccttgcggagctcggggcggcggacagcggagtttcggagctgatcaggaagacctacgatttgctggggctggccagctactttaccgcgggcgagaaggaggtcagggcgtggactttcaaaaagggaatgaccgccccgcagtgcgcgggcgttatccacaccgacttcgagcgcgggttcatcaaggcggaggttgtctcatacggcgacctcgtcgcggcgggctccgtgcacaaggcgcgcgaggccggcacatacaggctcgagggcaaagactacctattcaaagacggcgacgtggcgctgttcaggttcaatgtctgaggcatgaaaatagtcgcgctgaaatttttctacgctctggcctcgtcaaagaggctcgccgtgggcctgatggtttacgcgacttttctggttttcgttgcgacgctcgcgcagagggaaatcggggtagccgcggcgcaggccgaatacttcgagagctttttttgcgtcggttcgctcggcccgctgaaattcccgctcttcggcggcgcgctcgtcgggcttgcggcggtcgtcaacattttggcgagcggctggcggtacgtcagcggggggcttttcggcttcggcgcgtcggtagcgcacatggcgctcgttctcctgatagtctcgggcgcgttgcagtattttatgagggtggagggctcgctcgtcctgcgggagggaatgtcgtccgacaccatcgtggtcggcgcaaaagagggcgcggcgggcgagcccgtcaagcttccgttcagcgttaagctcgcggatttttccgtcgagcattgggattcgagctcgaccccgaagagcttttcgagcagggttgaattttcgcgcggcgaaaacaggtcggagcaggtcgtttcgatgaattccccgggctccttcggcggctggactttttaccagatgtcgtacggcgacggcgggaggacgagcgtgctcgccgcagtccgcaatccggcgcggcttctgccgtggctcgcggtcggggcgacttttataggcatggcgataatgttcctgccgaggctttttgagaaagggaggggcggggatgaataaggcggcgttttcattcggagcattgatttcgattttcgtcgcgctttcgcctctcgcagtgtggcaggcatttctcggcgaccccctgtacgactcgcttttcggcccgagcttcggttccctccccgtgctgaaagcgggtagggtgatgcccgtttcgagcgcgtctgcggacgttctgaaatccataagcggcagtgcgaccgcaagggtcgggggcggcaagatttcgtcatccaaatggctctggacgctgtcggctgacgccgcgcggctctccggagaaaagacgatgcgcaccgacaacagggatctccagaagattctcggcgtatcgggcagatatttttcgtacgacgatttggccaaaaattacgcgaaagtcgaggaggccgcctcctccgatggcaatccgcccctcgcctccgctgcggcggaggcgctcgaaaaggggctcgcgtacgccgtggcggcaaacgctttttcggtaaaggcccccggggaaaaatcggcggtctccggcgtggaaaactggcgtaaagcggtcgatgaggccgccgcggaactcaaggccgcgcgcggggaaaagcgcgagcccaaccccgccaagctctcccgcgcgagcgccatgctcgaatacctgcgcggcgtagccgaatttgagggagcgtatcccgacgccgccgttaattccatcgcctatggctcgggctattcaaccccgacaaaggaaatgcttgatttgaaggcctccgagctctccaagaggcttttgaaaatttacgcgcgcgcatgcgacgccatcgccgccggagactcggattccgccaaaagcgcgctgtccgaggccgatgaaatcttttccaagtcgggaggattgcagcggctgaggctgaaagtcgaaaatttcgcgaacgccctgtcgccgtttttcggggggttcgtcctctattttttcgcgctcgccgcttttgggctttcgcaaatattttcctcgcgcggggctgcgctgcggactgtcggggaggtgtttatggcgtttgcggcgttcttgcaggttctgggaatcgcccttagaatgtacatacaaatgcgcccgcccgtgacgaacttgtattcgtcgctggtattcgccggcgcggtggcggcggttctcggagcatacatatatttcaggaaaaaatacgtgtcggcggcggtcgccgcgtgcgcttcgggtctgatgtcgcttgtggtcgcgatgaacctgccgtacagcggcgacaccatgggcatgatgcgcgccgtcctgaactcgaacttctggctgaccgcgcacgtcgtgacgataatggtcggatattgcggagtgtttttggcggggtttatggcgcaggcgaggcttgtggcaaacgtcttttcgcgcggaaatttcggggcgatgacgggagattcggcgcggacggtgttcgccgtcctctgctttgcgctgatgtttacttttgccggaacgatgcttggcggaatttgggcggatatgagttggggcaggttttgggggtgggaccccaaggagaacggcgcgctcatgacagtcctgtggacggcggcggccatacacgccaagagcatgaggctgtgcagcgaccgcgcgtttctcgggttagccgtgttcgggaacatcgtggcggcgtgggcgtggttcggcgtaaacctaatgggggtggggttgcacgcgtacggtttcatagagggcggatggttttggtttttcgcctttgtgtgcagccagctgcttacgctgccgctctgcctttacaaattcagccctccttccgcgcccgccgccgcgtccggcgaaaataaaattgtcggaaaataagcttgtcttcggcgcgggaaccgccataacggagaaaataaaaatgcgaggtgtagcttagcctggtagagcgctacgttcgggacgtagaggccggaggttcgaatcctctcacctcgatttcttttaagccgcttcccctacggggttgcggctttcttgtggattccgtttgccgtttctgacaaatgctctatggaatatatttttttgtatgattgtaaaataattcttgcggacttttgaaagattaggtatatatatgtcattatattttatagaattaatatctggtttttaaattatgaaagttatggaagctgaaaatgggaaccatatttgggggtttgatatcggaaaaggatcgctcggagaggcggttttaatgggggctgagtttaggcatgtgacttcgctgctgcttgatgaggacttcggagaaataaaaaccgcggcgggtctgcggaggcagatgagaacccgaaaggcgcacaaagccagggaaaaatggttggagcgctgtctcttggagttcggaatagagccgctcaaacgcagggaggtgggaattgtaaacgggcgttggatgctgatatcaaaaggcgacgaacgcttggagcgcgaatttccgccggacggggaggacatttgctacaacgcaatcgcgctgcgctgcaagctgctgctcggagaaaaattggagagctggcagattttcaaggccttgaattcggctatccaaaaccgaggatacgatgaaaatatcccatggaaggagtcggacgtttcccttcccaaaaaggacgacgacgattacgccaaaaagctctcgcagtattcaagggaaaaaggcgaattgttggagagttttgaggacggggaaaaatacgactatccgtgctttttcaaggcctataaaatggggctttggtcgccggaaaatccggagcgcgtcgagatacgcatcggcaacgacgcccaaaaggtgaaagggtacgtcattccccgcaaagacgtggaaagggagtttgaaagcctcgtcgaggccgcctcaaaatggcatcccgcgatgaagggaaaggccatgtatataatgtacggaattgcggaaactccatacgcttcgtttaagcccgcgcttagaaaaaaatttgacctcaagcgcggcgcggaaagcgactggacggcgctcgggcaaaaaataccgagattcgacaacaggataatcgacaaatgcaggctgattccgcgcctgaacgtttgcaagataaggcccctttcggaagcaaggggcgagggcgatttgctgcattacgagattacgctttctttgaagcttctcaacctgcgctttttcagaaattcaaatgtggaatcgctttcgtttgaggaattcaaggctgcgtttgaaatcgccaaaagcgcaaaatacaagatgggaaaggcggctttgaaaaagtttttgaagtcgatttcggcaagcgttttgagcgaagaccagtctgaaatcgaagccccgagggagagcggcagggcgtcgttttcgaggcccgcgatgcttttgcttaaagagctcatcttttcgggaatgccgccggccgagttttacgcaaaaaaggcgggggaaatttcaaatgccgaccccaataaggggattgtggcttcggatttggattttataaaactgatgggaaattgcggttggaacggaatttttattccggacgttgaaacctaccgttttgcaaacaacggcgccgactctgcaaaacttataaacgggctcatcggttcgcagaacaatcccatagtccgccacaggcttgcgtttttttatgagcgcataaagtttctcgaatcaaaattcggggttcccgacaaagtcgtattggagttcgtgcgcgaagacttcatgggtaaagagcaaaagaagcgcatgcaaatagaaatgaaaaagcgcgcttcggagaaaatgctcatagcgaaaaaactggacgaggccgggtacaagggcggcaatttgttgctgaaaatggagctgcttgaaaagcagggaggaatctgcctgtataccggcgaacccctgcttccgagcgagcttggagttctcgaaatagagcatatagttccgcgcagcaggggcggccccgacgcccaatacaactatgtgctgacccgcgagaaaaccaacaaggaaaaggcggataggactccgtttgaatggctttcgtcagatcccgtaaaatgggcgggctattccgacagggtaaaggcgcgcgccgggcagcttggaagaaagcggtgcgaattgcttttggaaaagaacgccgaagagctggtggaaaaatatacggctctggcggaaaccgcgcacatttcaaaactcgcgcaaaaaatagtctgcctgcatttcggtttccagttcggaggattgggcggaaccaagcgcgttttcacagtcccgggggcgctgaccgccaggattcgcagtttctacggcttgaataaaattctgcacaatgaagatttggcgaaagatgccctttcatatgaggaagttttgaagcgcggcgaggaattggacaagaagaaccgcaagaataaaaaacaccacgcgctggacgcgatgtgtttgtgttttgctccgacgggcgtcaattcaaagcgcgcgcggattgatatgctcttgcctcccgatattcgcggcgaaagtgaagccgaactctttttcagaaagtatctcgacaggttgattccggtcgacgtcgctccgaaaaaaccgagattggaggacggcatatattctatgcgcgcggtcggagggaaaaagtttatggcaaggcgcgtcaatctcgtggatttggcgtatacggtagggcaaaagcctgtctacgatatttcggttctcataggtaaaaaaaatccgaaagaaaagaaaattataaacgcccaaatccgcaaattggttgcggatttcgcgcggacaaatcccacggaggacgaatggagaaagtggtgcggcgaatgcaggctgccgtcaaaaaacgggattggaacgcgggtgataagggttctcttaaattatggggagcccgccgaatataaagatttgtcgaaagacgggcgcggcgcgttcagaaggggagacgggcataaaggacagatcgtatgggaatcgacagacggaaaatattacgttgttcctatatatgtccacgcctcaaaagcgaagcttcttgcggagttggacgcgaatcccaaaaagaaaagggtatgcgacatctttacttcgcactgtatggtaaaagtcggcaatacctataacgacaaaggcgaactgctcttgcacgaaggcgtgtatatggtgaatacgatacagacggacggtcggggtaaattaacgaatacaaatggagagaaaagtaatttgataaatataaattacctgatgaaagccggaatgagaaaagtttcggttaaagacctatgagttatcatatccttcacatatcggaacacgggtgcgggctctcgaaagagcgcgggcttctggtatgcaggaaggacggcaagacgcttgggaaaatcgcaatagaggatttgcgggcggtggttattttaggcgagagcgtaaatataagcgccgccgtgtttgcgggcgttttggataacgacgccataataatacattgccgcaattacaaggctgtcggggtttccgttcccaatagcagaacctatgacgcgcgggtcgtcctaaaccaagcggcaggaaaccgcaatctgaacgccgcgatatggaggaggctcctgcgcgcaaaaattgaaaattgcgcgcggtgcctagggttgatcggcgttaaaaattcgcgcctcgaaaagttttcggtttcaaaacgcgagccgaatgaggctcggtgtgctcgggagtattggaaacattattttccgcagttgggcgagagcgggcaggggcgggttccccggggaaattcgtcgccagtgaatttgtttctcaattacggctacggaatattgggaggcattgtgcacaggagcctgattgttgcagggttaaactgccttttgggcgtaaaccataagacgtattataaaaatacgccgcttgtgtacgacgcgatagaaccgtttcgggcgtttgccgactatgctctgtacaattatatgtcgggatgcaaggaacccaatatgcgcgaatggtccgtatttttcggaagatttttgaaagacatgcgcgtaaaaaagggaagggcgacggtaaagcttatggacgccgctgacgtgttgtgcgaaagcctcgcgaacgcgtatagatataagaaagcggaactcatgtggtttccggttctcgattgacgcgcgtgcgaaacaaaaagaaaagtcctttcagaatgggatggcttatggcgatgttcgacttgcccgttcttctcgaagaagagcgcaaggaggccgcgcgttttagaaaagccctgctcgacgacggttttataatgattcaatattccgtatattcccgcccgtgcgtttccctcgagaggatggcgaaatattataataaggtaaaaagctacgccccgactaccggagacatacggttgctgttttttacggacaagcaatggggcatgagcaaactcgtgtgcagagttcccaaaaaacttgaaaaagttcccgagcagatagaattttttgacgccttgaatgaaaaggagccaaaagtggacgatgacggaaattttctgttgttttgaaaaaaaatgccgaattccaaggtgccatgcagagcttaaaattcggcaaaatcagttaagactttacaacaaaaattttctataagttaaagcaacttatattgctatgtcaataatatttttagaaagaacattttgttgtaaagtcaaaacgaaaagatgatatgcctggatttactccacatttttagaaagaacattttgttgtaaagtcaaaacatcaacgcgccaacaaagcgcgcaattgcaatttttagaaagaacattttgttgtaaagtcaaaactagaggatttaaaacgcaaagaccttttcttatttttagaaagaacattttgttgtaaagtcaaaacgaaaaccgaacaactgaatttgcgggaactatttttagaaagaacattttgttgtaaagtcaaaacatctttgccttcaaccgtgcagggcgtcccatttttagaaagaacattttgttgtaaagtcaaaacccgtccactatcgcccgcgcctcctcaatcatttttagaaagaacattttgttgtaaagtcaaaacaaagaagcgataagggaagcgggcgagagtatttttagaaagaacattttgttgtaaagtcaaaactgtatgtgcgcacgacttcaaacacaatacatttttagaaagaacattttgttgtaaagtcaaaacgttaggttttgcttcgcgtttgcttgaattatttttagaaagaacattttgttgtaaagtcaaaacctggtctatcgtgacagacaaaactattgaatttttagaaagaacattttgttgtaaagtcaaaactcttttatcacctcatcgtctgtacaatggatttttagaaagaacattttgttgtaaagtcaaaactagcggcaagcactcgcatactatgggcgaatttttagaaagaacattttgttgtaaagtcaaaactcagggaaggcaaaatagaattcaccgtcgatttttagaaagaacattttgttgtaaagtcaaaactcaaagtataaactgctttttgaaaacgtcatttttagaaagaacattttgttgtaaagtcaaaacacggcgatgcaatccgcgaaggctttttgtatttttagaaagaacattttgttgtaaagtcaaaacgtatggagcggaactataccacgatttcggatttttagaaagaacattttgttgtaaagtcaaaacttcaggcttatggttttttctgaaaaactcatttttagaaagaacattttgttgtaaagtcaaaacgcgcgccccgttcagtgtgattgattcgagatttttagaaagaacattttgttgtaaagtcaaaaccgcacagacgaaagagaatgtggatattggatttttagaaagaacattttgttgtaaagtcaaaacatttgcgccccatgaccaaacggtgcactcatttttagaaagaacattttgttgtaaagtcaaaacgcgcgcgcaaagagcatttaaagcggccttatttttagaaagaacattttgttgtaaagtcaaaacttctggacaccgtgggatttgacacagagaatttttagaaagaacattttgttgtaaagtcaaaacatacggctaaaaatcgagcaattagacgcgatttttagaaagaacattttgttgtaaagtcaaaaccggaacgggaagcggaataacgcccgagtaatttttagaaagaacattttgttgtaaagtcaaaaccgacgttgacgcttcgtacggctcgcgaaaatttttagaaagaacattttgttgtaaagtcaaaacaggtgcgacgttattatctttgggcaacttatttttagaaagaacattttgttgtaaagtcaaaacatgttttaccgtggcaacctacttgcgctaatttttagaaagaacattttgttgtaaagtcaaaactacgaagaaaaacaagttggcactaagggcatttttagaaagaacattttgttgtaaagtcaaaactgggagctgacgacgtgggagcgcctcacaatttttagaaagaacattttgttgtaaagtcaaaactgttgaaatgggctatgaagtcgggctttcatttttagaaagaacattttgttgtaaagtcaaaacaactttggcaatcaatgctcgcgacgacgtatttttagaaagaacattttgttgtaaagtcaaaactcatcggaagacctcgcgcaactcaacgtcatttttagaaagaacattttgttgtaaagtcaaaactaatgaagcgaaccaattctggcgggtctatatttttagaaagaacattttgttgtaaggaaaaatttaaatttgaaagttaatattttttatggcaatcccaatcgggcggcgagggcgttggcgcgggtggagatcgcttgtcgggctttttcgatttcggctttgcgggcggctatgttttcattggctatttttgagaggtcggagaggttgtagagaaaggcgtcttctatttcgccgcaatcttcctctatgttgcgcggaaccgcgaggtctatcaaaaaaaccggcctgccgcctctctttttacacgcggcctctatgtcggccttttttaacagaggctctcgcgaaaggcttgcgcagaggacgatgtcgaatttttcaatgttttccttagccgccgcaaagtccgccgaccggcagccgattttctcggcgagcgcatcggcgttcgcgcgcgtgcggctgcatacgagcatgtttgacgccccgcgcacatagagggcgtcggctacgagtttgccaacctcaccggagcccatcagcagaattttggcctttgaaatgttttcaaatatccgcagggcgagctccgcgcagacgctgccgacgcttattttgccgcggcctatttccgtgttcgtgcgcacccatttggcgcagtggatcgccttttggaagagggcgttcagcgttggcccgcagtgtctgagccctcttgccctctcgtacgccgccttgacctgcccgaggatttccgtctcgccggtcatctgggatttcagccccgaggccacggcgaagaggtggcttatcgcctccgcgttttttttcacggagcagatttttttgaagtcctccgcgtccgccccgtaaagcgactcgaacaccgcgtccgcgagtccgtcggaagcggcggaaaagtagatttccacgcggttgcacgtgctgagcgccagcgcctccgagacgcccccgatttgcaggattccgctttcggcgaatgagcacgccgcctgcggcattccgaacctgccgagaatttcaggcccggcggtctcatgggatatccccgcggcgtaaaggctgtttgcgataggcgccattttccccgaaagctatcccagcgccagctccctcatcgccgcgcagaactcgaggagcttgtcggacgcccccgggaatttgccgagcgccttttctgcgaggcctatgcgcctttccatttcctccgcgcagattttttccactccggaggatttcatcatcccaattatctcttcggggttttgggatgaaaggttttttgcaaagccgtcggcgcgctccgagtccatggtttcaaagagcgcgatgagcggaaaagtctgcttgccggagacgagatccgtgccgagcgttttccccgcgtccttttccgacataaaccagtcgcacaggtcgtcgtaaatctggtaggcgatgccgaggtgttttcctgcctcttcggcggcggcgatccacccgtcgagccccgttacggacttcgccccgagcgcgcacgcgagcgaaaagagcgcggctgtcttgccgaaagctatctcgtagtacctctcgcgcgtgacccgcactgatttgtcggcgagcgtctggcggatttcgccctcgcatatcgtctttacgcatagcgccgtgcggcgcgacgtgtcgacgtcgttttcctctaccgcaagctccatcgtgtgcgcgaagatcgcgtctccgagcagtatggcggttttcgccccgtactttttgttcgcggtctcggcgttgcgcctgatttgcgccccgtcgataacgtcgtcgtgtatgagcgtcgaaaggtgcgtgagctccactatcgcggcgcggcgtatcagcgattcccccttttcgggcgcggcgtgggctgcggcgaacacgagtatcgggcgtatgaatttgccgcgcggggctatcgcttcccttgcggcgcagcgcacctctttttcgaaagtccccgcctgcgccgtcagaaagtccccgaactcgcggaaaagcgcgctcatttgttcggaaattttctcgaacgggtttgggctgtgcttatagttgttcaccgttttcagattgtcccgcgcatggtttttcgcaattaaaaaatgtttccggcggaatttttgcggtttcccccgcctccgccgatccgcaagcgccgccccccgcgcccgcttcgagcttccttttgagggcgagctgcccgcaagcggcgtcgatttccgagcccttttcgcgcctgagcgtgtgcgagacgcccttctcggcgagtatcttcgcgaaggccgccctccgcgcggcgtcgctgcgcctccacggcagggattccaccctgttgtagggtatgaggtttacgtgcgcgtgcagggttctggcgatttttgcgagctcccgcgcctgagcgaaggagtcgttgacattttctatcattatgtattcgagcgtgatcatgcgcccgcatttttccgaaaacttttttgcggcggctacgagccgcgcgagcggatattttttatttatgggcattatttgcgagcgcacttcgtcggtcgccccgtggaggcttatcgcgagcctgtacgggaatcccgtttccgcgagcttctccagcctgtcggcgattccgcatgtcgacaccgttatgcgccgcgccccgaagccgaatttttcgggggagttgaataccgccagcgccgcggagaggttgtcgaagttcgcgagcggctctcccatgcccataaccactatgttttcaaattcaaatttcgcctccgcccttccggacgtcaggattttcctctccacaaatggcagggcctgggcgactatctcgcccgcggtcaggttgcggacgaacccgcgcatcgccgacgcgcaaaacctgcatccgcacgcgcagcccacctgcgtgctgacgcagagcgtctttctggttttgccgtcctcggcgggggctttgagcagcacgcattccacgaaattgccgtcgggcagggcgaacaggtatttttttgtttcgtccccagcctttcggtccccgacgagctttgcgggctcgaagtcaaacctctccccgagaaatccggcgagctttgccggcagggcgggaaaggctttgggggcgaaaattttcttggagtatacgcagtcgaacacctgttttgcgcggaatttctcgaaccccgccgcggcgagctcggaggcgagctcctcgcgggagagcgcgtagaatggaatcctgcccgcgggcatgccggcgtccgcctacaggttttcgttggatatcgggcgccaggtgtccctgtcgagcgacctgttttcgtcgccgacgcgctttaaataggaatcggcgcttttggtgtctccggatatcaccgagcctatgggggttcttcttgcgtcgtccctgacgttttcggcggtcgagcacgcggcgcagagcaccgcgcaggccgcgcctatcagcgcgagtgtgggatttttcatcgtgttttgcgtttgcgttttgtttgcggcttgaagctattttttcgactttctggtgcgggcgagctcccgcatgtcgacggcgatgtcgtccgcttcgaatatctccgagcccagcaggtgctcgaaaatgtcctcgagagtcacgacgcccgtgagggaggcgaattcgtccaccactatccccatctgctggtgccttttgatgagctggcgcatcaccgagagcgcggagccgttttcgggcacgaatatcggcgcctgcatgaagtcggaaattttggtctcgcccttgtcgccagccaccgccgtgagtatatcgcggcggcggactatgccgactatgttgtctatggtgtcggagtagaccggaattctcgaaaaattgaggtttgggttttcgctgaaaacccgctcgaccgtcatgtccttgtcgagagccatcacgacggtgcggggggtcatgatttcggaaatcgcgacgtcgtcgagcgacagggaatttgcgatgaggtcgcgctcctggggcgttatcagcccgtctttttggcccttttcggcgagcagtattatctcgtcgtcgccggtgtcgcgcaggcgccccgcgtcgccgccgcttccggagagctttcccgcgagctttgagaggggggaaacggcgtaggcgagccagtcgaacggcctgcgtaggcgcagccgcagcgacgggcggaaaaacggggcgagaattccgggcaggatttcggcaaacgcggcaaacgcgagcgccattgccgcagaaaaaacgcaaaccgcgccgggccccgccccgaagagcgccgcgaactgcgcccccgccgcggcggagccgaatacggcgacggccgcgcggagaattgaggcggcccccgccgtttcgggagccggcgccgaaattttttcaagcccctccccgccgcttccggatttgcgccttgccgcgccagtttccgcgggcgcggcgccggcagccgattcagccgcgcggcatagcgcggcgaaagcgagcgtcaggaaaaccgttgcagccaaatatgccatttgccccccagtagaattttttttccggcggatttcaattcttttatttgagagggcggactacgcttcgggatccgcgcaccatttcgcgtagctctccgaggcgtccgccagcgacgctattatctgcgggcattcgtatgggtgtatttcggcgagccttcgcgcggcggcgtcgagcttttcgggcgaagtctttatggttaccggaaattcctcggcgcattccgttttccccctccacttgtaaatcgaatcaatgggcgattctatttgggcgcaggcggcgagtttctcgaatacgagagtttcggctatgagtttcgccgattcgcggcttgccgcggtggtgcatattattgcgattttgccttgcatatgcgtttccccgaaaagctcaaaattatgttgactattcggcaaattcccccaaacatctgtttcaatccaaaggggacggcacttatatccgacgggggcggttgggggcaagactaatttttgccgcgcactttcgtttccgccgttcggcgttttcccctttgcgctttttaacaacaatattaaaaggaataaaaatatgctaaatcgcagaaacttcttaaaaggcgccgccatggcgggcggtctaatgattcttccttcgtggagcatcgccaagactcctgggccgaattccaagcttcgcttggctctcgtaggctgcggcgggcagggcagggcggccatcgcgcgcctcaaggattgcccgctcgtcgaattcgtggcgttctgcgatgttgacgacaacatggcggccaagacctacaaggagtatccgaccgtcccccgcttccgcgactaccgcgtgatgctcgacaagatggacaagcagatcgacgctgtgaccatcgccactcccgaccacatgcactatcccatagcggcgtgggcgatcgccaagggcaagcatgtattctgcgaaaagcccctcacccgcactatttgggaggccaacgagctcaaaaatctcgccgccaaggctggcgtcataacccagatgggcaaccagggccacaccaacgagggctggcgcctcataagggaatggtacgacgccggcgtcatcggcgaaatcgaggacatctacatttggacgaaccgcccgatttggccgcagggagacttgaaaatgcccaaggggcagcccgtgccctcgacgctcgactacaaagtctggctcggcgtggcgccctaccagccctattccaagagcttcgtgcccttcaactggcgcggtctccgcaattacggcacgggggctgcgggcgacatggcctgccacttcctcgacgtcccgtattcggctttcgacctcggctatccgatgagcatcgtcgccaactcgaccccgttcaacgattacagctggccgtcgcaggcttcgagcgtcatgactttcgtcaacaagcgcggcgtgggcgaccgcatacgcctgcactggtacgacggcggccgcaggccgaaggaaatcaagagggtcgatcccgaattcctaaagcccgacccgaagaatccctggaaccgcgccaactgcacattcatcgttggcaccaaggaaaccgtctacaccaacgagtacggcggcgaaacctacatttatccccgcccgaggatgaaggaaatcgccaagagtggcgcgctgcccaagaagaccatcgcgcgttcgacggctcccggaaacccgcacttggaatgggtgaaggcgtgcctggaaggcaagcagccgatgggcaacttcaattacgccgcccccttcacggaaatggctctgctcggcatggtggccattctcttccccgaaaaggagctgacttacaagc

SEQ ID NO: 3236 - DNA, 23180 bp, synthetic construct
  source 1..23180: mol_type = other DNA
  misc_feature 1..23180: note = Synthetic
gtcttggacgaatctaaaacggaagtccaccgcaacagcgaatggttctcaaagatgtcgtttggcgacacgctcgagctcgcccgcaaaatgactgtcgccagaatgctcgagcgcgacgacttcgccaagaggtacgccacaaaaactccgatttccatagtggaatttctctatccgctcgtgcaggggtacgactccgtcatggtggagtccgacgtcgaactcggcggaaccgaccagctcttcaacaacctcgtaggccgcgatctccagagccagaggggtaccgtagggcaggcggtcatcacaatgccgctgctcgtggggctcgacggcgaaaagaagatgtcgaaaagctacaataactacatcgccttcaacgacgacccgcgccagatgttcggcaaaataatgtccataagcgacgagacaatgtggaagtactaccgctatttgctcttgtactccccgtcgaaaatagaggaattgcgcgcccaacacccaatgaaatgcaagaaaaatctcgcgcggctgctggtcgcaaaattcgcgggagaggagcgcgccgcggaggagctcgacaattttgaaaaagtattttcaaaaaatgaaatccccgagaaaatgcctgaatttaagtgggccgatgtcgccgaaggcgaagaatgcaagctcgccgacattatggcgcgcacgaatttcttcccaagcaagaaggaaatccgcaggctaatagagcagggcgccgtaaagatagattcccaaaaagtgtccgacccgtacgcctcgcttgccaggccggcagaatgcacggtcgtccaggccggaaagagaatattttttaaggtcttggcgtagttagaaatgcctattgatgccggacatgtaaacgctctcggcacggagcggatatcgaagctcattatccgatattcgatgccgacgatgctctcgacagtcgtcaacgcctcgtacaacgttgccgacagaatatttgtgggcagaatgtgcggcgaggacgcgctggcggcaatcaccgtatgcttttcgccgactctcttcctgctggcggttgcgatgacaatcgggcacggcagcgctacaatgatttccatttgcctcggggcggggaagcgcgaggcggctgaaaaatttctagggcaggcgtttttcctttttatagctttctatgtggttgtagcggcgataacgcttaccttcatgccccaaatattgtcgtttttcggagccaccccgaaaattttacccgacgcatgcgcgtattattccataataatcgggggacttattttcgataaaatatcgttcggaatgaacaatctggtcagggctgagggaaggccggtaatcgccatgactaccataataattggcgggcttaccaatatatttctcgactggctgtttctcgtaaaatggggctggggagtgcggggggccgcgattgcgacggtgcttgcgcaggcgtgcgcgtcatcgtgggttttgggatactatgtcagcggaaaaaatttcctcagaataaggctctcgaatatgaggccgtttaaaaagctcttgaagcagatgggggctgcgggttcgccgtcgttcatattgcaggcgtgcgcggcgttttcggtgtcgatatttgtaatgcaagcgcgcttctatggttcggagtcggcgctagcggtcattggggtgtgcacgacagtcataacgttcctcttccttccgatagtggggctaagcatgggaatacagccgattatcggatacaactggggggctaaaaactttaagagggtgcgcagggcgttttcaagggcgcttggggctgcgactgcaatttgcgtgacagggtttgctgtcgcggagctctttccggacataatttttgaaatatttctcggggaggattcgcatctgctatctacgggcgaggccgcgttgaggctgatggtggccggcatgccgtttatcggggtgaatatagtgacttccggatatttccaatccataaagcgcccgtctgtgtctatttttgtgacgatattgcgccagatattgtttctcgtgccggcgatgtttcttttgccgagggtgttcgggcttggcggcttgtgggcgagcttcccgataagcgatttcagcgcgtttgttgcgaccctgttttttgtgcgcgcagaaatgtctgctctccgctcaaaaatattgctcgaaaaccgcctgtaatgcctttaaaaacggctgagcgcgcaaaaacacatcgcgccgctttactctatgcccggtccggaaagcccatcgcgctttgacaatgcccaaaaagtcaagattttgcttaaaaacgattttgcaatgttttcccccggtttttatattgtttgtatattcgtaaatttttattttttgcgcgcggacgataaaaaatcgcggaacgctaaaaagatgttgaaaagcgtgcgcttttaaagatactcgaaacaatatgttaagaagaacctttatcgccatactttcgccgctggcggcagccgccgcggctttcggacagtcgcatatcgacgcggggactattaaaacgcaaacgtcccgactaaacgtgcccgtctattccgtcgcgataacctctcccgacgcaaatatggcggctcttgccaaacgcgcattcaacttgcacggcagctacaaaataacgcctgcatcaagggcccagttcgtgttcgatttcgcgcctcacggcgccaatgcagtaaagctcactataacaaaaggcacatcgcacgagcaagtttgttccgcacccacaaccttggaggccttaatgaaggcgtgcgacgcggcggttatgcgcacattgcgctcgcctggcttctttgcggggactatcgcgttttcatattcgccggacaactggaaaacgtcggaaatatgcgtctcggacatggttttccaaaatgtgcgctcaataacgcgcgacaagtccgactccctcatgccccatttttcgcccgacggcaaacgcataatatacaccggatattttaggacgggctttatggacttgtactcggtcgacctcgccgcaaacacccgcaaagtatttgcctcgtacaagggaagcaatacgggcggctcgttttcgcgcgacggctcaaaagtcgcggtggttctgacatcaagcggaaatgccgaagtttggacggcaaactcttccggtggcggctttaaaaaaataacgaacacgaaagcaacggaaagctccccttgcttttcgccagacggttcaaaaatcgtctttgcaagcgattccatgggagggccgcaaatttatacaatatcgtcctccggcggaaaaatgcagcgcgtcaacacccgcatgagcggctattgctcagagcctgcatggaatccgtacgatgctaataagatagcattcacggcggcggtcggcaaaggcttccaagtcgcagtgtacgatttttccacgcgatcttcaaaatgggtgagttccggcgaaaacacttcgggtgcagtatggctcaacgacggacgccaccttatatgcacaaagtctgctggcgacacgcgcaagcttttcgttgtggacaccgaaaccaacagccaaaagccgctgcatacgtcgtcgttcaacgcgaaagaagcggactttgtatacgccccgcgaatgtaaactgaaatacgaaaaggcaaaaaaaaatgaatctcgcaacgctcgatctcgaaggcgtactcgttcctgaaatatggatagcgttcgccgacgcagcgggaataccggagcttcgccgcacaacgcgcgacgagcccgactacgacaagctaatgcgctaccgccttggaatactcgccgaaaagggagtaaaactcgcggatatcaagcgggtaatttcaaccctcgagcctctcgacggcgcgggtgaatttatcggctggctaaaatccaaaacgcgcactgtgatactgtcggatactttcgagcagtttgcgtctccgctgatggcaaagcttggctatccgactctcttttgccacgagcttgagatatcccccgacggcgcggtgtctggataccgactcagaatggccgaccaaaagcgcaagtccgtcgaggcgttccgctccctaaactttaaggtaatatccacgggcgattcttacaacgacctctccatgctgcgcgcggccgacaacgccgtgctgtttaggccaaccgaaaaattcgcggccgaaaatccggacctgcccgtggcgcgcgactacgcagacttaaaagaatttttctctaaatttgtgggcgcataattttaaaaaatatttaaggaaatgaaatccgacaaaacaaaaggaaggtacgccgcgaggggagtctcggccggcaaagaggaagtccacgcggcagtggacaggctcgatccggggcttttcaaaggggcgttttgcaaaattaccgaagactacctgactggctcgaaaacccgctgcaatgtaatccactccgacggcagcggaacgaagtctataatagcctatctttactacaaggaaactggcgacgcctctgtttttagggggatatcgcaagattcgatagtgatgaatatagacgacctcctctgcattggggcgtgcgagcgcatacttttgtcaaacaccgtaaaccgaaatgcgagaaattttggcggcgacgcgctcgccgagctcataaacggctccgaagcgtttatggaaaaactgagggggcttggagtcaaaatatactcaggcggaggggaaacggcggacgtcggggacttaaccggggctgttgtggtcgactcctgcgcggtggcggtcatgcggcgcgacaaggtaatagcgggagataaaataaaaccggggcttgcgatagtcggcctctcgtcggcgggcaaggcgacttatgaggattccgaaaacagcggcattggctcaaacggcctaacgagcgcccgccacgatattttatgcccgtactaccgcgaaaaatatccggagaccttcgattcgggcgttgatgaaaaactcgtgtattgcggcccgtacaagctcgaggacaagcttgaaggctcgtccatgacgatagcgcaggcgctgctttcgcccacgcgcacatatgcgcccgtgattatgaaaataatgaagaagcaccccggcttgataaaggggcttgtccattgctccggcggcggacagacaaagtgcgtccgcttcgggaagtcagtccactttgtaaaagacaacctgatggacgtaccgccgattttcaaggcgatacaaaaagcgagcgggacttccgacagtgagatgtttgaagtttacaacatggggcacagaatggaagtgtactgttcgaagtccgacgcaaagaaggttattgagatagccgagtcgtactctatacaggcgcgcgtcataggccacactgaaaagtcggcgcgccccgaccgcaaaaaccatgtaagcgtaaaatacgcgggcaaaaccttggaatacggcccgcgcgattaggcgcaagtatttcagccggccttccgcggtgcgccgcccggggggtcgacacgcttttttaacggcgcgaatgtattggaaaagaaatgttaaaagccggaatagtaggtctgcccaacgtgggcaaaagcactctgtttaacgccctcacaagaagcagaaaggcggaggcagcgaattatccgttctgcacgatagaaccgaatataggggttgtggaagtgcctgacgaaaggctcaagccgctcgcagagatatccaaaacaaacgtgataatcccggcggcagtagagtttgtcgacatcgctggcctcgtcgcgggggcgagcaaaggagaggggcttggaaacaaatttttggcgaatatcagggaagtcgacgcgattgtgcatgtcgtgcgctgcttcgacgacgacgatattttgcacagcatgggctctgtcgaccctgttcgagacatagagattatcactacggaactcgttctaagcgacctgcaaagctgcgagaaacagctcgacaacaatgcaaggaaagcgaagggaatggacaaagaggcgataaaaaacgtggagctgctcaagcgcctgattgcgcacctaaacgagggaaaacccgcaataacgctgcccgatgtctcggaggaggacgcagcccgcataaaatcgtattttctgctgacctctaagcccgtgatatacgcatgcaatgtggcggagtccgacataggcgacgccggggcatcaaacgcgtacgttgcaaaggtaagggaattcgcaaaaaattcccacgatgccgactcttgcgtgatttgcgcgcggctcgaagaggagctgtcgtcgctcgagcccgacgaggcgaaagaataccttgcggagcttggggctacggacagcggagtgtcagagttgataaaaaagacgtatgatttgctcggcttggcgagctattttacagcgggcgaaaaagaagtaagggcttggactttcgtaaagggaatgacagccccccaatgcgccagcgtaatacacaccgactttgagagggggttcataaaggccgaagtggtttcgtacgacgatctgatggcggcaggctccgtgcataaggcgcgcgaggcaggaacgtataggcttgaagggcgcgactaccaattcaaggacggcgatgtagccctgtttaggttcaatgtttgattcgatgaaagcggcgctattaaaattaatgtacgcggtggcgtcttcgaggcggcttgctgtcggaataatggcgtacgcgactttgcttgtttttattgcgaccctcgcccaaaaagaaataggggttgcggcggcgcaggcaaaatattttgagagctttttctgcgtggcgacgctcggctttataaaaattccgcttttgggaggggcgtcggtcggtttgctcgccgcggtgaatatactcgcgagcggatggagatatgttaggggaggactttatggcttcggagcgtcgatagcgcacgtgtcgctcgtcctgcttataatatctggtgttctccaatactatatgagggtggaaggctccatggtcctgcgtgaggggacggagtctgacacaatacttgtaggtgctaaaaacgggtctgcgggaagcgttatgaaactgccgtttaaagtgaagctcgtaaaattttccatggaaaaatgggattcgagctcgacgccgaaaagcttttcaagccaagtggaattcaagcgcggcgatagcggagttgaacaggtcgtgtcgatgaattcgcccggttcgttcggcggctggacgttttaccagatgtcgtacggcgacggcggtaagacgagcgtgcttgcggcagtgcgcaatccggcaaggctcctgccgtggcttgctgttggggcgacctttgccggaatggcgataatgtttataccaaggctttttgcgcgggagaaaaattgacgatgaatagatacgcgttttccataagcgtgctaatttcggtgatggtggcgttttcgccgcttgcggtgtggcaggtttttatgggggatcccctgtacgactcgctgattggaccgagttttggagagcttccagtattgaaagctgggcgcgttatgccggtgtcgagcgcgtcggccgacgtgctaaaatctcttggcggcaaggcgtccgccaatacgtccgaagggaaaatatcctcatctaaatggctttggcggctatccgcggaagcgggcgggcaggcttccgaaaaaataatgcgcacggacaacagggatctgcaaaaaatactcggcgtggatggcagatactattcatacgacgaccttgcgaaacattacgggcaagtcgagaaggcggcggcttccgacggaaatgcggagcttgctgcggcgtgcgcggaggctcttgaaaagggagtagcatatgcgacagccgtaaattcgtttgtggttaaagtaccgggacagaaatctgcggtaaagggaattgaagactggagatcggcggttgaagaggcttctgaggagctgaaatctgcgaaggagaaaaatcgcgcgcctgaggagtctaaactgtcgcgggcggcgacaatgctatcgtactaccgcgatgttgcaggctttgagaacgcgtatcccgacgcttctataaattccataaacaccgggagcggatacgcgacgcccgctgagataatgctcgacaggaaggcttccgatatgtcggtcaacttggcaaaattgtacgcgcgcgcttgcgatgcgatagctaggggagacagagaagcggcgcatgcggcgctcgttgaaataaacgggatattgtcgaaatccggcggggtgtcgtggctgaggttgaaggtggagaattttgccaatgcgatgtcgccgttttttggtggatttatattatacatgtttgcgttggcggcgttcgggctttctcggatattttctacgcgcggagaggctctgaaactggctgggagcgtatttatggcgtccgcggcggggcttcaaatattggggataattttaagaatgtacatacagatgcgcccgccggtgacaaatctgtattcgtcgctagtatttacaggggcagttgcagccgggataggcgtatatattttttttaagaaaaagtatctgtcggttggggtggcggcgagcatatgcgggctgatgtcgctattggtggcgataaatttgccgtatagcggggatacgatgggaatgatgagggccgtattgaattccaatttttggcttacggcgcatgtggttacgataatggttgggtattgcggaatatttttggcgggatttatagcgcaggcgaggcttgtatcaaatatattttcgcgcgggaattttggcgcgcttaccggtgataccgcaaagaccgtgtacgcggtattatgctttgcgcttatgtttacgtttggcgggacgatgctcggcggaatatgggccgacatgagctgggggaggttctgggggtgggaccccaaggagaacggggcgctgatgactgtattgtggacagctgttgcgatacacgcaaagtgcatgaggctctgcagcgacaggatatttttgggactggctgttgtgggcaatatagttgccgcgtgggcttggtttggagtcaacttgatgggagttggcctgcacgcctacggatttatagacggagggtggttttggttctttctgtttgttgcgagccaagtactgacccttcctttgtgcatttataaatacagggaaagagcggggaatgaagccgtggaggctgcaaaaaaaatataggaaaaataagcttgtatttgcgcgtaaaatccgcaaattagattggataaaaatgcgaggtgtagcttagcctggtagagcgctacgttcgggacgtagaggccggaggttcgaatcctctcacctcgaccattttgaaagccgcgagtccataaaggttcgcggctttattttttttaagcgattttttatgcgaactaaaatgtgtttgaaacgattttaatttgcgcaaatccaaaagccagttttttgtaaaagttttgataaatttccccggcgcgcaaaagaagtttacgatttttattttcagcaaataatattccaaagtttgcccgcggcagggcgcgcgcaatatattatttttatattagcggaatcacttaaactaatataaaatggagcgaggttttttgcctaccatttaggttgcgggaattacgtatagctgattattgcggggccctgcatatcttggtgctttaaaaaaatacgaaaatataaaaattaaaatattaaaaaattagcttcaaatctataaaaacgatatgatttgatattatatcgttgattttcgttcccattgcaaatatttcaataataacaaagaatttaataaaaatatggaaaaagaaaaaaataatcacgtctggggatttgacatcggaaaaggctctcttggcgaggccgtgcgcgtaggcggcgacttcaagcatatcgcctccgtgctgttggatccggaattcggggagattaaaaccgcagctcttgcacgcaggcaaatgcgcacgagaaaagcacataaagcgcgcgaaaaatggcttgaagaatgcctcgatggaacgggcgttgaaatcttaaagcggagggaagtcggcattgtggacgggcagtggcggctaatctcaaagggcgacgagcgcctcgagcgcgaatttccgcctaacggcgaagaggtctgctacaacagcatcgcgctgcggtgtaaacttctgcttggcgaaaaactcgaaggctggcaggtattcaaggcgctaaattccgccattcaaaaacgcgggtacgacgaaaatatcccatggggcgaagccgaggaaaaatcctcaaaaaaagatgaggacgactacgcccaaaagctctcccagtacgaaagggaaaaatccgaactctttgaaagcttcgccgacggcgaaaagtacgatttcccgtgcttttttaaagcgtacaaaatgggattgtggtctccggaaaatccgaggagggtcgaggtgcgcatagactgccgcgcgcaaaaggcaaaaagttacgttgtcgcgcgcaaatacgttgaaagggaatttgaatgccttgtcgaggcggctgcaaaatttttcccgaaactgaaaggaagggcgaaattcatattgtacggagtatccgaaacaccgtacgcctcctactacgggaatatgagaaaaaaattcgggcttaaacgcggcgccgaaagcgactggactgctctcgggcagaaagttccgcgcttcgacaacaggataatcgacaaatgcaggctcattccgcgcatgaacgtatgcaagataaggccgcttaacgaagccagaaacgaaaaagacctgctttattacgaagtcactctcgccttgaagctgttaaatctgcgcttttttaggaactccaacatagagcagcttacgtttgaagagtttaaaaaggcttttgaaattgcctccggcgcgaagtataaaatgacaaaaaccgccatgaaaaaatttttgaaatcaatatcggcaaccgcccttggcgacgactacgccgaaattgagcctccaaaggaaagcgggcgggcgtcgttttcaaggccggcaatggatattttgaaggagcttatattttccggaatgccgccgcgtgaattttacggcaggaaaattcctgaaatttccaacaccgataaaaacaagggcgtagtcgcgtccgatctggattttataaagcttatgggcgactgcccgtggggcggcattttcatacccgacgtacaaacgtaccagtttgcaaacgcggctttccccaacccagacgcgcaaataaacaagctcataggctcccagaacaatcccatcgtgcgccacaggttaactttctttttcgagaggataaaatttttagaatctaagtacggagttccggataaagtcgtgctcgaatttgtcagggacgatttcatgggcgaaaaggaaaagaaggagatgcgcattgcaatgaaaaagcgcgccgaggaaaaaatgatgattgccaaagacctcgacgagcacggattcaaaggcggcaatctgctccttaaaatggaactgtacagaaagcagaacggaatctgcctctacaccggagacgccttgccgctgagcgagcttgcaacgctcgagatagaacatatagtgccgcgcagcaggggcggtccggacgcgcagtacaactacgtaatcacccgcgaaaagacaaacaagctaaaaggtgacaaaaccccgtacgagtggctctcctccgacgctaaagaatgggcgtcgtacacggacagggtcaacgcatgtgccaaggctctcggcaaaaaacgctgccgcctgctgcttgaaaaggacgccgaagagcttgtggaaaaatatacggctctggcggaaaccgcgcatatagcaaagcttgcccagaagatagtctgcatgcacttcggctttcaattcggcggcctcagcgggacgaagcgcgtctttaccgttcccggcgccctcacttcgaggatacgcaagttttacgggctcgacaggattctgcacaatgcggcggcggaaagtgaaaatttatctttcgaggaatttttaaaattcagcgaagatctcgaaaagaagaatcgaaaaaacaagaagcaccacgcgctcgacgcaatgtgcctatgctttgcgcccacaggcgtagattcaaggcgcgcaaaactcggcgagatacttccggaaaaactgaggagcgaaaaggctgcaagggaatttttcaaaagctatctcgacaagataatgcccgtggatgttgcgccgaaaaagccgcgcctcgaagacggcatatactcaaaacggataatcggcggaaaggcgtgcatggtaaagcgcaacaatctcgtggacttggcgtacaagtcgggattgaagcctgtattcgatattccgactctcataaagctcgtcgataaaaaagagaaggggataataaacccgcaaatccgcaagatgataggggaatttgccgcgacaaatcctgacgaatccgcatggcgcaagtggtgcgaagaagtcaggctgccgtcgaaaagcggattgggagcccgcgtattgagagttcttgtttactacggagaggccgatgaatacaaggatttgtccaaagacggctgcggcgcgtacagaaagggcgacggacacaaggggcaggtggtatgggagtcagttgacggcaagtattatgtcgagcccgtatatgtccatgcctcgaaggccggcgtgatggcggcgttgaatgcaaatcccaagaaaaagaggatatgcggaatgtttaattcccactgcacggtggatgtcggcgacgtttacaacgacaggggcgacttcattctccccgccggaagatatatggttaatacaatattaacaactggtaggtgcgtattgacaaatgcggacggggaaaagagaaaccctataaatataaattaccttatgagagccggcatgaggcgcgttgagttgagcgagctatgagctaccatatcctgcacatatcggagtacggctgcaagctgtcgaaagagcgcgggttgctcgtctgcaagaaggacggcgccgtgctcggaaagatagcgatagaagacctgcgcgcggtagtgatagttgcgggcggggtgtccataagcggcgaggttttttcaagcatattggcaaacgacgcaataatactgcattgcaaaaactacaagcccgtagggataagcgttccgaattgcaggacatacgacgcccgcgtagttctcaaccagtccgccggcaataaaaacctgaacgccgcaatatggcgcaggttgctgtgcgctaaggttgaaaattgcgctgcgtgccttggcggaatggacgtcaaagattcgcggctgcatgaaatggcgcagggctgccgccgcggtttaaacgagtccctttgcgcaagggaatactggaaaaactattttccccgcctgggggagggcgggggaaatagggagccggggagcggagcgtctccgataaatgcgctattggattacggatacggtataatgggcgggataatccataggagccttatagtttcaggcttaaacagcctgttgggagtcaaccacaagacatactataaaaatacgccgctcgtttacgacgcaatagagccgttcagggcgtttgtcgattatgcgctgtataaatacgcgtgcaaattttctgaaatgggagtgcgcgggtggtcgatatttttggggaaatatttgagggataagagagtcggagtgagaaacggcagtgtgaagctgatggacgccgccgacgttatgtgcgagagcttggcaaatgcatatagatacaagaaggcggagctgctatggacgcccgcgctggagacgtaaatgccaatacaaaagaaaagtccgtatagaatgggttggttgatggcgatgtttgacttgccggtgcttcttgaagaagagcggaaggaggcggcgcggtttagaaaggcgctgctggacgacggctttataatgatacaatattcggtgtactcgcggccatgcgtttcgattgagcgaatggcgaaatactgcgaaagggtaaagaagtacgcgccgacgacaggcgatataaggctgttattttttacggacaagcagtgggagacaagtaaactgatatgccgccgcccaaaagagctcgaaaagataccggagcagatagagttttttgaagagttgaaaggcaacggcgcggcttcagccgtggacgaaaagggcaattttttattgttttaaaaaaaatatgccgaatgccaaggtgcaatgcagagcttgaaattcggcaaaatcagttaagactttacaacaaaaaatttacttaaataaaagtataaaatagacctacgtcaatactatttttagaaagaacaatttgttgtaaagtcaaaacattgttcgtttgtctgccccttatggatttatttttagaaagaacaatttgttgtaaagtcaaaacgggtattgatacgccgctgtcgcgcttgacatttttagaaagaacaatttgttgtaaagtcaaaacgtacgcaaactggcaaaacgacgatactaaaatttttagaaagaacaatttgttgtaaagtcaaaacgcatgttagcgatatcggttacatttatttatttttagaaagaacaatttgttgtaaagtcaaaacgggctaataaacaaggcgcaaaagctgtcgatttttagaaagaacaatttgttgtaaagtcaaaacttaagcccagtcgcctcgtttagaatcgtcatttttagaaagaacaatttgttgtaaagtcaaaactcgtctatcatttttttacctttcctttttatttttagaaagaacaatttgttgtaaagtcaaaactgaagaaaaaaagcaagctgaggacgatttatttttagaaagaacaatttgttgtaaagtcaaaacttactcgcccactcacaacttcgcagagttatttttagaaagaacaatttgttgtaaagtcaaaactgcaatatatcgacgatatacgcgatcgcaaatttttagaaagaacaatttgttgtaaagtcaaaaccatcgcacttgcactatctttgtcgatagtatttttagaaagaacaatttgttgtaaagtcaaaacttcaaatctccaatttctttgacaagagaaatttttagaaagaacaatttgttgtaaagtcaaaacattcaaaacttttgaatatgatagtaaaacatttttagaaagaacaatttgttgtaaagtcaaaaccgatagacgcaaccaatagcctaaaatgctatttttagaaagaacaatttgttgtaaagtcaaaaccgagatgacgcgcaataagaatcccgttgtaatttttagaaagaacaatttgttgtaaagtcaaaaccgaatgctaaaagggttttctgtttaggagatttttagaaagaacaatttgttgtaaagtcaaaacagggtatccgtctttaaggttctggtcgcgatttttagaaagaacaatttgttgtaaagtcaaaacattgttcgtttgtctgccccttatggatttatttttagaaagaacaatttgttgtaaagtcaaaaccctttgtaaaccattattttctgttcggaaatttttagaaagaacaatttgttgtaaagtcaaaaccttccgattctgtcggaaacttgcgcatacatttttagaaagaacaatttgttgtaaagtcaaaactacgacgtcgaaagcgttgaggtagttgaacatttttagaaagaacaatttgttgtaaagtcaaaacatatgctaacgtcacaaacgttgacaaacgatttttagaaagaacaatttgttgtaaactttatataacttttattaaaaattaaatgcttttttaatattgtaggtataggttatttttaggtgaaaagcattgtgaactgcggtaagtagagtatagtacttactcatatcatttcattatttagaattaacgcccatatataccccgagtgcaattatataccctaccgcaaataccgatgatatcaaagcgatagattctgcaattagaaaagtcgcaaagtttaattccgctgtcccaaaaaatattatgctatttattatcaatgcaaatagcccggcaaagatagcaagcagcgcaaacttcaatatcgttagccccgaatatgatttaacaggtattgattctttaaaatcgccttttgcaaggcgacgtgcaaattccggattctgttttaaataatcgtcgtagctcatattttttctagatttatcattattttttaatattaaaagttttttgcaatataaaaatttttgctccacaaaagactttggaagcacaaataaaatttagatttcacacgcaaactttttacacaaggtttgaggaatatttttttaaagtatccgttggcgggcattgtatgagccgttagcacgctcccataataaaaaggctttttcagttccgccctgcggggtaggcggaattttgcgaagcaaaccgccgaaggggcggagcccctcaatgggaacccgtactacggggtaggcgggagtttgcggagcaaaccgccgaaggggcgaagcccctcaacggaagcccgcactgcgggggtaggcgggagtttgcgaagcaaaccgccgaaggggcggagcccctcaatgggaagcccgcactgcgggcccccttaatggaaacctgcactgcgggggtcaaacttatcaatagaataatccttcacagcggaagagtgctgctgttttaaagtcgccttaactctgccgcataaactacaatagcgaaattatttttagatgggattattttacgtatgcagattatagctctttagctctcctgccaaaataaatccgcctactcaataaaatatctatgccttgtttctaagtctgtcccatagcgccacggcgcgcgacttcaccgcatcgccagccctctctatttgcgcgcgcctcgcctctatattttcgttggctatgtcagacaaatccttcaaattgtacatgtaggcgtcttcaatctcagcgcaactttcctctatattccgcggaactgcaaggtctatcaaaaatatcggcctgcctccccttttagaaaccgccgactcaaccatgccgcgctttattatcggctccttcgacaagctcgcgcacagaactatgtcgtatctacaaagcccgccaagcgcatcttccatgtccgcagatgcgcagcctattttcgccgccagcgcgtccgcgttcgccctcgtgcggctgcataccgagatatccaatcctcccctaacgtatagggcgtcggaaacaagctttcctacttctcccgaccctatcaacaatatcttggctttccctatgtcctcaaatattctcaatgcaagctcggcgcatacgctcccaacgcttatctttccgcgccctatctccgtgtttgtccttacccactttgcgcagtgtatcgccttctgaaatactgtattcaagaccggcccgcaatgtccggccccgcgggccctctcatatgcagcctttacttgccccagtatctccgtttcacctgtcatctgcgactttaatccggacgcaacggaaaaaatatgctctatcgcatcttcaccttccgctacctttcccagcgatacaaattctccgccgtttgcgccgtatacagccttcgccgccttcccggcagcctccgcgtccacagacaccaaatacatttccactctgttgcatgtgctcaacaacagcatttcgtccgctatgccggctgccaatacgccgctctcagcttcgctgcacttgtccccggcaagcccgtacttccccaattccgccgactcaacggtctcgtgcgatatccccgccgcgtatatcattttacctgccgccgacatctctcaagctatcccagcgcaagctccctcatcgcggcgcaaaaatccaacaatttgccggataactcaggataaccctttaccgccttttcggcaccctttattcgcctgcctatctcagccgcgcagatgtcttctataccgcaggctctcatgcgctctattatctcgtccggcttgcgaatgctcaaattcgatgtaaattcctccgcctcggcgtcgcccatcgtctctatcagcgctattagcggaaacgtctgcttgcctgacaacaaatctgtcccaagcgtctttccggcgtctttttcgctcataaaccagtcgcacaaatcgtcgtatatctgataggctatacctagctgcttgccggcttcttcggctgcgtctgtccacccgggaaccccttttacgctcttcgccccaagcacgcacgctagtgaaaatagcgccgcagttttcccgtacgctatgtcgtagtacttttgacgcgtaaccctgacggtcttgtccgcaagcgtctggcgtatttcgccttcgcatatcgtcttgacgcatgctgcaactctcctcgacgtatccaaatcgttctcctcgacggcgagtcccatagtgtgcgcaaatatcgcgtcgccgagcagtatcgccgtttttgcaccgtatttgctgttggcagtctcggcgttgcgcctcatattcgcgccgtctattacatcgtcgtgtatcagcgttgacaagtgtgtaagctcgactatcgcggctctccttataagcgattcgtcccactcgctgccggcgtttgcggccgcaaatacgagcgtcggccgtataaatttaccctttggcgatatcgactcttttgccgccgcccttacttccttctcgaaggtctttacctgcgacgccaaaaaaccttcaaacgcccgaaaaagcccgcccatttgcatggatactttgtcgaacggattggaattgtgtttataattattcaccgtatcaaactttgtccgcaatagattttttcgcaattaaaaaatgtttcactccgcatttttattcgtgccgcccccagccgctccggcatcttccatcttccttttaagcgcaagctgcccgcatgcggcctctatcccggcccctttttcgcgccgcagtgtgtacgataccccagcttcgtcgagaactttcgcaaacgccgcgcgcctccctgccgggctcctcttccattcgagcccctcgacgcggttgtacggtatgaggtttacgtgcgcgtgcagctcgcgggcgattttcgcaagttctctggcctgcaaaaacgtgtcgtttaccttttctatcattatgtattcgagcgttatcatgcgcccgcacacagacgagaatttctttgccgcgcgtatcagggccgatagcggatattttttgtttatcggcattatccgcgacctcacttcgtcggtcgccccgtgcaggcttatcgccagcctgtacggaaagccgatttctgcgagtttctctatcctgtcggctatcccgcaggtcgaaaccgttatccgccgcgctccaaacccgaatttgtcggaggcgttaaatatggcaagagccgccatcaaattgtcaaagtttacaagcggctcccccattcccatcacgactatattctcaaactcgaacttggcctcttttttgccgttttccacactcctctttacgaacggcagcgcctgtgcgactatctcgcatgcgctgagattgcgcacaaatccgcgcattgccgaggcgcaaaacctgcacccgcatgcgcatccgacttgcgtactcacgcacagcgtcttgcgtatcttgccatcgtcgtcggacggggcttcaagcaacacgcactccacaaaattgccgtcggaaagcttaaacagatattttttcgtgctgtcgtcggacttcctgtcgcccaccattgcggcaggctcaaagtcgaacttctcagaaagatattcagcaagcttcgacggtatcgacggaaattcgtccggcttgaaaatttttttagcgtaaacactgtcgaatatctgcctcgccctgaatttctcaaatccgtcgccggtcaatatctccgcgagttcgcgcgaagacagcgtgtaaaacggtatcttctgaatcggcatgctagctgtcgcccggcgcgccggttatagattctcgttggaaatcgggcgccatgtgtctctgtcgagagatttgttttcatcgctaacccgtttcaagtacgaatcggcgcttctggtctcgccggttattacagagcctattggggttctcttagcgtcgtcccgcacattttctgcggtgttgcaggctgcaaacgccaagatggcggcgcacgcaagcgtaagtattgcagttttcatattatttcgagttttgcttgtttgctatttcctcgacttgcggttgcgggcaagctcgcgcatgtcaacggctatgtcgtcggcttcaaaaatctctgagccgagcaggtgttcaaatatgtcttcaagcgtcacaacccctgtaagtgacgcaaattcgtccacaactattcccatttgttggtgcttctttatcagctgcctcatcacagacagcgcggacccgttctcggggacaaatatcggcggctgcatgaaatcggatatttttgcgttgttgcggtcgccggcaacagcggttagtatatcgcgccggcgcactatcccgactatattgtcgatagtgtcagaatacacgggtattctcgagaagttcaggttcgggttctctttgaaaaccttttcgacagtcatatccttgtcgagagccataactacggttcgcggcgtcattatttcggatattgtgacgtcgtcgagcgacagcgagttcgctatgaggtcgcgttcctgcggggatatcagcccgtctttttgccccttctcggcgagcattattatttcgtcgtcgctgaggtcgcgcatatggcgtttcttacgcgttattttcccaatcatccaagctgaaaactttgaggctggcttcattattattctaagccagtgcaggggatacacaagccacggctgtatcgcaggcctgtaaaatattccgaaatttttaggcagtatctcagaaaaaaatagaatggatacagtcattgccgccggaaagacatatcttgtggctggtcccgtccccattatcatcgcaaactgcgctccggcgagcgtcgccccgaatgtgtttgctattgtgtttgctgtaagtattgcggaggttgtttcgtctatattttcaacaaacttttcgagcagctctccccttttgccgtattttcttttaagcgcctctatttcaacgggggtcgtgctcagcaccatcgcttcgagcgtcgagcaaaatgccgacactccaagggtcaaaatcactattataaccaaatatatcattttggtctattagaaattttttccgcgtggatttcaattcttttatttccgttttcaacttgaaagcccctaaaaacggcacttaatcctggcggactgccgattgggcgcaccattgagcgtagctttttgacgaattttcctccctaaataatatttgcgggcactcatatgggtgtatttccgagagcctcgcgattgccgcttcaagtttttcgggagacgtctttatatatattgggaattcttcggagttttccactttccctttccacctatatattgacgttatctgagatccgatttgcgcgcatgccgcaaacctttcaaataccagagtttcggctatcagctttgcggattccgctccggcgcatgttgtctctattacagctactttattttccatgttattgcctatttgtgttgtttaaatttttattgactatttcggattttaactcaaacatttatatcaaaccaaaggggacggcgcatacaaattacgcttcggggtggagcatctttttttttatatctttgcctgggaggtaagccggctttgatttttacaaaaacaatacaatatataaaaggaaaaaatatgttaaatcgcagaaacttcttaaagggcgccgcagcagccggcggtcttatggttcttccgtcttggagcattggaaaaacgcctggcccgaattccaagcttagagttgcggtggtaggtgtcggcggcagaggcagcgcggtaatttccgctttcagaaattcccctcatgtggaattcgccgcattttgcgatgttgacgataccatggcggcaaaaacatacaaagaatttcctaccgttccacgcttccgcgacttccgcgtaatgctcgataaaatggataagcagatagacgctgtgactgttgcaacccccgaccacatgcactatccgatagctgcatgggcgatagccaagggcaagcacgtctattgcgaaaagcccctcacccgcacaatttgggaggccaacgaactcaaaaggctcgccgacaaagctggcgtaattacccaaatgggcaaccagggacacacaaacgagggctggcgcgtaatcaaggaatggtacgacgctggcattattggacagattgaagacatttatatctggacaaaccgcccgatttggcctcagggacaactaaaaatgccgaaaggacagcctgttccctcgactctcgactacaaactttggctcggcgtcgcgccctatcagccctactcgaaagaaatacttccgtttaattggcgcggtctgcgcaactacggaacgggtgctgccggcgacatggcctgccacttcctcgacgttccctattcggcgttcgacctcggctatccgatgagcatagtcgcaaactcgactccgttcgacgattacagctggccgactcaggcttcgagcgtaatgacgttcctcaacaagcgcggcgtcaacaaccgcatacgtctgcattggtacgatggcgggcgcaggccgaaagaaataaagcgcgtcgatcccgaatttataaa

SEQ ID NO: 3237 - DNA, 23165 bp, synthetic construct
  source 1..23165: mol_type = other DNA
  misc_feature 1..23165: note = Synthetic
caaccggctacaagggaatcgtcgtgcaaagaaatctcggacgctcgccctacgattcgtggatgcggcacaaaatatcggaatcgattatcacaaactcgtactacgaacacccgaacggaatatacgtcccaggcgccgaccacacctgcaatcaggacagctcgatagcccgcaccgccgactattggcgcactgtcgccacgacaaaacttttcgacaggccgataaccgcgacggaatacaaccacgcatactggaacaagcacaggtttgaaatgatgacgatgttcgcgccctattccgccttccaaaacttctcgacgctcgtgatacacgccgacgcgatagaatggtgcaggcgcgacaaaaaatgtttgtcgcccttcaacgtccgcgaatcgcccgccatacgagccgccgaattcttcaaccaatgcttctttatgcgcggcgacgtaaagccgtcgaacgccagagtcgacatggcgattagcgaaaagttcgtcaaggaaaacaaaagagccatcttcgggctcggcgggcagcagatgagaattccgcttattgtcggctttgcgctccgccccgaagccaaaacgcccgatgcgctcaaaaacgtgaaagttaaaaaggccgaccttgaaattctgcccaacggaagctcggaagttataaccgaaggctggttccagcaggttgtggattccaacaacggaacgttcagccttgcgaaatttgtggaggaattgaaaaagcggggaatcctttcggcggacaatatctccgaccccgaaaacggcgtattccaaaccgacacgaagcaaatcacgatggattccaaaaatctgacgatgaaagtcgttaccgacttttcgtgcgcggcaacggtgcactccgaccaaaaagtcgacatgggcgcgcttaagctattgtccacaagcgtccccgcatcggtgggcgtggcggctattgacggcaaaaagatttccgaaagctcgcgcctcgtattcgtctacgcgacggaagaaaacaacgaagactcggttacaagcctcgacggcgttctttccttcaattccggaagaggcccaatcgtaatgcgccgcggcaaagtttcggcctcgctgaaactcgatccgtcgaagaaatattccgtatatcccctcgccctcaacggcgagcgccgcgagaagctcgacgccgaatttgcggacggcgttttgaatataaatatagacaacggcaaacttaaaaacggagcggtatcgatgtttgaaattgccgcggaataatatgaaattaaagttgaaatcgattttctgtgcgtcggcgcttttgtgcgccgcgcacgttttttttggcgcccaaacaccggaaaaatattcctttacgccctcgcaaaacgaatggacggcggtcgacctgccggaagacatgcggacaatcgaagggtcggcgctcgacctttcgcattttatagaaacgccgaaagccgatgtcggaggccgcgcgattgtgtcaaaaaagggaacgctcgcgtttgaaaaccgccccgaaaagcacgcgcgcttcaagggctacaccctcttctcccactacctgctccttattgaagacaaggaggaaatgaagaaggccgccgccgaatacgcccgcctgatgagaataaacggctacaattacatacgcataagtttcgacattcttaaagcgtacaaattccgcccgcgcaaagacgacatcttcgaccgcatcgatttcctttttgccgaatttaaaaagaacggcatatatgtgcatctccccctgatgtggtacgacagcggcgaaaaggaatatatttgggcgctgcacgacgacgtaaaacagcggacgattttcggagaccccgcggcatggcaatgctggaaggaaaccgccgaagagcagttgaaccacgtcaacccctatacgggagtcgcgtggaaggacgaccctatgtttgtcgcctttgaatactacaacgagctttcaatagacatcggccgcgagaaaatcgccgcgacggaggaaaactcccgttggattgtcgatatgtatgtcgaatggctgaaagcaaaatacggcactgtcgacaagatgcggcaggcttggaacgcaaaggatttcaccccttggaaacgcgtatacaaatgcgaatcgttcgagtcgataaaggaaaacttccacaagaacgccgacttttacaggttcgcctttgaaaagatggaaaaattcgtcgagtttgcgcaggatgtcgtgcgaaagacgggctacaagggtttggtcgcgcagacaaatttgcaaagcagcgcccgcgcaaacgagatacgcgcaagatacaccgatttcgtcataaagaacgcctatttttcgcaccccagcaacttcaatctcgaaaacgtttcctgcacgcaaaacagctcgatagaatcctcgggatactggctctcgatagcctcctcgcggcttcccgacaggccgatgggcataaccgaatacaaccactgtttctggaacaaataccgctacgaggcgcccgcgctgattcccgcgtattcggcattccaaaattattccttcttgataatccacgaagacgtggtggttaattcaaaaaaggactccgtaaaatatatgcgcaaaatgacacccttccaagtggcctattcgcccgcgctacgcgccgccgaagtgttttcgagcgcgatgtttatgcgcggagacgtcaagccgtcgaagcggagaatagacatgcggatatcgaaagactatctgcaaaacaaccccgccgccgtcaggcaaataaacgtggagcaaagtaaaatctcgatgattacgggtttcgccaccgcccacgaaacgccgccgcgccccgcgctcgaaaacgtaaaagtcaaaaagcccgacttggaaatatcccccgccggcagttccgaactccgttccgaagcgtggtttcaggaagtcgtggacggcggcggaaaaaaggatttcgacctttcaaaattcgttgccgaaatgcgccgaaaaaacataatatcgcccgacaacatcaccaatcccgaggaaagggtctttcagaccgacacgctgcaaatcacggcaaacacatacgacaaatggataaaaatatctacgccccgcacgcagatggccgccatggaaaagtcgatgcccgtcgatttgggcgcgctgaaaatcgaatccgtttccgtttcctcgacagtcggcgtatgctctctcgaaaagaaaagcatcgcgaaaagttcgcggctgctgcttgcgtttgtcacgcttgaagccaacaggggaatgctcgcgacgcccgacttcaaggacgcaaaaactttgggaacgcctcccattctaatgaaaaacgggattttaaaggccgaattgaagctcgatcctgccaagaaattcgcggtctatccgctcgccttgaacggactgcggcgcgaaaagcttccgcttcaattcaaggacggaattttgaaaatcgaaatagacaattcaaaacttcccaacggagcgacctcgatgttcgaaatagtcgccgaataaattacaaggagtgtaaccatgaaaaaaatagccatatttttattcgcgctgtcggcggccgccgcggcggaatcgcgcgccgccgtagacgcctcaaaagccgccgaatgcgaagcccgcgtaacctttgcggcggacttccccataggcgacggcgccggtgaaagcgcggacgtgaaacactacacgctcaaaggcgaaaacggcaagactacgcatgtggtcgcggccactaaaaaaaacaaaaatccgctcgaatgggaggaaatgaaattttccttcaccgccaaagaaagcggcaaggtcagattttccttttcgggcgtcgaaaaaaagaaaaacggagccgttctaaaactcgccacctattacgacaattttaaaatcgacggcaagctgtttcccaacggcgattttgaaaagggcaatgaaaatttttcctgcggcactgtaaaatccaaaatagtaacctcgccaacatacgtaaaattcggcgaacgctgcctgcgctcgtgggcgagaagctatacggggtcgtcgatttcggtcgaaaagggaaagacatacgaagtgtctgttatggtgcgccccgcaggggaaattgtgtccgacgacgatttcttcgttgacctgtcggcggtaggcagggacaaaaaaaacgtcttcggggaaacgccggaaatcgaaaccgtgcgcttcaatctgcccgccgcaaattcaaaatccaaattcgcatatttcccgcaaagaaaaaacggcaggattacgccgcttaaaataaaaatcgacagccccgactctacgggttcttacatttacctgctccatagattcgacaatctgaaaaatcccgacggaagctatatcgcctcggtgacgataaggacgtccgacgggaaatccgcccgcagatttgttctggccggcaaagactgcctcgacgccgacaaatacaaacccgcaagaaacgcaaaggccgttttctttgaggacgaaaaaaacaaaaagggcgcatggtatttgtcgcgttttgaagtgccgtcaatcgcgccggttaccgccgtcgagttcaacacttggctcgacggggaatggaccatcgccgccgccacaatcagcgacaaggacgcggcgacttttgaaacgtgggagcctactcccgacaaatggagcgtcgccgacattcccgaagacttgcatatcgtaaaaggctcggctctcgaccagtcgcctttcttctcccgcgacgaagcgggcgcgcaaggcagggttgcggtttctccccgcggaacaatggcctttgaaaaaacccccgacaaagacgcaaggtttaaaagcttcacaatgaccctcggcctgtttttcagaatcaaggatacggaactgagaaaagcgctgctgaaaaaatacgccgaagaaataaagcgcacaggctacaactgcgtcagaatggagtacgaaaattacaagagctttaaggagcgaaagaatctcgcggaaaatatggattccctcgacttctttttcgccgagctgaaaaaaaacggcatatacgtgcatctggtaatcacctggcaggaagtcggcgaagagacgcacagaatggggctcgacagggacgacgtaaagctgcgctgccttttttgcgagccgcaaacgttgcaaaattggaagcgcacggccgaactgcaaatgaaccattttaacccctacacaaaactcgcatggaaagacgacccgatgttcttgcaagtggagcatttcaacgagctttcaatcgtaatgtccagactcgaaagaggcagcgaaaaaacccgcgcattcgtattgggcgcattccaagactggcttcgcaaaaaatacggcacgatagaaaagctcaacgaagcgtggaacgtcaaaggttttgtatacaacagcggctctttcaaattttccgatttcagggaaatcgtgtcgccgtttgtcaaaaatcccgactggcaggaattcgccctcgaacgcaaaacaaagtatttgaaattctgcaacaaggtaatccgcgacaccggctacaagggaattatcgcaagcgaaaacataacctccgcgcccgcccaaaatcccccgcgcgccaaaatgttcgaaagcgtaattgccaacacgtacttcgcgcatccgtcaggcttcgacacaaaaaacgtcacgattaagcaaatcagctccataggcgaatgcctctcctgcctaagcagcgtgatatcgcgccgcctcgcagacaggccgattggcatcaccgaatacaaccattgctggtggaacatataccgttacgaaatactggggtcgttcgcgccatatgcggcatttcagaatatgtcgatgctcacaatccacgaaggcgcggtgcataccgacgtagacttggcgtatccttcgagaaagtcgctgaatccgtttagggtcaaccgttcgcccatactgcgggcgtccgagcttatggcgacttcgttctttatacgcggcgacgtcaagcccttcacaaagcgggtcgatttggtcataagcgaaaattatcttaaaaacaacaagctcgaatctttcaaggcggtgaatacggaacaaacgaaactggcgctggtggccggcttcgcaaccgactgcgaagtcgagccgcccgccgcgcttcgcggagtgaagataaagcccgccgacataaaaatgccgcccgtcggaagttccgataccgttatggaggcgtggtttcaagacgtcgtcgccaacgaaaacggcggcggattcaatttgaaggcgtttgtcaaaaaaatgcgcgacaaatccattctccccaaagacaacatcaccgacgtcgacaggggcgtattccagtcggataccggcgaaatcgttttggactcgcaaaacaattcgataaaagtttcgacaaaaaaatcgcaacttgcggttttgaagaaaagcgaaaatgtcgatttggggaatttgaaaattctgtccacaaccgcaagcgcggcaatcggcataacgtcgctcgacggaaagccgattggagaaagttcgcggcttgttctcgtttacgcgacgcaagaggccaattctggcatggcgacttcgttcgactttgaacacgcgctcacgttcgggaaagcgccgataatcttaaagaacggcgttttgaaggcggaaataaagctcgattcggcaaaacggttcgccgtatatccgcttgcgctaaacgggcaaaggcggccgccaatgccgatgaaatttgaaaacggcacaatgtccgtcgatatcgacaattcaaaactcccctacggggcaacgacaatgtttgaaatagtcgccgaaaacggaaacaactaaataaaaaaaaccttcgcccaaatttcgggcgaaggtttttttataaatcctttaattattttctgcggcgcataaacgcaagacacagagccaacgcgccgaatacggccgcgtaggttgagggttcgggaacaagcgcggcgtcgtacagccaatatccggccagcacgccgttatcgtaaacttcctccaaagccattttttcgatagccgtagacgaggcaaaagtgtcgccttcgcggaagctgaaagtttcggtattggcgccgtttgtcacaatcaaagaggcgaagtcgtccgacaggcgcacgaccgtagtcgttttttcgataaaaaggctgttcttgtcgaagttggaaagaacaatagttcccgctatgccgtttgaatttatggcaaaattcgacaatgtaagaacggcgtcgtcggctccccttatgacggtcatcgcgccgttattgcgaacgtcgataataaaattttgggaggcgtttaacttggtgcgcccgtcggttaaaaccgaagaaagatacatcgcattgtaggattctccggaaacctgccctttcataacgttggcctcgttgatttccagatagccgtaattgacgatttttgcgttttggaaaatgctcgcgcctttttccacaattatactaccataagaagcaatattcgtcgcctttgtagaatatacagatgttgattcgggcgcgacaaacgatccgccgctgcctaaaattaaagatgacccattcttaataattaatccgtattgtgcggccgatgtcatcgaaagcgtgccgttgactgtcaagaagcctccggagtttatagtataagccgaagttatgtagtcggtcgttcccgattcaattgtgtaggaagatgcgagcggagttgcgggcaacgcggcaaaagccgagcatgccaaacacaaagacgacaatgtcgaagcgaattttctcatgagtgtagatatataggtgttaaatttatattttaataattaatttttaattgggcggcgacggttgtcaacagtaaatttaacgtttataaacgcaaaaaatccgacgtaatagattgacttgcacgcatatccgccgatatacaggaaaatatgaacgcaatacttttcaactgcagtccgcataaaaaaggaaacacattttcgatgctaaacgccttgaaaaaatcgcttgaagcaaacggcatagacgccgaaataatgcaagtgggaggcgaaaaaatagcgccctgcaaagcgtgcggcgcttgcggaaaactgcgcaacaaaaaatgcgtgttcgacaacgacattttaaattcggcggcggccaaagcatacgaagccgacgcgataataataggctcgccgacatactacgccgccatgacccccgaagcaaaagccctgatagacaggactggatttgtcaatttcaacaacggcggcgaattgctaagggggaaagtcggcgctgctgtggtcgcccaacggcgcggcggcgcgacaagcgtattttcgagcatcaactttttctttctaatgagccaaatgatagttcaaggctcgacatattggaatatcggattcggactcgaacagggcgatgtcgacgaagacgccgaagcgatgtcgaacatgaaaaacctcggcgagaacatcgccgcccttttaaagaagttgcactcgaaatagaacgtcggcggcggtcgctctgcaaaacggtatttgcgcggctctaatttttatcggttataaaaaacctcccgtttttgaattcgacttcttttttggaaagaaaccagtttttccccttgttgtcgttgccctggtaaaacagccacaacttgccgccgccgtctcggaatatatggggatgtccggactcgctggaattccactcgccgtcttttccgttggctaaaagcggcttgtcggaaagcctttcaaacacgactccgtccgcactggacgcaaccccgatttgttggggggcgttattgtagccgcccgcgtaaaacaaatagattttgccgtccaagtttattgccgacgccgcctctatacatttgccttcccacgcaaatcggggtttcaaaacaggagcgtccttcgagatattcttccatgtgccttttgcgaacgacgatttctcgtcggtagaggcgactccaagcatttggatttttccgccggaatcccgcgtcgcataatagagcagatatttatcgttgaattttacgacttccgcatcgattgctcggccgttattccattttccgtcgggagaaaatatcgggttcgacgcgtcgcgggtaaaattgacaccgtcggacgaccatgcgtggcagattgcgtctttggggaaatttccgtaggtctggtagaaaagatggactattccgtcccgtataatcgcccccggcgcgcacaagcctttcgcctcgcattcgccttcgggaacaagctcgcctatcttgcgccaatttttaaggtcggaactttccgctatgccgatgccccaccctttggcgagatttcttttctctgcatcgggaaacggaggtatcgaaaaatacataatatagcgccctttgaaaaaaatcacgtgcggatcttttgaatacggaaagcccttgcgcgaggagtcggcgtaaatcattgttccgttttcggcagccctctttgccgcgggataggaatcgagcggaacggcgtctcccccgatagtccgttcgggttccgctatgctcccgaaattgcatgaagccgcaaacattaacgcaagcgcgcaaaacaccgacgcgcagtattttttcacttttgtttttttcataaacaacctatcccctatacaatattaactatgtttaaaactttcgaatataagacaaccgaaaaaaaatcaattcttttatcattaaatagttaatgactctttcataaagttccttatagcgtatagcttggaatgggataaaaagcttgtttttatgtatctaacggtataattagtattattaaagaataatttttggaatgtttatggatattttaggtaataaagtttggggtttcgatatgggcaaaggctcattaggagaagctgtaagaataggtaatgaattcaagcacgtttgttcgcttctgctcgatgcagattttggagaaattaagactgctgcaagtttaaggcgtcaatatcgcacgcgtaaagctcacaaagctcgcgaaaagtggcttgaagattgcttacgcaaatgcgggattgaagtcttgcaacgtcgccaagtagcatttgttgacggtaagtggcaacttgtttcaaaaggcgatatacgtttggaaaaagagttccctacagatgatgaaaacatttgctacaattctatcgcattacgttgtaaattgattttaggcgagaaacttgagagttggcaagtttttaaagcattaaattctgcgattcaaaatagaggttatgatagtgaaattccttggaaagaaactgaagttaaaagcaaagacaacagtgattatgctataaaacttcaagcttttgaaagagaaaaagatgaattactcttaaatttaccatctattgacgaagctatacgttccaaatttgattatccgtgctttttcaaggcttataaaataggcttgtggaatccagtaaatccaaatcaagttgattctaaaatatctcatactgcgaataaggcaaaagggtatgttattcctcgtaattatgttgaaaaagaatttataaaacttgtagagatggcatcgctacagtatcctaaattgagaaataaagctttatttattttgtatgggattactgaaaaaccttacgcttcgtttgattttgatttgagaaagaagtttaatcttaagcgtggtgctgaatcggattggacggcgttaggtcaaaaaattccacgttttgataatcgtatcgtagataaatgtaaattgattccacgctttaatgtttgcaaagtaaaacatattgatgaaattcaacaagacaaagattttctttattacgaaataacacttgcgatgaaacttttaaacttgcgtttttacagaaatgcaagtgtacaatcgttgaactacgatgaatttaaaatactttttgaaatcggtaaagcgaacaaatttaaaattacaaaaacaaatttgaaaaagtttttaaattcaataaatgcggaaatcttagatgaaaaccaagctgaggtcgcacaacccaaggacagtggtagagcttctttttcgcgtccagcaatgcaacttatcaaagaacttattttttctggtcaatcacctgctgatttttacgcccgaaaggtttcttcaatttcaaatgttgaaacaaaaaaaggtcttgttgttgaggatttagattttataaaacttatgggcgatgttgattggaatggaatttttattcccgatgttgaaacttacaaatttgctaaaaacttttcggaagataattctgctcaaataaacaaacttatcggaatgcagaatgacccaatagtaaggcatcgcctatcgttcttttacgaccgaataaaatatttagaggctaagtttggtgttcccgataaagttgttttagaatttgtcagagatgattttatcggaaaggaaaagaaaaaagaattaaacatagcaatcaaaaaacgttattctgaaaaattaaaaatagcggaaaagttagatgaaataggtttcaaaggtagcaaaatgcttatgaaacttgagctttttcaaaaacagggtgacatatgtttatatacaggagaaccgttgttgccaactgaaataccatctcttgaaattgaacatatagttcctcgaagtcgcggaggtccagactcagcgtataattttgttttaacacgcgaagcaacaaataaagaaaaagccaatagaactccttttgagtggctcagcggagattctcaaaagtgggtttcgtattctgatagagtaatgtctcgaagcaaagaactcgggaaaaaacgttgtcaacttttgcttaaagaaaatgccgaagagcttgtagaaaaatatacagctttagccgaaacagcgtggattgcaaggcttgcacaacgtattgtttgtatgcactttggtttcccaatgggggctttaataggaaagaaacgagtatttactgtttcgggaagtgttacttctcgaattagaggaatgtatggattaaataaaattctacataatacagaaatagacaaaactctttctgaagttgatatactgaaacttaatgacagccttgaaactaaaaatcgtacaaataaaaagcaccatgccttagatgcgatgtgtttgtgttttgctcctacaagtaaagaagtcttgaataaaaaccgagaaattttacctgtcgaaattgcgaaagatgcagaaaattattttagacgttatcttgataatatcattccgaataaagttgccacaatgaaaccaagattagaagaaactatatattctaaacggaaaattggcaaaaaagaatacattgttcgaaagtatgatttagaatcgcttgcatacaaaggaataaatcctaaatacgatgttgaagctattaaaaaacttgcgaatagtgagaatattataaatgttgtcgcaaaaaaaataatacgtgatttcgtaaatgataatcctacagaacaagaatggaaagatttttgtaatacagtaaaaatgccatcgaaaaacggtaatggttcccgcttgaagaggattctacttttggttggaaatactgcagaatacaaagatttatcgaaagacggttgtggtgcgtatcgtaaaggcgattctcataaaggtcagattatatggaagactaagtctggaaaatttaaagtagaacctatatatgctcattcttcgcgtgctaaagtttcaaaagaacttatgaaaaaacccgaatttgatagtgtagcgggtatatttcgcactggttgccttgttgaatttacaaatgatgtaatgaatgataaagatgaattcttgcttgagcgaggtatctattccttgaatacaattcgttcagatggcatgatgaaatgtacaacttcaaatggaattccttcaaaacctataaatataaattattttatggaagctggaatgaggtgtgtaattttataaagaaaatgagttatcatatattgcatattaccgattttggttgtaaactttctaaagagcgaggtcttttagtttgtaaaaaagacaataaaatcttaggtaaaatagcaatagaagatttgagagctgttgttttattaaacgaggcaacgtccataagtggtgcaatactttctgagttatcggtttacgatgcagtttttattcattgtaaaaattttaagccagttggtattaccattccaaataacagaacgtacgattctcgggttgttttgaatcaatcttctggaaataaaaatttaaatgcagggatttggcgaagattgcttttttcaaagatagaaaacaatgtaaaatgtttaaagctaatgggtgtgcgcaattcaagaattgaaaaaatgttttcttctgataaaatctcgttaaatgaatcttggtttgctcgcgaatattggaaacattatttcccgctattgggtgaatataaacaaagacgcgatccggcagacgaaacatctaaaacaaatttactccttaattatgggtatgggattatggggggtataatccaccgaagtataattgttgccggtttgaattatcttttaggtgtaaatcataaaacatattacaaaaacacccctttagtttatgatataatagagccttttagggcttttgttgattttgctctttacaaatatatgctttcggtcgattctcctaatgttaggagttgggctgtattttttggtgagtttttgaaagactgtcggataaaaaaagataaaagttctgtaaaacttttagattcaaccgacatagtgtgtgaaagtgttgcaaatgcgtatcgaaataagaaagccgattgcgtttggactccaacactaaatttatgaaatacgaaaagaaaagtccgtttagaatgggttggttaatggcaatgtttgatttacccgttcttctcgatgaagaacgcaaagaagcttcacgttttagaaaagctctgcttgatgatggttttataatgattcaatattctgtttattcgcgaccatgtgtatcgttggaacgtatgaaaaaacattatgaacgtgtaaaaagttatgcgccgactactggtgacgtacgattactattctttaccgataggcaatggggtttgagtaaacttgtatgtagaaaacctaaaaaattagaaaaaggacctactcaaatcgaattttttgattcgttaattaatgacgaacctaagtgcaaagttgataaagatgataattttcttttgttataaaaaatatgccgaatttcaaggtgcaatgcagagcatgaaattcggcaaaatcagttaagactttacaactaaattctaacttaaatatcccaactttaactaattgtgtcaatactattgtttaaaagaacgatttgttgtaaagtcaaaactattaaaatatgtttacagtattaaaaataattgtttaaaagaacgatttgttgtaaagtcaaaacctttgcttctgccagttttagcgacagctcattgtttaaaagaacgatttgttgtaaagtcaaaactatttattcggctctttacgaaatagatggattgtttaaaagaacgatttgttgtaaagtcaaaacaaagtagtcattctcgcaaacctccgaagtattgtttaaaagaacgatttgttgtaaagtcaaaacaatttgtagtcaatcacatcggccgaattaattgtttaaaagaacgatttgttgtaaagtcaaaactccctcttgattgcattccgcctcgaagccattgtttaaaagaacgatttgttgtaaagtcaaaacttaccattccgtacttaacagccaaccgatattgtttaaaagaacgatttgttataaagtcaaaacgtatttattgttgggcggaggattattcctattgtttaaaagaacgatttgttgtaaagtcaaaacccacttcggcgaacacaggttcgcgttaaaattgtttaaaagaacgatttgttgtaaagtcaaaactgttttacttattatcggtgagtatgagttattgtttaaaagaacgatttgttgtaaagtcaaaactcgtattcgacaatacaaaccgttacacagattgtttaaaagaacgatttgttgtaaagtcaatttcaattttgaaaattccttatttttaaacaaaaaaacctcaagcagcttacttacagtccattaaaaatggatgcagggattggatttgaactcgctcgcacgcggtgctcgtctcgcccgctcgcttcgcgcggggtctttgtctgcgacaaagcttccctcgaaagatttctttatattatagaaactttcgcgttgaaccttggttcattttttgctccgcaaaaaactgcgcttcgcttgaatccaatccatttttagtcaaaaaaaaccgcccctatgggcggttttttaaatggatgcagggattggatttgaaccaatgaccttcaggttatgagcctgacgagctaccaagctgctccaccctgcgatatttaataaaaagaacatggaatagatttttatcttctctgcaagctttttttaagagtatttctaaaaattaccgttttcttatttttcggcttgtatcaagcggagtttccgcattttgcaaggagaatagtcggttatttgacaggggaaaagcgaaaggttgccaaaaaacgaaaaagaacaagcgcatcaactaaacaaattttataaaaccgatttttagaagttccccttaaattatttgatttattaaatgcgactgttttacgaagcgcaccttccctatcgacaacgccgcgtctatttcgcggccatactctccgctaccccaactcgcaagcggcttgtcgcctacaaccacgtagtccgtagagccgtttaccgttcggcttacagtgccgcccctatagcttatcagactttcaatatattgacccgtcatatccccgaaatcccccgtaacgacaaacgtctttgtgaaatctatcggcgaatagtcaaaaacaagctcgctctgcggcgtatgcttcgcacgcatgcgctcttttgtttccgcgcatttcaatatcctgcgcgccgcctcaaaggcgtccgtttcgcggcaacgcctgaccgtcttttcgcggaacggtttcttcaacggggcgacatcaacccgcgaagacagtatctcgaatattctggcgcatatttttgcgtcggcaagggcgtcgtgatggttgaattcccccaaaccgtaatagtcggcgagagagtcgagcctgtggcttttcagacctttcgtcgtcctgcggcttatcgacaatgtgcataaatagtcgaaatcgggaaacgcgatgtcgtaccgctccaaagacgcccgcaaacaggaaatgtcgaacgccgcattgtgcgccacgaccgtgtcttcaagatacggctgcatttttccgaagaagctgtcgaatgtcggcgcgtcgcgaacgtcaaaagcggttatcccgtgcacgcacgtattgtaaaaattgaatgcgcaacacgggtttatcaactggcggatttccttcacgacagacccgttctcgacgcgcacaagcccgacggagcatatcgacgccctgcttgcgtttgcggtttcaaagtctatcgcggtaaaatccataaaatttagtcgtcaataaccgactgagacgactctttgctttgaacggtcgatttctcgcccttcaagcggatatcgtacattttttgcgatattttgcgggccgacttggctattacataatcgggagtatcgcatatgtcgacaaaaccgattgcgtaatttgcctcgttaaatctgcccgtcgtgcagaggtcgaaccactggaaccagtgtgccccgactatattcggattttcgagcgcgcttctcgaatagtcctcaaaggccttgcttctgtcgtagactgtctttctcgcgtttagtccgccgccgtatacgcctttgtccgtgttgccgaaatggaattcgccgattattaccggcttgtcctcgcagccttttaccggcgaaaaattcgttacgttgtcggaatacacgttgtagctaatcacgtcgcaatagcgcgagcttaccctttccacaagttggttgtgccatgcgaaacggcagcccaaatacagcacgtcgggcgatacgtcctttaccgcgcggcggcagatgtcgaaataaaactcgtacattttcttttcaaacgcgagcatatcggcttcgccctttttcgttttgggcgcaaaatcgcggcgtttgaggaagtcgccccaatccttataatcggcattccacgccgagttgagcttttcgatttcccgatacttctttttcatatcctccatgaatacgattttaccgggttggtcttcgggacagccgagcaaagccctgattgtagtcaatgttttcagctgccacggaatttcgttgtcgacaaaaacgccgacgcacgcgggcgacctcagcaagtcggcgattcgcgcaacgttccgccttgttctttcttcaaaaccgggggtgaaaaagtcgggaaaatcgtgccaatacgcgtacatttcaacatcggtcttgtatgttctctttttgcccgaccccacaaaggccgtaaagggaatgttcccgcggcgcagaatgtagttttgagtccagcagccataagttgtaaagccccatttgcgaatgcgctcgtcggtaacctcgccgtaggtttcgcgataattgtcgccgtatttcgtcacgagattgcgctcgagaaatccgtaggaatcgtgcttctttttatagtagtggagtccgtagcagttctttcggagaaatcgcttgtcggagatgtcctcgaaataaaattctctgtccgtaacgggggtggtgtcgagattgcccgcgcaagttatgccgtaggaataaaacagatttccttccggcgttatgagaaaccacttgccgtcgattttacggggatagaatcgtcccgtagcctcgtatttgtagccgtcgcggacaagcccgaaatatttgtcgcggttcggtatgtctccgatttttttgtaaaacttcttttcttcggctatgcgcttttgaaagtcctcgaccgattttattttgccctcccaatctttatgcttgaattggccgaacctgtcgataaagggcataaactgctcttttgtatagaaaagaaacggcgaattcaagtcgcagaaatcgggatttgtcggcttgtagcgcattcctataaagccgtccggcttgaacatccaagcgttgcgttcatcgggtatgaatttttctattttcaagtcgtcgacgattactttcgcgccgcggtcggaattaatttcaaattcccaagtgacattttcgtctttggtcacgccgccgaaaaccaccgtatgcgcttttttcgatattccacgaagttcgcacatgccgattttattctttttgccgttgaagggcgcgctttcgcgaagaaccgcaaaaactttgcagttcggcggcatatcgactattctatatttgaaagaggcgtagattatgccgcctttcttaaacgacataaacaaaaggctgttccaacgggaggaaagatttgtagtgtcgagctgtatggaagagttgcccgagatggcgccttcctgcgcggttatttcatgcggggaggccgccttgaaattttcagcctccggcagcttgctgttggcgaaatcctcgaagttttcgcttactattgtttctgtcaaattcccgaacaatggacacgaaagcgccatagccgcgaacacggttagtatttttttcctcataataatagcagtatttgatttttatgcaatccgcctgcgggcggaataatcgctttaataacgccgaaaataattaccgcatcgaatattgcctgacaataaaattttttttgttgcttaattattttcggcggcgaaataaaaagcggctcgccgaaaaatcggcgaaccgcaaattaaaatcgtcatttgccgctacgcgacatctacgctgcgataagccgccaaaagctttttgtcgccttcgacagtcttgtcgctctgtccgtgctccatgccgattatgccgcgatagcccttgtcccaaatatgttggaatacgtttttgtaattgatttcgccggtagtgggttctttgcgtccgggcacgtcgccgacctgaaagtatgcgatttcgtcccaagcggtatccatattctggataaggttgccttcggtaatctgctggtggtaaaggtcgtcgagaattttgacattcgggctgccgacggccttgcaaagcgcgtacgcctgcggaatgcgtttaagccaaaggctcgggtggttcttaatgtttaacggttcgagcacgatgataagccccgatttctccacgatttccgcacaccatttaagatgttcggccacattggcaaactggtattccggttcgaccgacggatcttcgagacccggaacgaccgtacaccattttgcgttcacgcgcttggcgatttccaccgctttcagcattttttcgcgccaaaattcgcggcaagcctttttgtcgacggtgcgttttttcaaatccattctgttgcccgtcatggaggcgttgccccattcggcatgggctacgaacacgcccatttccatgccgagcttcgacatttccttcgccattgcctcctgaacttcgactttgcgtccgggcatgccgttgtcttcgagccccctaaaaccgcagtcgtaaaagaacttgattttatccacttccgaaagtccttttgtcgattctctgcaatgcccgagattcggcgaaaatttgcatttgtagggagcggtcgacgaagcgattgattttgcgtccgcggcggacgcctttccgaccaaagccgcacccgccatggcggtaagggcagtttttgcgaatgatcttctatccatcataataactttctttgtatattctgtttgttgagaaatttgcggactaaacctttaaaaatcggccgacgccttttcgcgcaacttttgcaagccgtaatttttaaagattaccgaaagtcgatattgttccattttttgtcaaaatagtgaagcattttcttttaaaaaattagccttgaaagattcgtaaaatcaagcattgtttttggcacttatgaaaaagacattcttgatacttgccatggcggcgactctcgtcggctgcgcgtcggccgacaaatccgtccaaacacaaccgaaacatcgcaatgtagcggttcaaacatacactttcaacaagttcacgcttgaagaaacaatcaacaaaatcaagacgctcggtcttgacggcgtggaatgctatcccaaacagaggcttagcgacaagttccccggcgtgcttacaaaccagtatatgaacgccgaacaaaaagagttcatgaaaaagctgcttaaagacgcaaacctcaaactcgtcagcttcggcgtggcatacgcaaacaacgaaaaggaaatagaggacctctgcaaattcctcaaggaattcgactgcaaaatcgccctcacggaagcccccgaaggcctcttccccgtttgggaaaaagtcggcgcaaaatacggcattacgatggccgtacaccaccataccgccggcaagaacgactattggaatcccgactatctcctgccgctcatcaaagactacaaattcgtaaaggccaaccccgacacaggacactccgcgcgcgcgaaagttgaacccatctcggcgcttaaaaagtacgaaggcagaatcgcctcggtacactttaaagaccaaaagagcttcggcaacatcaagaacgaacccgtcgtattcggcacgggcgcgctcaacacaaagggtatgctcgaagaactcgacagacagggctacaacggcttcttcgtcatcgaatacgaagccaactatatgaacaacctgcccgaagttaaggcttgcgtcgactatctgcgcaacaactaatccttcaaatatctttccgaacggacaatccgaggcgattgtccgtttttttttggcttgaagaatttggcaacggcgtataacatataaacatatgattatttttaaacgtcttttattactggcaacaatagcgttggcgatggtcggctgcatttcggcaaccgttaatatgcccaagaaggaacgcaaagtggccgttcaagcatacactttcaaccgctttacgctcgaagaaacaatccaaaagattaaaggcataggccttgacggtatcgaatgctatccgggacaaaagctaagcgcgaaatacccgaacgtaaaagtcggcatcggcatgaacgccgaacagcgcgcatacatgaaaaaactcctcgcggacgcggggcttaaaatggtcagctttggcgtaaccagaacaaataacgaaaaagaaatcgaagaaagttgcaagtttgcaaaggaattcggttgcgacaaagtccttacggaagattgcgtggcgagattccccgcttggcaggaaataggcaagaaatacggcgtgacaatgtgcctgcaccatcacggcctcgaagcgcccaatcaatactacgatccggacgtcgtgttgaaatacacgggcccctacgaccaaatcaaaacaaaccccgatgtcggacacgcccatcgcgccggcttcgaccccaacgacgccctgcgccgctacaaaggcaaaatcggctcgatacatatcaaagaccacgacaaggattgcgtcggcgtgccgctgggcaaaggcgttctcgatattgcaaagatgctcaaactgctcgacgcccaaggctacgacggcttttttgtcatcgaacacgaagtcaatttcgacaacaacctcgaagaggtaaaggaatgccttaaatttctccgcgaaaattaaaccgtttaaacgtcaaaacataaaaattaaacttgcgtaaaaaaacgcgcaaaccattatctcaatcgtatgaagaaagcattaattatcctgtgtatgtcgctgttcgttttcggctgctgcccgagcaaacagtgcgaatcgaaaacgcaacgcaaagtcggcgtggccatgtatactttccacaaacgcacgcttgaggattgtatccccctgctgaaagatatgggtatcgacgcaatagggctctccacaactccgcttagcgcaaaattccccaaagtaaaaacggggcccgaaatgaacgacgaacaaaaagcttttcttaaaaagcttctcgccgacaacggaatgaaaatcgtaagcttcggagtccgcacgccaaaggacgaaaaaggcgtaaaggccatttgcgatttcgcaaaagagttcgacattccgcttattcttacggaagcggtcggcgatatgctccctctctgggaaaaatactgccagcaatacaacctcaaaatggcgctccacaaccacgcgagcgacaacacaaaacacaactcgtattacaacccgaacataacaaaggcggcaatcggcaatttcaaaaacatctacgcctgtccggacaacggccattatgcgcgttcgggcgttcaaagcgtcgcagcctacaagattctcgaaggaaaaatcgccatgctgcactttaaagacgtcaataaattcgacgaccttaaagcgcacgccgttcccctcggcacgggcgcgctcaatatgcaggaactccttgccgagctcgacagacaaaagttcgacggctattatatgattgaatacgaatctaagcccgaagacaacgtcgccgacgtaaaagcctgcgtggaatttttaaggaagaactaaaaaatacatttcaaaaggcgcgcaccccacggcggttgcgcgccttttttattttgttgaacaatattgacctttccaaagcaaagaaataattcgtcttgatttcccgccga

SEQ ID NO: 3238 - DNA, 15353 bp, synthetic construct
  misc_feature 1..15353: note = Synthetic
  source 1..15353: mol_type = other DNA
gttccgctgtttgtatcgcgcgagactattacgatcttcatatcgtcgccaccaagctccttccagtttgtaatcttgccctggtatatgtctgagacctgctgcaaggtcagcgcgctaaccttgttttctgggtttactatgactgccagcccgtcgtatgccacgacgtgcgccacgggcaaaactcccttttcaatgcagcttttaaactcgcttgccttcataaagcgcgagagatttgcaatgttgcaggctccgttcatgaggctctttacgccgttgccgctgccggattcgcttattgttatatttacatccggattggtctccttgtaaaagtcggcgaaggacttggcaatcgggcccactgtcgtggaaccgtctattactattttttcctcggcaaaggcgcacgatagcgcgccaagtaccgctattagtgatattctctttatgctgtttagtattcttaatttcataaaaattttccttttaaattagagtttttagaagagtatttgcatctgcgctctcacagtattcgactccgcaaagttggatgccgacttgtttgagggcgttccgttaaactgggcccactcgtagccaagctggaacttcacgctgtcgtccatgatgtaccaattcacgcccgcatagacgctttgagcggcgtagaaggaagagtagccgggggcgttgtttgcgtttcttattccgtcgcttaccgacactccgcgcccatcggtgtcgagccatgagtagcggactgtgggcccgatttttccccattcgcctatatcaaacctatattcgataccgacgttaacacccatgggagtagcatcttccgtgcgggtgatgtcaccgttttcaattcctgaaatcagaaattcgccccagatattgaatccgtagagatttgccgtaacgtaaggattcaagccccaaactgaacctccgctaacattcgtgctggtagtgtcgggagaatatccgaaattcactcctatcttgaatgaaatgtcctcttctatgcttccagaatacgctacattggcccagtaggcgagagtattgtccgcagagctcggaatttcggtcggattgtcattatagggacttgtgacggccgcgccgtactccaacccctctatctcgtctatctttccattccaaaatatgccggtatggcgagctccaaagccgaggcgcctaccattattgccctccgtccagtagcgagttgccaaggaacgctccacggaaagaagcttggaagccgaagtgttttcctcaaatccgaaatttacctttttatagcctatgtcaagcttaccgtgaagaagctcccaatctatggccttcgtaatataggcattttccagataattcttgtcatctcccgatcttccgaagtctgcaacgaccgttcccgaccagccagaacccaaattggcctcggctcccaaaaacagtcttcgcattatgaagtcgttttttgacactgcgtgcgatgttccggcggcgccaaagccctctacgtttatattctcgtattgggtttgaacgcgcccggtaatttttatacctttgacgtttttgtctttcgcgacaatctttacattgccttttgaaagcttcgacgcctcctccttcgtaatcactcccttgcttaccagcagatccaaagttgccttgtcctgcgcgtttgaatagagcgcggcaagcgagagaagagccgccgcgatgaccgttgttgtacttgatattttcatacacttatttttaagttagttcgccgaaatgaatctcattttcgacgagccgattctctcaaagttttattaggtttttattcaaacattgttagccttgagctaagttttcgttagactattccataaaattgttagcgttttattagcctgaaattagaagtttattagatgctttattcgcgttgacgcccgccgatttaagtgcagtatcagccctgctaacaaaatctgataaatgaaatcaaacaccaaaagaacctccgagatcttcacgcgcatattcgcgtggagcttcgcggccagcgccataatcatattgcttttcgcagtatttacctacgcgatattagagagcgtccacaagaaaaacatagaaaatctgctctcgacctccgcggaatttctcgcctcaaacattggcgggctctcaaattcagaaaagctcgaaaattttcaagactcgctaaagaacacaaatataagggcaagtattataagcgagagcggaaaggtcgtattcgataccgatgcggaccctgttgatatgctaaaccactcaaaccgctcggaaattaagcaggctttcgccggcaagaagacattcgtgaagcgctattccgacactctcaaatcccgcatgatttactattgccgccccgcagtgcagaaggccgacggaacgtacaaatactgcgtaaggcttgcaatgcctatggagagaataacttttgcaaaaaagctcttggcagcacaggtccttgcaataactatagtggcgatatttgtttcgcttttaatatcatatctcttcgcagggcgcgtctcaaccccgataagggccataacaaactctgcaaaggagcttgccaagggcaattttgacacgcacgtcgcaagctctgacgtgcgcgagattgcggaattgggagactcaatatcaaaaatggcaatggagctaaaggcgcgcataaattctctaaacaagcgcaattgcgagctggacgaaatctttgagcacatgtccgaacccgtattcatatgcgcaaaagacggcacactgagaagatacaaccaggcggcggcaaagctattcaaaataaaagaagggcaatttaagccaaggtacgacgcaattttgcgcgaacataaactcatcgaaataatctcaaagacattttcctcggacactgacttaaaggacgaaatagaatttcaagatgcaaaggaaagtacgtttgcgattgtcggagtgaagttgccatacgaatttacaacgccgcgcgctctgtttgtgatgcacgacatctcctacatatctcagaacgaaaagctgcgccgcgagtttgtaaacgacgtatcgcacgagttaaagacgcctataaccgccataaagatggcctccgaaacactgaagtcattcgatgaaaacgaggattctaagcgattcttaaaaataatcgataaggagaccgacaggctgacctgccttgtaaacgatatgctcttgctttcaaaaatcgaattttgcgaaagctacggggctgaaaatttccaaaagtttaatcttaaaagtgcgatagaagaggctgtctcaataaatgaaaacgacgcaaaaattatgggagacaccatagccgtaagctgccccggcgatttggaatttaatggggatttcacgctaataagacttgcggtgagcaatctgattgcaaatgcgataaagtacgggcttgagaactgcaaaattgcagtgcatgcgtccagaatcgacaaagacagtgtaaatatatcggtctcagatacgggggttggaatatctagcgagcacataaacagaatttttgagaggttttacagggtcgacaaggggcgctcgcgcgcgttgggcggcaccggacttgggcttgcaattgtaaagcatgtgtgcatactccactccggtagcgtttctgtcgacagcatagtcggcaagggatcaacctttactatgcacttgaagggctaattgttatgagcgataaaaaaatcttaattgtggaggacgaagacagcattgccgaactcatagagtttaacgtccaaaagaacggctttaagactgcccgcaccgactctgcggaaaaggctctaaaaatccttgaaaatggcgactgcgacttaatattgctggatctaatgcttgccggaatggacggcttggacttctgcaaaatcttcaggcaagataagagtctaaagcaaatccccataataatactcacagcccgctccgaagatgcagacatagtaagcggactcgaatttggggcaaacgactacataacaaaaccctttagccccagagtcctcatcgccagaataaaggcacagttgcgcgactcctcttacagctcggaaaaatctcaaataataaagagaggcggaatagagcttaacaaggaatttcacgaagttaagataggcgacaggcgccttgagctcacggcaaacgaattttcaattctcgaactatttttggaaaatccgggcaaggtttactcgcgcgatgcaataattacaaacgtgcatggcgacggctatccggttaccgacagatcaatagacgttgccatagtaaacttgagaaaaaagcttgagggcaaggcaaagctaatagaaaccgtgcgcggcgtaggttacagatttaagcaggattgaaattgtaaaaatctaaaaatcgcaaacaaaaaacccgcccaaacaggcgggttttaatatttaaaatcggcgcgccttaactagctgcgcgagattgtgacaagaacccttattacttccttctcgcgccccttaaattttgagcgtatctcgacaaagttaccgtctgcatccagagggtttttaactttacttgcaggagctcccattcctattccgtcggaatttccgggattgtccgcaaatatggtagtcttattctgagcctctctgagcgaacctatctcctttttcgggcgggctatttgaaagcaatacggctttcccaattctgctataacgccttttttagtcggcatttctatgtattcgaggtccaaacaggaattcattgtattgttgttgttgttgccctcggttccaacccagccaaggatgcggcatattgcgtagtcgaagtcaaacttgaccttgtcttttgctaccttttctatggctacttgcgtgaaggttccaaagggatacgaaccgtctgtggcaacaggtatggcaagaagcttgtcgtagtactccttaatatcgtcgtctatctccttaacaagttccgccctcacatttaaattgcgcttggaacgctcaaattcctgcttaaacttttcgtaatccgactttgcctttgaataggcctccacaaatctgtaattctttgtcgggggcctcattgagccgtcattttttgaagttctgacagacgagcggccgcgcgaggacttatttacctgctcgcgctcttttgagcttagtttaagttcgagatttttcatattcatctccaacttaaggagcttctcctccaacttctcctcgtctggaacctttagcttttcctccatttcctgattcagcttctccttgtactccttttcgaccaagcttatgggctttagacctatgccgccaaaacctatggtatttatgctgccctcaaaacccttcatctgagagctcccctcctctatcatgaaggtggcatcgggatatgtggttttgtcggctatggttttgactgtaactttgtagtactgtgcaaaagatagtgaagcactgaataaggcaattagaaatgcaattttttttcccatcatttacaaaagaattaaatagttaatatttccttagagattaaaaaacccgcatgcgcgatagcgtgcatacgggtccatgctaaaaagttcaaatacacaaagagtgcgcagactttagcaagcccacagacgcttcttgtgacgattggacttggagcgcttgctacgcttgtgcttgttcatctttagacgacgttttttcttaagatttcccatattctgaattagatttctttgtgatttaaattgaaccagaatctacttttttaagcttttgtaaagctttttttttacttcgcacccttaggcagaatttttacgcggtaaaactttgcgcccttcaaaaattcgtcgcttgcatccttcacgtcgccgagcgtaatttccgaatagccattttcaaaagtccttgccacttcgcgccttgcaggatctgcctgatagagcggcaaaacagagttcgcccagtaggcgttcagcctgcgcactttttcaacctgctttaaaattggctctttggcgcgcaaaaattcgtcctcactgatgccgtctgcaactttctttgcggatttttctatgtaatccaagacctcggcgttgaattcgggcgcggtgtcgcaaatcgcggaaatcacgccgtaattgaagtcgcggctggagttattgtaggcgtatgggctgtagactttaccctgcttttcgcggacggatttcctcaattcgtcgcttaaaattgcgccgagaatgttcgccgcccgcatcttttttatctgcgttctatcgcaagtgggccagattgtcgagatatatgactttctcggcctccttgctaagctccacactgcgcttggcggagtagtcgggccttgaggccgcgcgctcgggcatggtgccgaaatactcgccgagccactttaagacctcatcctcgtcaaagtcgcccacaactgaaacctctatgtaggaatttttcattatgggctcgagccactccctcaagtcgcccattgaaaatttctcgacttcggactttgccgggaaggccaaaagcggattgccgctcgtaagccagccgtctatctttgccgctgcggcctcgggaaccgtttcaacttggcgatactttgtttcgattagcttttcaatatagtttagagcctcgcttctaaagcccggagcgcgcataaaagttgccaacatcttgaggctatcttgcagatttttcgtatttgtaaggcaggtgaatgaaaagttgtcgccctccattgcaaaatttaagttcatctgcttatcggactttgccacgtttatttcatcgtagctttgcatttttgtgcctcccaaaagggcgccgattgcgatttgccctattgcctcgcgcccctcgggcagatcgtactttccgcctccgaacgacacgcttacgacaacctcgtccttggcaaaatccgtagtttttagatttgccctgacgttgtttttgtaggcaacttgccttatgtcaagctcgtcgcgaaagtccttaactacctcaaacttcccggagaaatcggcgtactttaactcgcttgcactcaggggagccgaaatttcgccggacttctgaagcgctttaacagtctcatcaaacagcgcttgagcattgaatttagaaccttggctatccacatcgaccagccttgcaaacacggcggaagtctccgcaaactccctgaacattgcagtggcaagcttcgcgtcaaagccctcaaacgcaagctttgccaactttaaatcctgttccggagaagtgtaggcgtcagcaactgaaagggcgtttgatattgcgtcgcttatcgccgccgactgccttgtcgattttgattttacctcgctttcaagcgtgcttagtatatcgctttcggccttctgaagctcccaatcgccaaagccgtttttcattatgccaaggtacatttttagcgtttctctaagggcctcttcggcatgtccggcatttgcgcgagttgctattgtaaaaatttccgcatatttttcaaagtctccaaaatccgcgtaggcgctggaaaacttggtcttgctgtcggactttagagaatcgaatcgcaaatttataatgcgcgatattgcgtacattctgaagtctcgcacgcgcctttctatgctgtcgaacttgaattttggcttgtttacaaggtaaattccggcgctggaatcgcgggcgtcggcatcaaagtattcgcttacagaaacctcgcgagggctctttgaggccggatcgaaatactcgcccggaagctccgcctccgcaacttgcgcatcggcttttatttcggaaaaatacttccttgcctccgctaagattttgtcggcatcgacatcgcccacaactattagagccatgttttcgggcctgtaatttgccttgtagaaattcaaaaactcgctgcgcggggcggtctcaattatcttttcctcacctatgggcagacgcttcgatagcttagagtccgaaaagagctcctttataagtccaaccgatgccctgtacgcggcggtgtcgcgcgactttttttcagctaaaatcaccccgcgctccctgtcaatttccgactgctcaaaagcaatagttgaggcatagtcgcttagaagcttcaagccgtcgtctataagcgccatggaattttcgggcatatctatcttatagacagtttcgttaaatgacgtgtgggcgtttgtgtcggcaccgaaagccattcccaacctctgaaaatattcgaccatctctccctttgggaaattctttgtgccgttgaaggccatgtgctcgacaaagtgagctatgccctgctgagaatcgctttcgctaaaagagccgcgccgcaccaaaaggcgcatagaaaccctgttcggcggttctgtattcttgtaaacggctatcgtaaaaccgtttgccagagtttccaacttcaaattagcgtcgttttcgaccttttcgctcatattggcaatatctttcgttaaatttgtgtcgctttgcccggcgtttagatttgctaaagggcaaagtattaaagcgcaaagcgcaagttttattaaggctctcatatttttttattttttaaagacccagaaaatacaatcatcggaaaactccaaaacgctttgggattctgcggatatatcgcggcgcctggcctcgaaaacttttgaaaaacccgccgccctcaggtcggactccacctcgctgcggctaggggaatggataaaaagctcccccctatcgtctcgataccttatatcgccaaactcttctaactccggattttgcaagccgctgtcccagcgcttgcgctcatcgcgccagtagtgggcatttttaggggcatctctatcgtgggttgtgaatgcaaagcaagagccgtctctgagaactctccaaatctcgcgcagagcctttaggcgcatttgcctgcgcggaatctgcataagcccattaaagccgaatatcgcagcgtcaaaacttgaatcgggaaaatcgaggctgcaggcgtcttggactaaaaagcgaactttgctgttaaaatcaagagctaggttctttgcaatgtctatcatatccggcgacaaatcgctggccgtaatatttgaaaagcccaacttttccagattcagtgcaatgcgcccagcgccgcagcccaactccaaaagagctgcatttttgtcaaaaaacttttcaaacaccgcgcgttcggaggcccacaagccaacgtttgatacggccctagcgtaatcaaaaacgacatccggcagcgaaaagtacgcctttaccttttccgaattcatccgtataatggacagacaagtacgcgctttgttttaggaaatcaaacttattgtaaaaatatatttgccgcggcaaaaaaattaacgcttcaagactaaggcaactatcttaaaagtaaaactagaaaacggttcgaaataattctattgtcccccatttcgcccgcaatttatctttgacgctttcccttatcttaagaccaacgcgcctttgcaaatttgcagaaacaataataaagcaaagcccatacagaaggggtaaatttcttcctacgcatctttatgactaagattaaaactattttaaatatataaatgcgctttgaaaaatttaagcgaacaaaaaatattggaagaaagctctaaactcgcaaaaatacagttactattgccctgagagaacctgcaaatggtaaaattacaaaatctcataacagaaatttaaaagataaataaataatttatatatttatttttaatccatacaaacattgacagacagccattggcaatctagcattctaaattatgaatattatagaaaaccacgtttggggcttcgacatgggcaagggctcgctcggcgaagctgttagaatcggagatgaatttagacatgtccagtcgctaataattgataaggactttgcggaaataaaaacggctgcggggctcagaaggcagatgcgcactcgcaaggcgcaccacgcgcgcgaaaaatggttggaaaagtgccttgccgattgcgggatagaaattttaaagcgccgcaaagtagatattgtcgacggcaaatggacgctcgtttcaaagggggattctaggcttgaaaaggaatttcccgcatacggcgagaatgtatgctacaactcgatagcccttcgctgcaaactcttgctcggcgaaaagctcgaaagctggcaagtctttaaggcgctcaattccgccattcaaaaccgcggctacgacgaaaatctgccgtggaaagagggagatacaactaaaaagaaagacgacgatagcgactacgccgaaaagctaaagatgtacgagcgcgaaaaagacgagatgcttctaaacctccccgacttaaacgagcgctccgatttcgactatccctgcttttttaaagcctttaagattggtatttggtcgcccgaaaatccgcgcaaagtcgagcttagaatcacaaatcaagcgcaaaaggcaaagggttatgtcataccgcgcaagtgcgtggaggaggaatttgtaaggctagttgagatggcctcgcttcagtatcccaaactgaagggcaaggcgatgtttatcctctacggaatttcggaaactccctacgcctcgctctacgagcccttgcgagagaagtttaacttaaagcgcggtgccgagaccgactggacggcgctagggcaaaagataccgcgctttgacaatagaattatagacaagtgcaagttaatcccgcgcctgaacgtctgcaaaattaagccgcttaatgaggctaaggcagacgaggattttctgcactacgacatcactcttgcgctaaagcttttaaatttgcgcttctttagaaattcctcgatagagtcgctttgctttgaagatttcaaaaagctattcgaggtagggaggaaaaacaaatacaaaatttcaaagacaaatctaaagaaattttttaagtctataagcgcggaagttttgagcgaagaccaatcgcaaatagaggctccgcgagcaagcggcagagcgtcattctctagacctgccatgaagattttaagagagttaatattttccggaaaatctcctgcagaattttacgaagaaaagcttgcggaaatttcaaatacagaccccaacaaggggctcattgacggagacctcgacttcataaagctcatgggcgactgcccttggggcggaattttcatacccgatgtcgagacctacaactacgcaaggcagatagacgcaagcgccgacgagcgcataaataaacttatcggcgagcagaacgaccccatagtgcgccaccgcctgagcttcttttacgaaaggctaaagagcttatcgcaggaattcggcacgcccgataaaatcgtcttggagtttgtgcgcgaagacttcatgggcgagaaggcaaagaaagaaatgaataaggccataaaagagcgctttgcggaaaagctcgacttggcaaagaagctcgatgagagcggctacaagggcaacaaaatgctcttaaagcttgagcttctgcaaaagcagggggggcagtgcatctatacggggcttccattgcagacctccgacttaccgaatttggaaatagaacacatcgtgcctagaagccgaggcggccccgacgcccaatacaactacgccttaacgacggaatctataaataagcaaaaggctgacagaactccatttgaatggctctccgccgacaaggccaagtggcaggagtactgcgcgcgcgtgcgctccagagccaaagaactcggcaaaaagcgctgcgagcttctattaaaagaaaacgccgaagagcttgtggaaaaatacacagcccttgccgaaaccgcttggatttcgaaacttgcgcagcgcatagcctgcctattcttcggctttcagtttggcggcaatagcggcacaaagcgggtgtttactgtatcgggcaacactacttcaagaataaggggcacattcgggctaaatagaattttgcatagcgacgatagcgaccgcgaaaatatgtcggaattcgactttgtaaaactatctaaagagctcgaagaaaagaataggaaaaacaaaaagcaccacgccttagatgccatgtgcctgtgctttgcgccgacggcaagagatgtaaagaaagtcgatttcaagacgcttttacctaaaaaaatatcggaaagcgcgcccgaatacttcaaaggttacttagataaaatagtgccaaacgaagttgcgcccaagaagccgcggctagaagacagtatatattcactgcgcaaaattcagggcaaaaactgcatagtaaagaagtttaatctcgtggacttggcgaagaaaaaagttaatcagaaatccgtgtacgacttaaatgcaatagcgaagcttttggaggaaaagccaaagaaaattccgccgattataaaccccgtaataagaaagctaataaaggactttgtcgcgacaaatccgagcgagcaagagtggaaagattggtgcgagaaccttcgcataccgtctaaaaatggcgaaggctctagagtaatccgcgtgctagtctatgtgggagaacccgacgaatacaaagacctatcaaaagacggctgcggcgcctaccgcaagggcgacgcccacaaggggcaaatcatctggcagaccaagagcggcaaatataaggttgcgcccatatacgtgcacgcctcaaagaggcgcatacttgaggcgctaaaaaataatccggattttgaaaaagttgcgggcgaattcaggagccactgccttgtaaagctggataaacctgccgtaaacgataaaggcgaggaacttcttgccgatggtatctatatgctaaatacgattatgacggcaggaaaagctatcctaactaatccgaatggaataaaagcacctgaaatcaacataaactacctaatgcgagccggcatgaggcgaataaaaatggactattaaaatgagctatcacatcttgcacatcacagactacggttgcaaactcacaaaggagcgcgggctcttggtgtgcaagaaagatggcgcactcttaggtaaaatcgccttggaagatttgcgggcagttgtgctaataaacgaggcaaactctattagcggcgctttgctttcggagcttactggtagagatgccgtagtcatacactgcaaaaattttaagcccgttggcataacgcttccaaatatgagaacttacgacgcaaaagtagtgctaaatcaggcggctggcaataagaatctaaattccgcaatttggaacaggctcttattggcaaagattgaaaatagcgcagaatgcctaagagaaatgggtataagcgatagcagaatatctgatatgctcgcgtcaaagaatgcgaacctaaatgaagcttggtttgcgcgcgaatattggaagcgctacttccccgccctcggcgaatacggacaaaggcgcgatccgcaagacgaaaattcaaaagtaaataaactattaaactacggctacggaataatgtcgggaataattcatagaagtgtaattgtagccggcttaaactacctcttgggcgtaaaccacaagacatactataaaaatacgccccttgtttacgatttaatagagcccttcagagcctttgttgactgcgccttgtataaatacataatgtcaaacaacggcataaatatacgctcatgggcggtctcttttgggaaatttctgcgcgacaggcgcgtgagaaagggaaaaaacacaattaaactcttggacgccccagatgttttgtgctctagccttgcgaatgcctataggttcaagaaggccgataaactctgggtgccaagtttgcaaaatgaaaaatgaaaagaagagtccgtttagaatgggatggttaatggcaatgttcgatttacccgtgctgctcgacgaagagcgcaaggaggcggcgcgctttaggaaggcgctgctcgacgacgggtttataatgatacaatactcggtttactcccgcccctgcgttacgcttgagcgtatgaagaagtattacgagcgcgtaaagagctatgcgccgcaaaccggcgaagttcggcttttattttttaccgacaagcagtggggcatgagtaaactcgtgagccgctcgcataaaaagcttgagaaagtgccggagcaggtggaattttttagtgaacttatggaagaaaagcccaagtacgaagttgatgagaacaacaactttctacttttttaaaaaaaaattgccgaatttaaaggtactatgtagagcttcaaattcggcaaaatcagttaagactttgcagacaaatcttcaaataagttcctgtattgcaatacgttgcaatagtactattctgggaaagatcactttgttgtaaagtcaaaacggatattgttcgcgcaaaaagtccaaaactattctgggaaagatcactttgttgtaaagtcaaaaccatttcaattctaccccggagactggaaaaattctgggaaagatcactttgttgtaaagtcaaaacagtctacaaacatcataattcccgagactaattcttaaagtaacgaggatagttgccatttgggcaaaaagagaggcgtttgcttcgattgaaacaaacgcctcataatactggcaacgacctactctcgcaccgcatcggggcggtactaccatcggcggatgagggcttaacgagcgtgttcgggatgggaacgtgtgtttcccctctcctatgatcaccagagcctctcactaaagtaagtctcagtacccctaagtactgtgccataccctctatccgctgcaaattctcagctaaaagtaactactcgcctgactttataaacttgtgccaccaatcaacacaacctaatttaaaaaaagtgcgcaattattgtaataaactctttcgggtaattagtatcggttagctcaatgtattactacacttacacatccgacctatcaaccaagtggtctacttggtccctcagggaagtcttatcttgggatgggcttagtgcttagatgctttcagcacttatcccttccgtacttagctacccggcgctgccgttgacacgacaaccggaacaccagcg

SEQ ID NO: 3239 - DNA, 14719 bp, synthetic construct
  misc_feature 1..14719: note = Synthetic
  source 1..14719: mol_type = other DNA
aacacctacctcaaaaagcgatgagcgaagaaaacaacaacctctacaaatttcaggaatggcttgaaggcaaaatctcggcggtgctccccgaagaagtcgaaattctctgccgccgaaagggcaacatcgacaacgatgtccgcaacgcgctttcaaaaatcggcgttgcggtggtgattgagccgccgctcgtgcgccagtggacggacagctacattttgaaagccgaagtcgtcgaaagcgacatccactttttggaaaacgtgacgctcaaaaagagcgaccgcaccgcttcggggttgttgctcgacgtgtcgcgtgcaattcatcaggagcgttgcgacgagctcggcgcgtcggtgttgcggctcggccagattgacgacctttcgcccgccgaccagccgctcgtccactacgtcctcaccgtttcaaacgcgctcaacatttaactcaaaacaaaggaaaatcaatgaaggcatatccgctcgaagacatcaaagcacccgcgtatctctacatcgggaactcggtgctgtttatcaaagacaacatcaaagtgcaaaagacatcgacgcttttggacgttgcggtttcgcacaacatcaaggcgggcgacattctcaccgaccagtccataacaatcaaaggctcgcccgtggcgttctcgaataccgacgcgctcttcaaggagctttcgctcgtcaagggcgcacgcattccgaaagtcgaaaactgcgcgattgtcgcccgcgttgcgaacggcaagtgggttaagtggtcgtttgcgcccgcaatccacgacacgataggctcaatcactttcggcgcgaatctgccgctcggcgagcacggctggacggtctaccccgatccgctcaacccgacaacgccgcttgtttcggtttcggagcttacaaccgctcccaccgtcggcaagctcgaagacgcggggcagtttatgctgcgctgccttgcaatctacggcgacggcgaagacaaaatcgaattcgacacggagggcgcgagcatcgacatttcgctttcgaccgaggacgcgcagaacgaccgactcatcaagttcggcaaaaacctcaccgacatttcggtttcggcaaaggcaaaaccgcgcaacatttcgcttgcgcagtggcagtcgctcaccggcatcacgacgaccgacacaatcgggcagttcaagggcgtggcgagcttcccgaacctcgttctgcgcggcgcgaaaaaggacgacgttctgttcacgctcgtttccgcaagggtaaaagatccgtcggcgacgttctcgccgaaagacgcgctgatggacgagctgacgttcgaagcccacggcgacgcgatgggcgacaacaagcttacgataggcaaggcggcctccgacttcgtcttcgaagaggacgcgggcgactgactgcccgccgtcgacggggcggccgttgccgtcgattcggcggcggtggtcgtaaacctcaaagaatcctaacctgcatcgcaaatggcggcatacctcatatttcagccctacaacgcggcgactgcggcgattctggcgcggacggacgacgggcagacctacacggtctcttcgtccgcgccgaacgcgtcgagaatttccgacgaaatcggcgtggtgggcgcgtgtcgtccgcgcaagatttttcgcggaggcacggtgtcgctcgaaatcaccatcgggcgcaggttcgggagctaccaagaggcggaggagttcgcgcatttgcacgccaagaaaatgcttgcggtaaagggaacgggaatcctccgcctgaaaacatcgctcggcacggagttcgtctaccgcggcgcgttcttcgacgacttttcgcaggcgaacgccgcgggcgtgtggcaggagacttcctacacgttttccgtcggcgaatgcgtaagcgaattcgcgctgtccgtgctcggaaaacgcgtttccatcggcggggtggaagtgctcctgtctctttgaaattccgcgcttttgaaaacaaggaaaactcaacaaacaaaaccatgtcagaaatccaaaccgaaactacaacgcgagatttaaacgacttcgcggcgataacgatcggcgcaaacgacaacctcatttgcggtcgtggcaggttcacggcggcggagttaatcgcgctcgccgccgaacagcttgcgctcaaccacgcaaagacgctttgcgatgcggtcgtaaaaaacttcaacacgggcgcgccctcggcgggacgctgcgcgatttcgcccacgacaaagcggctctacgtctactgcgccgacaacctgtggcacgcgctgattcctgtgagttccgacggaatccaaatgcccacaatcgaagagaagggggttaaaaatgtactgtaattctataaagcacaaagtctggaactgcataaaagttcttttgtatagttcttcgttcttcgtttttagttcttcgttgcccgcggcgcaatacaggcccttgcccgttgacggcgactccaaacttgcggcgggctcgaaattcgttgcggcaaacaacatcgtttcgagcgacgtgctctgcatccgcgttgatatgttccgcggtggctgggacgacaccacccaaagaaaagccctctactggtgggaggccgaaatcaaggttttaagcaagacgggcgcgctgctctaccacgtctcgaccgtctggcgagaccgctcctatcacgaagatttgggagtcgaggacgacaaatgcagaatcttctactatccgtcgggcgcgaatgcaaacacgggcatttgcgccaagcccaaaaaggagctcaaacgctcggcgacgggtagcggggtttcgatttcgaagttcgagggattgacgggcactgttgcgaacaatgcatactattcaaggacgatttcgatttcgacaatcgagttcttcccgaacctcgacggcaaactcaacggcgtgtcgattcgcgaaatcttcctcaaccccgagaacacgattgttgtcagccgcaagaactcgaacgaaatcgagcgcgactatactaacggcagccgcatctggcgtgccccgattgttatctactacagaaagtgaaccgtatgaaaaaaatcatctttgcaatattgacggctgttgccgcaggcgcggcgtttgccgacgcatccgactaccgcgatatgctctcaaccctcgaacttgcgcggtcggcgaaagtcgcaagtgccgccgcgcggacgctcgaagccgccgactccgcgaaagccgcaaggcggctcgcggcgacggcggaaatatacgcctccgccgaaagtttcgccgacttgcggctgtggtatctgcgcaacacgaagccgaaaatcttcgtcgagattgagacggcgagcaatgcaacggatatgggctacttccgcttggattttaacggggcgggcaaactcgacaagctccgtatgctgcgcgaggagttcggcgtgaagtgaatttcaaccgcaaaagaaagacaacaaatgaaaaaatacatcatcacaatcatcgcccttgcgtgcgccgcaacgggcttcgcaaagacagccgacgaactctacaaggagtttgagtcaatcaaaaattcgcccgacaactggcggctctgcacggcttggactgccgaaaacctcgccgacctcaaagccgcgtggcagcagtacaaaacttcgccgtatatgcagccgtattcggtttcgcgtctggaacgcattaaatcgggcgaagaggtgttcaaggcgggctatgcaaaacgcgcaatgttctcgtacctcttcgcaaacctcggcgcggatttcgacgcaagcgacgcggtaaagttctcgctgcaacccaaccgattcaagcagtcgaatccctcgaagtgggcggagcttgaacgtaacggcttcaagagcatcgacggcgttgaaatcaccgcacccgaacgcctgtacgcgggctggtctacgcgcaacctcgccgtcgtctacgaaaaccgcgcggagttcgaaaaatggagcaaaagcgggcttgaagaaaacctcgcgcaaatgcgctcgttcctgctgaaagcggaagacctcgacaaggcgaaggctatctgcgacgcctacgaaagcgcaatgttgctttgcgaatgtccgaacgtggacaaaatccaaaccgtcggcaaggtgctgactgcccgcattgtggacgcgaagattgcgaagtaaatttaacctaaaaataaaggaaatcaacatatgaaaaaaatcatcatcacaactcttgcgcttgtctgcggacttggcacgtacgcaaaaacgctcgcggagcttcgcgccgaacttcccgcgtattccgacaacaaggaagtacgcgctgctcggctggcgtacataaaggaaaatgccgccgactttttgcgcgagttcaacgcgtgggcgggcacaaatgccgcgaagtttttcgcattcgaagagccgaactcgcaaatgacggaagcgcaaaaaaacgaagcctgcgaaatgcgcaagttcttttatgccgtctattgggtgctcacgcccgattgccccgcgaacacgggcttgcgacttgtgccgcagctttatatcaaaaacgcggaaagcgtgaatccgacgtactaccgcgacctcaaaacggcgggctttgaaatcgacggcgtaaagcttcctgcgatggtgcagattcaggttgccgcaatttgcggagacttggactatttcgcaaacctcgactggaagaacgttgacggcggcgggctgtttgcggcatcgcattttgccaaaaagatgctcgtaagtgccgacgacatcgacaaggcggcggcggtttgcgccgaatacaaacgcgctcttgtactcaacggcgcggcgaccgactcgcccacgcttgcggagattaagacggccgaaatgttcctcaacgaagcgattttgaacaaacagattcgctcgaagtaaacaacacgcttgcgggcggcttgtaaaccgcctgcaagcactctatataatactatggaaaatcaaaacaccaaccccgccaacgcggccgatatggcgacgttcttgggctatgaagacgtgccgctttcgcgaccgattggcgacaggaaaagcgtcaaagtaaaatgtctgcccgtacgggcgtttgcggaatatgccgcgctgttcgcgctcgaaagcgagcttgtggaatttgccacagacctcactcgcgaggaagtcgatatgttgcttcccgatgattcgggcaggattttcgagaaaatccacgagctaaaccgcgtcccttttacgggctggttgcggaggaaggcggcggcaaccaagcgtcaagcccagattcttggggcgagtcttcccgcagcggaaacagcggaaagcccgacgattggagagtagtctgcgagcttgtcgcgtggatatgcgccaacagcccgctcaaatgggacgacgttctggagctttcgccactgcggttgcggcacatatcgaaagcgatagcccgccgccgcgcccgcaacgccgccgcgatgttcgacgcctacatcgccgccaacggcgacgaaaaagccctcagtcgaatcaacaaaaacctgagggctacggaggaataggaagacagaggctatttcttgtagtagaccttgatgacaggcttgccgaggctgtcgttccatccgggaagacgggacagcaagcagagcaaataaatgccgagtccgcatccgacgatgtagagcaacgtgccaaaaagaatttcaaatatagtttccatatccgtttctgaacaaagtatcggatagttttttcgcaaaatcaacaaaaaacggacaaaaaatggctgaaccgtacaaaataaatgtagagacaaaagcccagcttgacgaaattcaaaagcttgtagaggaattgagggcaatcaacaccgagatttcgctgataaacggacaatccttttcggctatttcgatgtcggcagcggctctttcaaagacgagcaaagaccttttggctgctacgctcgcgaaccgaaaagcttttggatatatgtcgggagctgccgacaaggcttcaatcagttcgagacgatttcaggacgaaacgagaaaaacaagaggcgaggtagacgcgttttcttctacgttgcagggcgcatatatggaagtcggcgcgatgggaacgcgccttgcaacgcagcttccggcggcgataaagacgacaattcaagcgttcgggcggcaggagatggcggtgcagaaagtggcgtcggcgattcgctcgcagggcggggttgtgtcggaggtgctgccgattatgcagagcctcgcttcggaaatccagagcatcacgacatacggcgacgagcaggttttggaaatgcagtcgctcgcggcggcgatgggcgttgcctccgaccaaatggcggagacaatccaaaacgcaatcgggctgtcctccgcgctcggaatggacgtgatgacggcgacaaaagcggcgtccgctgcgatacagggtaagacaacggcgttgcaggagtacattccgtcgctaataaagtgtaagtccgaagccgaaaaactcgcgacggttcagcggctggcggcgggcggattcgagcaggcgcgagaccgcgtggacacgctcgacggcaagctcaaacaggcggcgaacgcttggggtgatttgcaggaggttgtcggcgaggcgttcgcgcccgcagtcaaaaacgtggcgggactgctcggcgggctttgcgaaatactgacgttcttcccgaccgtgacgaaagccctgacgatttcgctcacgtcgcttgcggtgggctttgcgtttacgaaagtcggcgggttgttgaaagtggcggattcgttcataggtcttgcgggcggagtccgcacgacgacggccgcgatgcacgggctgaacgccgcctgccgcgccaatcccttggggcttgtggcaagcgcggcgtcgctcgcgattatggcgatttcgtcgctcgccgagtacgcctcgaagctctccgacgccgaggacagggaggccgaaaagcggcaggcggcgtacgaggcccgccgcagggaattggcggaattgcgcaaggcggcgggaattatcgccgactacgaggcggagctgaaaaaggcgaacgcaacggcggctgaaaccgccgattcgattgaaaggctctcttcggaaatcgccgcgctcgaatcggcggaatcgaacggcgcgggaaacgcggtcgaaaacgccaagcggctcgtcgacaaaaagcgcgagcttgtggtgcttcaaaaaaggtacgtcgaaagcgtaagggctgccgccgaagcggagcttgcgtttgcgtcgaaccgcgagaccgagcgcaaatacgcggtcgaaaaagacctcgacgccgcgcggaaggcggggctgacgcacgcggtgaagttcaaggaggctgagcttgcgtatgtggagcagttgcggcaggctgcggacattcagaaaaagtactatgccgaccacgcgcatttggtggagtcggaggaagaccgcgtgaggattatgggcgaggcgaaatcgtacgccgaaatgcggctcgggcaaatgcgcaacgaagccgacgcggaaaagtggcttgcggcggagactgcggcttcgaagacgcgccagcagggcttggaaatggacattctccgcgccagagcttcgggcaacgaaacgctcgcgaaagagctcgaaggctcgcagcgcgtcgcgcagctcgcctccgaaatcttcgaaaacgcccgccgcgagggcatgagccgcgacgagcttgtagatttgcaaaattccgcaaacgcgcaggcccgcgaacgctacaacctcgaaaagtccatcaccgacgaagccgagcggcagaacgccgcaaaggacgcgcaggcgaagattgaggacattttgctcgaaaacaaaatcgaacagttgaaggcgcagggcaaaatggcggaggcgcaagccctcgaacgcgaaaaccaaatgcagcgcaagctcgacagcatgcagggcgtgtccgacgaggacaaggaaaagctccgcgcaacgatgcgccaaacctacgcctacaaagacgcgcagcgcgagcaggcggcgagcggtttaaactccgttcaaaattcccgccgctcccccgcgggaaacggcgcggacgtgtcttcggcgttggcaaggaaaaattcgatgatggcgggcggaggcttcggaggcggcttcggttcggcgggaggttcgtcgcgccagagcggccgccccgcgacggtctccgcaaaatacggcgacctctacgaccaatggaaagcggcgggaggttcgaagtccgggcaaagctggacggcgtttcgagatgcaaacaaggacaccctcaacgcccacgcccaaggcaaacaaaccgcaggcgagcggaagatgtcgaacgatgcccaaagttgggttgccaaaaacagcgcgaccgcgcggagagtttcgggtgctccgcagggcgttgccgaaaccgcaaaggcggcgcagggcaattcggcaacgcgctcgaacaagagtcaggagcagcaaaagccgcagctcgcagcaaaccccgccctcaacgaaaagctcggcgcaatgggcgcaagcacgggcggcggctcggacgacaacaaggcgcagtcgctcggcgaaatcgcctccgccgtcaaaacgatgtccgaaaccctcgaaacactcaaaacaacggtctccgcgctcgcggagcgaaaggccaaataatatgctcgacccgcaaaacgacttcaactttccctgctacgacgacaccttccgccgcaactacttctttaaggagtatcgggatttcggggaatatttcctcgaactcgactactggattatgcgcgaggcgttcgtgtcgcgaatcggcagccctctgaacctcgaccaaacccactacgacacgggcggacgcggcgcgaaaatcttccgcgacctctccgagtccgaacgcgcaacgctcgcctcgcgagggtattttctgggcgacgaaacggtcgaatgcggaacgtcggcgttcggcgacatctaccacgtcaccgagctttacgtctacgtccccaaaagcggcgcggacagcaaggttttcagctcgtacacctcggaggtcgtaaacttccccgcgctcgtggatttcgattacaaccttgttctgacgtataaattcaacgagatgacattcctctgcggcttggaggaagtgggcttcgcaaccgacaagcttgcaatcggagacgagtttttcattgaacatcctgaggaaactataaatcgcacgataatctacgagtgccgttcgtcgatgatggcggtgtcgcgtcgcgagggaaaccttgtcttcgccaaggcctcttcgtttgtcaacccctacaacggcaactcatacacggcaaaggccgtactgtttgactatcgaaacatagacgggggaacgttgcgggtgaaaatgccgacgaaaaaatacgcggaaaggtcgttgcaagtgtccgtgcgaaaggaaacggcgttttttgcgtcgaagcccgcgattcgcgaaaagttcgcggcaaaagaccaactgacgggaatcgaaacggggcaaatagattcgggaacaacgccgacgttcagccactacaaaaacgaaatgatgggcaagtccgccgaaatccgctccgcgccgtcgacggtcgaggaagtctataaaggcctctggcggcgcgacgatttctacacagtggcaaggtgagtgaagccgccaccgacgctctatataaaagacggcaaaaagtgccgagcaagataggcggcgatcaacggcggaatcggggcaaacttagaaaatcaagacagcattttcaaaggaacgcccgcaaacttagaaaacgccgcaaaaacgcccccacaaccccgaccttgcaaacactccgcaaagacaatgcagcccccgcgcaaccgatttgcaacgggggcttccgcaagacgaaaaatcacaaaaatggtcaaacgtgtggcacgcttacgtcaaaccttctggcgcgatacagagaatcccgatgtcgtaaaaatcagaatcgacaatacggcggaaaaggcgaaggggtatgtcgtgccccgaagtgctgtaatcgccgaatttagggcactggtcgatgcggcggcaaaacagtatccagctctgaaaggcaaagccgatttcattatgttcggcgtgtccgaagagccgtacgcttcgtacaatcccgagcttcgcaaaaagttcggtttgaagcgcggcgcggaaagcgactggacggcgttggggcaaaaaactccgcgtttcgacaaccgcgttatcgacaaatgcaaactaatcccgcgtcttaatgtctgcaaaatcaagccgcttcccgaatgcaggacagatgacgatttccttccgtacgaaacaactttggcgttgaaattgctgaacttgcgcttctttagaggtgcgggggtggattcgctttctttcgacgaatttttgcgcgctttcgaaatcgcgaaaaacaacaagttcgaactgaacaagacgaaccttaagaagtttttcaagagcatcggcgcggaggtaatcgacgagagccagtcgaaaatcgagcagccgcgaagttcgggcagggcgtcgttttcgcgccccgcaatgcgcattttgcgcaaccttgttttctcgggaaagtcgcccgccgagttttacgaaaccgaactcgtaaaaataacaaatacggacaaaaacagggggatagtagcggaagatatcaagtttctgaagcttatggggaatgttccgtggggcggcattttcgttcccgatgtcggtgtattcgattttgcggattcgaccgaatgttcgcgcgccgttcaaatcaacaaacttatcgggatgcaaaacgacccgattgtacgccacaggttgtcgttcttttacggacggataaaatcgctcgatgcggaattcggtacgcccgacaaaatcgttctcgagtttgtgcgcgacgatttcctcggcaaaaaggcgaaagccgatctaagcaaggcgataaacgaccgcgcaaaggagaagaaaaaatacgccgaagagttggattcgcagcgggaaaacttcggcccgaaatacgcctcgaaaaaaatgctactcaagtacgagctgtactcgaagcaaaaaggggaatgtatttatacgggcagggcgttgggattttccgacctcgaacagctcgaggttgaacacattgttccgcgcagtcgcggaggccccgacgcgctctacaactatgttttgaccgacgagaaaacgaacaaagacaagggcgaccgcacgcccttcgaatggctttcgtcgaaaggcgtcgagtgggacgcctaccgcgacagagtccgcggcttgacgaaagaattgggcgcaaaacgttgcaagcttctgctttcgcccaatgccgaagagcttgtcgaaaaatacacggctcttgccgaaactgcgtggatttcaaagcttgcgcagcgcatatgctgcatccatttcggcttccagttcggcggtctgacgggtgagaaaaaggtttggactgtctcgggcaacactacggcgatgattcgcagccgctacgggttgaacaggcttttgcacaacgaggacgtgccgaaagatatttcgctgtccgaaaggctcaagttggaaagcgaattcgaaaggaaaaatcgcgacaacaaaaagcaccacgctctcgatgcgatgtgtctttgctatgcgccgacatcgaacacgaggagggcggcttcgtacaaaaacattctgcccgccgaaattacgcgaaatccggaaagcgacgaagcccgcaggttcttcggcggatatttggcgaacgtcatcccgaacaaggtggcgatagaaaaaccgacgctcgaacagacgatttacgcaaagcgtctaatcaacggaaaggagaccattgtaaaaaaatgcaatgtgcgcgatttggcttatgcggggcggaatccccaatacagttatctaacattggttaaaaatataaaatgtattgtcggaaaagtttcaaagaacataatttcagattttgtgttgtccaatcctgatttaaacgagtctgaatgggaaaattggtgtaaatatgatgccgtaatcccgtcaaaaaacggtgcgccgacaaagttactacgtgtattatgcggtgcacgcaatccagaagaatacaaggatttgtcgaaagacggttgtggcgcgtatcgcaagggcaacttgcacaaaggtcagttcgtctggaaaacaaaacaggggtgttatgtggttacaccagtgtatgcatttgaatcgaagataaaagtttgggatgatatgcggagagacccgaattgcgaggaaatctgcgggttctttaggcaaaattgtctcgtggaaattccgaacgacgtttacgatagcaaaggggtcttgaaactcaaggctggtgtttatcggtcaaatacgattcgggctgatgggttcgtgaaattaacaaattcagacggattttcgccgaatcccatttcaattcaatacctgatgtctgcggggatgaaacgcataacattaaatacaatataatgagttatcatattctgcacgttatggattacggctgcaagctcgtgcgcgagcgcgggttgcttgtctgtaaaaaagacggcaggatattggggaaaattgcgttggaagatctccgcgccgtcgttcttctaaacggcgcggtgtctctcagcggcgacgtcatcgcggtactggcggaatgcgacgcgatagtggtacattgtaaaaatttcaaacccgtcggaataacggttccgaacaatcgtacgtacgatacaaacgtcgtgctcaatcagtcggcggggaataaaaacctcaacggcgcaatttggcggcggttgcttgctgcaaagattcgcaacaacgcggaatgcctcaaacaaatcggaataaaaaaatgccgtcttttttcgttggcgcaatcgcaaaacggcttgtcgaacgaatcgctctgcgcaagagagtattggaaacactacttcccgatgctcggcgaatacggcacgggacgcgatccgaaaaacgaaaattcgaaaatcaacgtgttgctgaattacggatacggaatgatgtcggcaatcatccaccgcgcaataataatttcggggcttaattgtctgctcggcgtaaaccacaaaacgtattacagaaacactccgctcgtgcacgatgtaatcgagccgtttagggcgtttgtcgatatcgcgctgtacaattttgcgatgtcaagcggcgatatttctattgttccgtggtcggttttcttcggaaaatttctgcgcgacaaacgcgtaaagaagggcacagtttccctgaaattgtgcgatgcgcccgactatctttgcgaaacgcttgcaaacgtctaccgccgcaaggattccgatgaattgtggacgccgaggctatgacaggaatgaatcctaatttgtatgtcgaacaaaatcgaaaagaggagtccgtatagaatgggttggataatggcgatgttcgatttacccgtacttctcgacgaagaacgcaaggaggcgacccgatttagaaacgcattgctcgacgacggatttataatgattcagtattcggtatattcgcgcccgtgcgtgtcgctcgagcggatgaaaaagtattacgaacgcgtaaaatcgtacgcgcccacaaccggcgacataagacttctgttttttacagacaaacaatgggcgacgagcaagcttgtttgccgtcgtccgaaaacgctcgaaaaagttcccgaacagattgaattttttacggagcaaaagggtatgctaaaaccgaagccccaaccgaaatacgggcttgaccaaaaagacaataactttctgttgttttgagtaaaacgaccgaagcaaaaaaaatgccgaatttcaaggtactatgtagagcttgaaattcggcaaaatcagttaagactttacaacaaaattgtgaggtaattgtctaacacactgtaaattgtgtcaagcataatctaagaaagaacactttgctgtaaagtcaaaacttcgggtgcagctcgttcacggagaccgaaaatctaagaaagaacactttgctgtaaagtcaaaactattcttttgtatctgttgttttattgttttaatctaagaaagaacactttgctgtaaagtcaaaacagcccccttgatgtccagataaaacgttaaaatctaagaaagaacactttgctgtaaagtcaaaactcgcagaactttgaccacttgcaccattcgaatctaagaaagaacactttgctgtaaagtcaaaactcctcgccagtgatttcgatgacatccttcaatctaagaaagaacactttgctgtaaagtcaaaactttagctctctctgtttgcactcaatctccaatctaagaaagaacactttgctgtaaagtcaaaacaaaatagtatttcattcggataatactaacaatctaagaaagaacacgttgctgtaaagtcaaaaccagttgcgtgttgagcgtgccgaaagtcttaatctaagaaagaacactttgctgtaaagtcaaaact

SEQ ID NO: 3240 - DNA, 14191 bp, synthetic construct
  misc_feature 1..14191: note = Synthetic
  source 1..14191: mol_type = other DNA
agattgcctcttgtctcgtgggctcggagatgtgtataagagacagtatgttaactgcgcaatagtttgcgcactttcgacattgccgtactcgtcttttcacaacatcacattttgcaaaaattacaactcttttttgcgaatatttgccgccgcggtgcgctttttttggctcgactaacgcaaaaaatcggtcgaaaattccgaatatgtcaatcgaaaatgcactgaaaaattttgagaaaaacggtttcaaaacccgccgtttcgccactcccgaagaattgcgcgaatttctgaaagcggaaataaaagacacaagcgtcggaatgggcggttcggtaactctcggagggttgcaagtctacgacgcgctaaaggatgcgaataaaatctactggcattccgtcgataagtcgcccgaaattttcgaaaaggcggcactggcggaagtgtacattttgagcgcaaacgccctctccgaaagcggggcaatagtcaatatcgacggacgcggcaacagggtctcgagtgcgatattcggggcgaatcggaagaaggtgatctacatatgcggtgtgaataaattcgaacccgacctcgaaaaggcactctggcgcgcgaagaacatatccgcgccgatgaacgcccgccgactgaacctgaagactccgtgcgcaataaaagccgacaaatgctacaactgcaacagcccgcagcgaatctgccgaaccacgactataacgacacacccgacaagcgcggaaaccctgctgttaatagtggacggcgactggggctactaaaaaattgtcttcagcccgacgaactcctctttagccgaatatcgcattttcatattcggatgttgcttttttgttcgtagatgcggataaaaaagcttgattgtttccaaagtgtaaataatgaataattatattcattgaaatcaattttatattcattatgggaactaaagagattgtttgggggttcgatatcggaaagggctcgctcggggaggctgtcagaatcggaaacgagtttaagcacgtgcagtcgctcgagattccccccgagtttgccgaaacaaaaaccgccgccgcgctccgccgagcgtggcgcacgcgtcacgcccacaaggcgcgcgagttgtggctcgagagatgtctttcaaatgcgggtatcgaagttctcgggcgcagaaaagtcgatattgtcggcggtcgatggaagctcgtttccgaaggcgacaggcgtcttgaacgcgagtttcccgccgacggcgaggattgctgctacaattcgatagcgttgcgctgcaaattgctgctcggcgaaaagctcgaaagttggcaggttttcaaggcgttgaattcggcaattcagacgcgcggctacgacgcgaaaatcccgtggggaaacgacgacggcaaaacgtcggactccgcgaaagggggaaaatccgaagcggcgaaagaggaggaatcctatgcggaaaagctcgcgctgtatgaaagggaattcgacgggcttcttgcggaggtggacaatcgcaaaaaatacgatttcccgtgctttttcaaggcggcgaaaatcggcttgtggtcgcccgcgaatcccgatgcggtgaaaatcagaatcgacaacactgcggaaaaggcgaaggggtatgtcgtgccccgaagtgctgtaatcgccgaatttagggcactggtcgatgcggcggcaaaacagtatccagctctgaaaggcaaagccgatttcattatgttcggcgtgtccgaagagccgtacgcttcgtacaatcccgagcttcgcaaaaagttcggtttgaagcgcggcgcggaaagcgactggacggcgttggggcaaaaaactccgcgtttcgacaaccgcgttatcgacaaatgcaaactaatcccgcgtctcaatgtctgcaaaatcaagccgcttcccgaatgcaggacagatgacgatttccttccgtacgaaacaactttggcgttgaaattgctgaacttgcgcttctttagaggtgcgggggtggattcgctttctttcgacgaatttttgcgcgctttcgaaatcgcgaaaaacaacaagttcgaactgaacaagacgaaccttaagaagtttttcaagagcatcggcgcggaggtaatcgacgagagccagtcgaaaatcgagcagccgcgaagttcgggcagggcgtcgttttcgcgccccgcgatgcgcattttgcgcgaccttgttttctcgggaaagtcgcccgccgagttttacgaaatcgagcttggaaaaataacaaatacggataaaaacaagggtatagtagcggaagatatcaagtttctgaagcttatggggaatgtcccgtggggcggcattttcattcccgatgtcggtgtgttcgattttgcggattcgaccgaatgttcgcgctccgttcaaatcaacaagcttatcgggatgcaaaacgatccgattgtacgccacaggttgtcgttcttctacgaacggataaagtcgctcgaggcgaaattcggtacgccagacaaaatcgttctcgagtttgtgcgcgacgacttcctcggcaaaaaggcgaaagccgacctgagcaaggcgataaacgaccgcgcaaaggagaagaaaaaatacgccgaagagttggattcgcagcgggaaattttcggcccgaaatacgcctcgaaaaaaatgcttctcaagtacgagctgtactcgaagcaaaaaggggaatgtatttatacgggcagggcgttgggattttccgacctcgaacagctcgaggttgaacacattgttccgcgcagtcgcggaggtccagacgcgctctacaactatgttttgaccgacgaaaaaacgaacaaggacaagggcgaccgcacgccctttgaatggctttcgtcgaaaggcgtcgagtgggacgcctaccgcgacagagtccgcggcttgacgaaagaattgggcgcaaaacgttgcaagcttttgctttcgcccaatgccgaagaacttgtcgaaaaatacacggctcttgccgaaactgcgtggatttcgaagcttgcgcagcgcatttgctgcatccatttcggcttccagttcggcggtctgacgggtgagaaaaaggtttggactgtctcgggcaacactacggcgatgattcgcagccgctacgggttgaacaggcttttgcacaacgaggacgtgccgaaagatatttcgctgtccgaaaggctcaagttggaaagcgaattcgaaaggaaaaaccgcgacaacaaaaagcaccacgctctcgatgcgatgtgtctttgctatgcgccgacatcgaatacaaggagggcggcttcgtacaaaaacattctgccagccgaaattacgcgcaatcccgaaagcgacgaggcacgtaggttcttcggcagatatttggcgaacgttattcccaacaaggtggcgatagaaaagccgacgctcgaacagacgatttacgcaaagcgtctaatcaacggaaaggagaccattgtaaaaaaatgcaatgtgcgcgatttggcttatgcgggaataaatccgaaatacgatttgggaaagttgaaagacagaatacgggacattataaatcccgtttccaagcgcgttatttcggactttgtgaactccaatccgaatctgagcgagtcggagtgggaggattggtgcaggcacgaagcgtctatcccgtcgaaatcggacaaagcaaccagattgctgcgtgttcagtgtgcggtcggcgatcccgccgaatacaaggatttgtcgaaagacggttgcggcgcgtaccgcaagggaaaatcgcacaaagggcaatatatttggaagaccaaagacggtcgatatgtggttactcccgtttatacgttcgcgtcgaagataagggtttacgacgacatgcgaagagatccgaattgcgaggaaatctgcgggttctttaggcaaaattgtctcgtggaaattccgaacgatgtctacgacaacaagggggtgttgaaactcaaggccggtatttatcggtcaaacacgataaagacgaacggacaggttaatctgactacacccaacggaataaagtttaatggtatttccattcaatacttaatgtctgcggaaatgaagcgcataacattaaatacaatataatgagttatcatattctgcacgttatggattacggctgcaggctcgtgcgcgagcgcgggcagcttgtctgcaagaaagacggcggaatattgggaaaaatcgcgctggaggatctccgtgccgtcgttcttctgaatggcgcggtatccctcagcggcgacgtaatagcggcacttgcggaatgcgacgcgatacttgtacactgcaaaaatttcaaacccgtcggaataacaattccgaacaaccgcacgtacgacacaagagtcgtactcaatcagtcggcgggaaacaaaaacctcaacggcgcaatttggcggcggctgcttgctgcaaagattcgcaacaacgcggaatgcctcaaacaaatcggaataaaaaaatgccgacttttttccttggcgcaatcgcaaagcggtttgtcgaacgaatcgctctgcgccagagagtactggaaacactactttccgatgctcggagaatacggcacgggacgcgatccgaaaaacgaaaattcgaaaatcaacgtattgttaaattacggttatggaatgatgtcggcaatcatccaccgcgcaataataatttcggggcttaattgtctgctcggcgtaaaccacaagacgtattacagaaataccccgctcgtacacgatgtaatcgagccgtttagggcgtttgtcgatattgcgctgtatgattttgcgaagtcgggcggcgatgtttcgattgctccgtggtcggttttcttcgggaaatttctgcgcgacaaacgcgtaaaaaaaggtgctgtttcgatgaagttatgcgatgcgcccgactatctttgcgaaacgcttgcaaacgtctaccgccgcaaggattccgacgaattgtggacaccgaaattatgacaagtacgaagccgaatttgtatgtcgaataaaatcgaaaagaggagtccgtatagaatgggttggataatggcaatgttcgatttacccgtgcttctcgacgaagaacgcaaggaggcgacccgatttagaaacgcattgctcgacgacggatttataatgattcagtattcggtatattcgcggccgtgcgtgtcgctcgagcggatgaaaaagtattacgaacgcgtaaaatcgtacgcgcccacaaccggcgacataagacttctgttttttacagacaaacaatgggcgacgagcaagcttgtttgccgtcatccgaaaacgctcgaaaaagttcccgaacagattgaattttttacggagcaaaagggtatgctaaaaccgaagccccaaccgaaatacgagcttgaccaaaaagacaataactttctgctgttttgagtaaaacgaccgaagcaaaaaaaatgccgaatttcaaggtactatgtagagcttgaaattcggcaaaatcagttaagactttacaacaaaattatgagataattgtctaacacactgtaaattgtgtcaagcataatctaagaaagaacactttgctgtaaagtcaaaactcattttgaattattcacgggtttcccgttaatctaagaaagaacactttgctgtaaagtcaaaactaaccgaggctacgaacgcgggcaaaacacaatctaagaaagaacactttgctgtaaagtcaaaacagcatacgcgcggggtattgcgtccacggtaatctaagaaagaacactttgctgtaaagtcaaaaccagcgtcaaaatcaacttggccatcacgccaatctaagaaagaacactttgctgtaaagtcaaaaccgccccgaccaacaatttgtcgtcggtcaaaatctaagaaagaacactttgctgtaaagtcaaaactcagccattcgctcatcgtcggagtgaaccaatctaagaaagaacactttgctgtaaagtcaaaaccaaccaagcagccgaaagcattgcgaagtttaatctaagaaagaacactttactgtaaagttaaaatttcggcgagttccgttttgttttgaccgtcattgtattttatgtatcgttcgcacctgtatgaatgctatcaaatcgttttttattgctatactctgctcgttttccgcgctctcgctcggcgcggtcgaaaaacactcctacgagggcgacattgtcatttacggcggaacttcgggggcggtcgtttcggcaatccgcgcggcgcagtcgggcaaaaaggtctttctggtctctcccgatgtaaatctcggcgcgatgtcgagctcgggtctcggaatgaccgactctggcaacactgccgcaatcggcggactttctcgcgagttctacaagcgcgtttatctcgagtacaaaaacagctccaactggtatgccgaaaagcgttccgacttctcggggtcggggcagggaacaaaggcgattcgcgaagacgacaaaactatgtggattttcgagccgcgcattgcccttgccgtctacaaaaaatggctcgcggaatatccgaatatcacaatccaccgcggcgaatatctcgaccgcgaaaacggggtcgagaaagtcggcaaaatcattaaatcgataaccacgctgagcggcaaaaagtattccgcgaaaatctttatcgacgcaaccttcgagggcgacttgatggcttccgcaggttgccactacgtcgtaggtcgcgaaagtaacgaaaaatacggcgaggatttcaacggctatcgcgatacgcttcggcagaacggtcaccacttcaccgccaaggtcgatccctacaaaatcaaaggcgacaagtcgagcgggttgctcaagtatgtgtccgccgaaaagccgcttcgcaacggcgcagccgacgacaaagttcaagcctacaactacaggctttgtttcaccgatttcgagccgaacaagattccacttcccaagcccgaaaattataatcccgccgactacgagctgtgcggacgttggttcgaggcgtaccccgacgcgttcccgcttatcatctcgaaaatgccaaaccacaagaccgacatcaacaaccgtcaggcgttttcgaccgacttcatcggcgaaaattacaactatcccgaagcgtcctacgaggaacgcgcaaagattgtgaaagcccacaaggagtacacgctcggactcttccacttctggatgaccgacccgcgcacgccgcaaaaattcaaggacgcgataaagaatctcgggcttcccaaagacgagtttgtcgacacgggcaactggccgttctacctctacatccgcgaggcgcgcagaatggtcggcgactacgtgctgacccaacacgattgccagaattcgaaagtctcgcccgaacccatcgggatgggctcgtacacgctcgattcgcacaatacttcgcgttttgtcgacgagaacggattcgcccagaacgagggcgacgtgcagcgttcaataggcgcgacgggcgcataccaaatttcctacggaacgattattcccaagcgcgaagactgccagaatttgttcgtaatctgcgcggtttcggcatcgcatatcgcgtacggttcgctgagaatggagccggtatttatggtgctcggacactccgcggcggctgcggcggtgcagtgtattgattcgggcaaagtggttcaagatgccgaccagtgggacttgaaaaaaacgcttttaaaggaaaaacaaatcctctggttgccgaagaaaaagaaatagtcggaaatccgaaaatgagagccgccgcggaaaacttcgcgacggctttttttgcgacgtttccacggtttgattagggcgattggcggcggcgttgagcgcattggcgggcgtttgcgccgcgatatggttgctcgcaaggcggaagcggcggacggcttcacggttgacgacgcgcggactttcgacgcggaaagcaacattcgcgacggtatgggcacggtgcgcgactatgcgcatttcttccgaaacaaggacatcgacgaggcggaggcttcgggcaaggggcttttgtcgcgcgagaagggaaagcgcggctgggctatcggcaagtttgccgaggacaatttgtattggctgtaccgcaacggcggaatttccgaggagcgggcggcggctgttgcgcgcggcgcgcccaacgatgcggacgttcagaatgccgcgctcgattcggcaaagggtatggacgcgaccactcttgaaatccacacgcgcaggctcaaagcctttaaggacgagggcggcggcaatgcttcgggcgaagccgtgcagggcgacctgttcggcgttgacgattcggcgatgcgtgaaatggttgcgctttcgaaagcggcgggcgagcttgtgaagcagaacaagcagaggatattggcggtaaagggcgtaatcaaacgccccgagattgctcgcgagatgggcgttgacatcaacaaccccgacgcggtgcgagccgcagtagccgaacttgaatacgagaatagcaggttgatgagtcccacgcccgaacccgaaattatggacaagatacgccgcaaggcgggcttgttcgataaagcggagaacggcgaaaatatcgaacagggagcggacgatggcaatcgggaagatacgggcggtttgttcgacgacggcacggctgagatgagtttcaagggggcgataaggcggaaaaaatggaatccgaccgacgcggaaataaaggaagtcgagcgtcagatgaaagaggtgaaagccaagtggacgaatcccgacggttcgaggaagaaaggctacctttgcgccccgaacgggaaagaaagcaggcttgcagagaaacagtggcttgccgttcgtacgccgttctttaaggaatggttcggcgattgggagaccttgtctattatcaacgaggttgaaaatatgcctgccgaaaagcttacgttgtcaaacaaggaatactcgcaggaagaggcaaagaagttatttgaatcgtttgggacggcggtaaatgaaagaaatggagagtctgttaaattccctaattcgagtgtcggcaaaatcataaggcacaaaggttttcccgtcggcgcggttatcggaaaattcaaatctttgtttgagtcttcgattttggcgataagcgaaaaggaaacattgaaagaagggcacaaacagcacccgaattatttagggtacgagcactacataaacaagttcgaaataggcggtaaggcttattatatccgctttactgtgcccattgaaaaggcattccctaagacaataagggaaggatatgttcagagaagtgttcattcttcgcgaatatccgaaatatccatatacgatggaagctcccaaaatgagaaccgcaatactacgacggggataatgggagcttccttaattgacgacaagctttgggatttcttaaacgctgtcaacaaaaaagatgtttcgcaagtggttgatgagaacggcgagcctcttgttgttttccacaacacgccgaacgaatttaccgtgttcaagccttccgagcgcggcaggttcggcaggggtatttatgcgacttccaaccccgaagattcgagctacggcgaaaagtggaatatgatggcgttgtttgcaaatgcccgcaagctacgcaatcctatggagaaagtccccgtggaatttttgcgcaagttgcagaagcaagccgaggattatctgttgaaaaatccatccgaagtattcgtcgggaagaaagaagctatgcttgatttctatttcggaaaaaacagaaacgaaattttccaacatagctttggttcgctttactggaacaatctaagggataccttagaccaagtaaacgcggtgctgggaagcaatttcagcatcgatgcagacggctttgtaatagaacgcgaaaacggcggcaaatggttcaactttttcgaccgttcgcaggtgaaatcggcaacaaacaatgtaggaacgtacaacagggaaaaccccgacattcgcgcgagtttcggcgtgaagaacaaagcttccgacaatggcaacgctgacaatggcggcaatgtcggcggcggggtgtcgttcgcttctatggcggaggagtacaacgtattgcgcgagcttcgcgaaaagactgtcggcgagaagccccttacgtttatccgcccagtgtcggctatgcgttcggctctgcccaagtccgttcgtttcaacaaggcggacaacaggttggagggcgtgccgtccatcggcgacatccgccgatatatggagcgcgttttcaatgttccgattgcaaacggtcttcgcaaggaagttcgccagcgcggcgcgctcggcgtttactatgacaggcttgaagctatcaggactcttcgcgggcacgtcaacgaccttgacactgttgcacacgaattggggcattacttggaaacgctctttttcggcggcaagttggcaagcgaagaggcgaaaaacttcgcccttgcaaaggagcttgaagactactgcattgagcgtttcggggaattttcctacaaggggcgcgagcgaatcggcgagggttgggcgcagtttatttccgacgtaataaagggcgataaaaccgttgccgaccgttgtccgcgagcttttgcggcgttgaacagcgcgttgagggagtctccccgcgtgaatgaggcgtttggctttatttgccagatgactgagctgaatgcgaatgcttcgcctttgcagcgtgtgaatgcgaacattcgcaggcgttcggacggggtgcgcaagactgccgttgacaggcttattgaaagcgggcgttggtttacgcgtatgtggtttgacgagtacgagggattggagcgtttccagcgcgaccttgagcgaagcggcgtgagcgaggaggacggaagcagggttataaatcttgcgagaaactatgcgggcggttctgtggggcaggtaaactattcccttactgtaaatcagattgaccttgacgggcgtattgtgggcaagtctttacgcgcaatcttacgcgacaatttgaagactacctacgacaaggacaacattgacgcgtatttgatgtgtcggcgtgtggtggagtattacaaaaccgaggagcgcagaggtgagcgtggcggaagcaggagcaagtttggcatagattatgcggacgccgtggacgttgtttcgacggcgaccgacggaatgcgcaaatgtgccgaggagcttgacgtttatatctttatcgccaagtttcccgccgatttgcttcttattatcagcgttctgccttttaactccgcggtggcgtttttgccgaggtttacggatttttcgccgaccgacagcgttgcgtcgtcggagaaatagaggatgttttttttgaaaagccgcgcttgcgaggcggttattttcattatgtttttcttgccgaatacggtcatcgaaagcccgactatttcgaagtcgagcggtcgcggaaatcgggctttgtcgagttcgtcctgcgtcagattttgtgcgaatacgtcgagccgcaggtttgttatcaccactctttgcggcacgtttaccccgaacgcgcttttgcccgatgcgacggaaattttgtcgaacgagattccgaacacctgcgcccccgccgagtttcggcagacggtatcgacattttcgagatttgcggggttgagcagtgctgaaaagtcgtaccctgccgcgccgaagagctgtgttgttagggataaaaacaataccgatagcgcgaagacttcgaatttctttttcacagatttctattttttcgtttctgcgggatttttgtctttgagcatatgcgcgcgctcaatacacaatgtatcggcgtgggttatcacgtttatatccgagcaagttaggactttgataatcgttgtcagcacgatttttacgtcgttcaaaaatgttatgttttttacgtactttaaatcgagggcgaatttctcgtcgtttgtaagattgtttctgccgttgatttgagccaaccccgttatcccggggcggacatcgtggcggtggtgctcttcctccgtaaaatacgggaggttcataaccaccaacggacgcgggccgataaacgacatatcgcctttaatgatattcagcagttgggggatttcgtcgaggcttgttttgcgcagaaaggaaccgaattttgtcagcctcatttcgtcgggcaacagtttgccgtctccgtctttttcgtcggtcatagaacggaattttatgacatcgaagattttttcgtttttgccgaggcgcggctgcctgaatattacaggtgcgcccaactgtgtgcggatcaatacataaagaaccgccaatgcgggcaacagcaacacaaaaagcactgacgcccccaccaaatcgatgacgcgtttgaaaaatttagcgtacataatattctcccagtttgaatgttgtattatttgggatacggtaaaccttgtcgagattttttaggcttggggggggatttttgttttttttgcgataccctcttgacgggtttgttataaatgtagctatgttcggttgtatattttgcagttttgcctctttgattgtcgcggcgggctgtgcgctctgcctgtttgccgcaaagcttgtcggacggaaagaccgttcgaaacgttcgaagtaggttttaacccgccccgactgcgggcggagtgtgtccgcattttgcggcggcgcgtctttgcgcagccgcttttttttgcggaagcggattagtcgagcgtgtcggcgaaaatttcggcgacgtgcctaactttcacttcgtcgccgtttagcgcgagcatattcgaaatctgcatcatacacgcgggacatccgcacgccaccgttcgcgcgccgcttgccacgatattgttgcgtttgcgcgagccgatccgtttcgagatgtcgtagtgcgtcagtgtgaagcttccgccgcacccgcagcatttgtcggcttcgttcatttccacgaactggtagtcggcgtttgccttgagcagtcggcgcggctgttcccagattccgagcgacttcttcaagtggcacgaatcgtggtaggtgattttttcgggcgcgacgccgtgcgacttcggcgagaggtccaccttcagcacgtcggttaggaaggcgttgatgtcgattgcctttgcgccgattttccgcgccttgtccgcgtattgcggcggggcgtacttcgcccagagttcgccgattgtttcggtgcacgaggcgcaggcggttacgatgtagtcgaagtcgtttttcgcgattatgtcgatgtcgtggacgagcattttttcgaagcttggcacgtcgcccgaggcgagcgcggggattccgcagcaagccagattcttcggaatgcgcacgcccacgccgaagtgtttgaagattttaagacaggcttcgctcacgttcgtgtagactttgtcgccgacgcatcccgtgaagaagagcacttttattcccgacttgcccgcggggatgtcgaggtcgccgtatttttcgccgatggaaaatttcggcattacgggcagtcggcggtcgccgatggcaagtttcatcagcggtgcttttgcggtgtggggcgcgtttttttggtcgcgcataaagagcgggtggaagggtcttcccgccttcaccagaaacgcgaaaagcttcgggttgcagagcatcacgcggaaggcgattttctttatcgggttgagccccatatactgcgcggagatttcgcgcgcgcgcataaagatgtcgagaatcaacacgcccgacgggcacgcgctttggcacgagccgcagagcaggcagcggtcgaggcgttcgcggacggctttggggtcgtcgataagcccctgtgcgaggttcgagagcagggcgagtttgccgcgcgttacgtcggactccctcttcgtttcggcgaagacggggcagaccgactggcacgttccgcaacgcatacatttgacgaacttgtcgtcgagctgcgaaagttcg

SEQ ID NO: 3241 - DNA, 8491 bp, synthetic construct
  misc_feature 1..8491: note = Synthetic
  source 1..8491: mol_type = other DNA
gacatcgcttggattaaacccggtcccgacggcaggctttatgcaatcaatcccgaaaacggcttctttggcgttgctccgggaacaagcatgaagacaaaccccaacgccatgctctcctgcgcgaagaacacaatattcacgaacgtcgcccttaccgacgacggcgacgtatggtgggaaggtatgaccaaagagccgccggcgcacctcatagactggcacggtaacgactggacgcccgcgtccggcacgcccgcagcgcacccgaacagccgctttgcagctcccattgaaaactgcccctgcttggacgaaaacgccgaaaagcttgaaggcgttccgatttcggcaatcgttatcggcggccgccgcccgaagggcattccgcttgtatacgaatcgttcaactggacgcacggtgtatacctcggcgcgatgatgggttcggaaagaactgctgccgcagaaggcaaacagggcgaactccgctccgacccgatggcgatgttgccctttgcgggatacaatatggccgactacctcggacacctcgtcaagatgggtaagggcttgagccagactccgcgcttctaccacgtcaactggttccgcaaggacgccgaaggcaactttatgtggcctggattcggtgcaaatgcgcgcgtgttggcatggattgtcaaccgccagcacggcgaagcatgcgccaaggaaacggctatcggctttgtcccgaactacgaagacctcgattgggacggaatggacttctcgaaggataccttcaaggaacttatgtcctacgacgccgaaacggtttcggcacagccgcttaaggaagagcttttcgaacagcttccgcattcgctcaaaatcgaacgcgaagccctgttggagagactttccaagtaagacagtctgcaaaaataaaggggacgctcaaggcgtccctttttttgtgtccgttcgcaggtggcgacagtattcgccgcgggggcgggcatagccgttctttttgtctgttgcgcgcgtgcacaaaaaacaaagggagtgcgtcattgaaaatgtctgctttattttgtggcgtgcgggcataaaaaaacggacggcataaaaccgcccgtttattgcactgtgccccaaattagggcacacagcattataaaaagcttagttgtttctgaggaactttacgcacttggcgattagcggaacgttgttttcccagtcggattcgtattcgacaatgtagaagccgtcgaaaccctgtttgtcaagctcggcaagcattcccttcgtgtcgagcgaacctttgccgtaggggacggggtcgcggacgtcgattttgccgatagtcttgcagtccttaaagtggattccgccgacgtagcctgcaacttccttcaggctctggacggggtcgattcccgagcgcgcccagtgtccggggtcggggttgtattttatgtgcctgaggcctttgacgtgcttcttgaagaaatccgtatcccagaagggcgaaccgtttgtggcgtggtggtggataagaactgtcagaccgtatttttcgcaggctttgtcccacatagcccagtagtaaacggggtcttcaatcaggattctttcgcctcccatttccttgacgaactggcaggttttgtcgatttcctcctgcgttttcgcgtgcgttacgccgaagctcaccattttaagccccgcgtctttgagaacttttttcatatacgcgcgttgttcggcgttcattttgtagcccactttcacgttcgggtatttggcggaaagcttttgccccgggaagcattcaacgccgtcaagattgagcgacttgagcttttcgaccgattcatcgaaggcgaatttgtgcagcgaaaacatctgaacgcccacttttcgcggttgtttcggcgcgttcgcctgcgtttgcgttgtggttgcgcagcccgcgaacagggcggcaaacagtgtaagaagtgaaataagtttcttcatagaatctggactttaatttttagcgacgcccgtttgcaagatttttctaaaaaaactttacttatttattgatatacggtagggtgcgaacgtgctttttcaaacgcacggtaattcaaaacgaaagaatatatatatgatgaacagaagaaattttgtgaaaacggcggttgcgtctatgatgggcgcgactgtcgcaagaggggcgttcggggcggttaaagtttcggacgttgcggaaagttccgcgccgtataagtcgaaattcgcgccgcatttcggaatgatgaaagagagcgtcaaggggctttcgtttgaagaccagctccagtttttctacgactgcggtttccgcgccctcgaagacaacggtatgatgaaccggccggttgaagttcagacgcaaatcgcgaaaaaaatggagtcgctcggaatggaaatgggcgttttctgcgcgcacaccgaatggaagctttcctcttttacgggctttagaaccgacaacgaaaggcgcattacgcgcaatcccaaggcggttagggagaaccttgttggcgtaatgaaagaggctgtggaggtcggcaaacgcgtgaacgcaaagtggactacggtagtcgtcggcttggaagaccccgcgctgccgcccgaaatgcagtttgcaaacgtagttgacaacctcaggtatatgtgcgacgtctgcgcaaaatcgggcttgattatggtgctcgagccgctgaatatcgaaaaccacccgagcctgtatttgaagcgcattccgcaggcatacgcaatatgcagggcggtaaacagcccctattgcaaaattctcgacgacctctaccaccagcaaattaccgagggcaacctaatccgcaatttcgatgcggcgcgctcggaaattgcatacgttcaggttggcgatgtccccggacgcaaagagcccacgaccggcgaaatcaattataaaaatgtgttccagcacctttgggatacgggctaccgcggagtaataggaatggaacaccgccagagcgacaattctttggagggcgataaaaaacttctcaaggcataccgctctgtggacgttgcgtagcagcgggcgcgccgccgagcaaaaccgaagaggttttttaataaacttatttataaataaaaaataattaaaagactgttcaatttttcttgaacggtctttttttgttgttatcttcggtctgaaaaagtttttccgaaaaatgaaacattacaagtatgataaaatacgccgattcgagcgcgcgggaagaggacacaaaccgcttcttgatttttcgatgaagatggggcgcgtaaaataaaaatttttacgggaaaagaagaggaacaataacgacaacaaataaaaagaaacacatgacaacagagaacaatttatcgggcgacaaaccaaaaacgggcaagggaagcggccgcggcggcgcgcgcgtaggttccggaagaaagccgtatccgcccgaattaaaaaaaaattacacgcacaatccgcgttcgcccgactgatgttgaacgcgtaaaggctttttgtaagagtttggacgcgtccaaaaagaaattttaattttttttgaaaaagtccaaatttcacggaattttgtagccaactttttgcatttcatatagtccttatattccttatattccctttcgaaaatgcaaaacagacagatttcacacacgccgcaaaggcactaaaataggggcttccgtctcggaaacccctaaaataaatcagagccagctgtcaggcttgaactgacgacctgatgattacaaatcaactgctctaccaactgagctaagctggcttgattttatccgccacattcaatcgctttcgtgtcgtttggcaagcttttttttgttttttggaaattttcctcctatataaattatggagctggtatattgaactttctacacggttgatatacgcccgcaaaaatccgccgttttattcggtatgcaagaataccgaaatttagtcgaggcttgccgaaagcctgtcttccgattctttatcgccttgggaaactgaaaattttgtattgtccgcttgttttattgtatgacatccaataaaaagcttgattattatcgttgtattgatattagaatcaaagaagaaatgttttaattcatatcatggaaatgcatacggaacaaaaagtttggggatttgatatcggcaagggctcgctcggcgaagccgtgaggataggcaacgaatttaaacacgttttgtcgatggaaatcgacgaggattttgccgaaatcaaaacggcggcggcggcgcgacgggcttggcgcacgcgcgaggcgcacaaggcgcgcgaaacgtggctcgaaaaatgccttgccgatgcgggaattgaggttctcgggcggcgcaatgtcgatgtcgtggacggggcatggaaacttgtttcgcgcggcgacgaacggctggagcgcgaatttccagcctacggcgaaaacgtctgctacaattcaatcgcgctaaggtgcaagcttctgctcggcgaaaaactcgaaagttggcaggtcttcaaggcgctgaattcggcaatccaaaacagaggatacgatacacaaatcccgtggggcaatgaagacggaaagtcggcggaagcaaaacgctcggggaaggcggacgccgacaaaaagaataccgaagaggaatcatacgccgaaaggctcgcgcttttcgaacgcgaattcgacgaacttttggcggaaatcgacgaccgcgaaaaatacaatttcccgtgtttcttcaaagccgcaaaaatgggtttgtggtcgcccgaaaagccggacgatgtcggaatcagaatagacaatacggccgaaaaggcaaaggggtatgtagttccgcgcgcggcggttattgcggagtttcgcgctctcgtcgacgctgcggcaaaacagtatcccgcgcttgagggaaaggccgatttcattatgttcggcaaagcgggagaggcgtatgcgtcgtctaagtccgaacttcggcgcaagttcgggcttaagcgcggggctgcttccgactggactgccctcgggcagaaaacgccgcgtttcgacaatcgaatcatcgacaaatgcaggctcattccgcgcctgaatgtgtgcaaaatcaaaccgcttaaagactgcaaaacggaggacgattttttgccgcacacaacaacccttgctctaaagctgttgaatttgcggtttttcagaggcgcgggggttgactcgctttcgttcaacgaatttttgcgcgccttcgaaattgcgcgcgaaaacaaattcgcgctgagtaaaacgaatcttaaaaagtttttcaaaacgattggcgcggaggttatggacgaaaaccagtcgtgcgtagaatctccgcgcgatagcggacgggcgtcgtattcgcgacctgcaatgcgcctgttgcgcgacctcattttttcgggcaaaagtccggcggaattttacgccgaagaagcagccaaaataaaaaacaccgacaaaaacgcggggcttgtgcccgaagatttggctttcataaaacttatgggcgataccccgtggggcggaattttcgttcccgacgtcgatacattcaacttcgcaaacattcgcgaaagcgaacgcgccgacaaaatcaacaaacttatcggttcgcaaaacgacccgattgtgcgacaccgcctttcgttcttctacgggcgaatcaaactgcttgaggaaagattcggcatgcccgacaaaatcgtgctcgaattcgtgcgcgacgattttctcggcggcaaggcgaaaaaggaaatgcagcagggaatgaaaaagcggttcgaggaaaagaaagaactcgccgaagagcttgattcgcagcgcgcggaattcgggaataaatacgcgtcgaaaaaaatgctgctgaagtatgaattgtataaaaaacagcgcggcaggtgcgtatataccgacaacgctctgccgttttcagagcttgagaatcttgaaattgaacacatcttcccgcggagcaggggcggtgcggacgcaatgtataactacgttttgaccgacgaaaaaacgaacaaggaaaagggagaccgcacgccgtttgaatggctttcgcacgacaaaacaaactgggaaagttattgcgatcgcgtccgtaaactcacgcaatctctcggggcaaaacgctgcaagctgcttgtttcgccgaatgccgaagagctcgtggaaaaatacacggcccttgccgaaaccgcgtggatttcaaagcttgcgcagaaaatttgctgcatccatttcggcttccaattcggggggcttaaaggcgagaaaaaagtctggacagtttcgggcaatacaacggctatgattcgcggccgctacggtctgaatcggcttctgcacgacgaagaagacgcaaaggatttaccgctcttggacagaatcgtcaaagaaaaggagttcgaaaaaaagaatcgcgacaataaaaagcaccacgctttggacgcaatgtgtatttgttttgcgccgacttcgaacacaaaaaaggcgttgtcgcgcaaaaatattttgcctgaagaaatcgcgcggaaccccgaaagcgacgaggcgcggaacttctttgcaaaatatctggcggaagttgtcccgaccaaagtagcaattaaaaagcccgctcttgaacaaaccatatactcaaaacgcgtaatcggcggcagggaaacaatcgtaaagaaatgtaatgtccgcgatttggcattcagcggacagaacccgaaatacgatttcgataagttggtaaagcgcgtaaaggacattgtaaatcccgtttcaaaacgcgtgattgaagatttcgcaaaaaccgaaccgaccgaggcggaatgggaggattggtgcaagcacgaagccgcaatcccctcgaaaaacggttcgccgacacgcctactgcgggtgcttgtggaagttgggaaccccgacgaatacaaggatttgtcgaaggacggctgcggcgcattcagaaagggcgattcacacaaaggccagttcgtttggaaaaataaaaaaggacgctacgttgtagcaccagtctacgcgcatgcgtccaaggcgaaagttttcgacgacttacaaaacaaccctgattgctcggaaatatgcggatttttccgcacaaactgccttgtaaaaatccccaacgacgttgtggacaaagacaaacttttactcaaagcgggtttttataagtcaaatacaataaaaacagaagggcgcgtaaaattaacaaacccaaatggaatcatcacagaaataggcttgcaacacctaatgaacgcgggaatgaagcgggttgatacaaatacaatataatgagttatcatattctgcacattatggattacggttgcaagctcacgcgcgagcgcggcttgcttgtatgtaaaaaagacggcaggatattggggaaaattgctttggaggacttgcgggcggttgtgctcgtaaacgaagccgtgtcgattagcggcaacgtaattgcggccattgccgagtatgatacggtaattgtccactgcaaaaacttcaagccaataggcataacaattcccaacagcagaacgtatgacacaagcgttgttctgaaccaatcggcgggaaataaaaacctgaacgccgcaatttggcggaggttgcttgcggcaaaagtcagcaacaacgccgaatgcctaaaactcatcggcgtgaaagactgccgcctttttgccatggcacagaaggcgggttcgaatttgaacgagtcgttttgtgcccgcgaatattggaaacactacttccctcttttgggagaatacggagtgggtcgcgaacccgaaaacgaagattcaaaaatcaatgtgttgcttaattacggctacggcataatgtcggcaataatacaccgctcgattattgttgccggattaaactgtcttttgggggtaaatcataaaacatattacaaaaacacgccgcttgtccacgacgcaatcgaaccgttcagggcgtttgtagatttcgcattgttcaaatttttgacgacaaaagacgatgcgtcggtttcgaattgggcggtatttttcggaaaatttttgagggacagacgcgtcaaaaagggaacggtttcgatgaaattgtgcgacgcgcccgactatctttgccaaacactcgcaaacgtatatcgccgcaaaaattccgaagaattatggacgccgaaattgtgaaacaaacaacgccaaccagcacctctgatgccgcgcgaaatcaaaaagaggagtccgtttagaatgggctggctgatggccatgttcgaccttcccgttctgttggacgaagaacgcaaagaagccacgcgttttagaaacgcactgctcgatgacggtttcataatgattcagta

SEQ ID NO: 3242 - DNA, 8694 bp, synthetic construct
  misc_feature 1..8694: note = Synthetic
  source 1..8694: mol_type = other DNA
gatatcggatagaacgcgaaaataaaataaagaatttcctgcaaagtcatagcatttatttgactggttaaatctgtcggtgcctataaccacgcccgttccggtgtatgttgcatgattgccattgccactggagtccattgcattcccgctgaaagcataccaggctacaagactagttgtaggaacatacgatggtacattttgtgcttttccggcaagcagaaaggccaaaaaaatgatggaatataattgcttactaaacataaaactttttgctcaaagttaaaatgttacaatcctgtttgacatgacatatagcatgacgatacttgattaatatcaataaattctaataatattcgtcaaatttcaacttcaagttatttgagaattcctatttttatgcgacgaataataacatgagcgatttttcaaaacacaaatttggcaccaaggctattcatgccggagccgatcctgatccatcaactggcgctatcatgacgccgatctttcaaacctctacttatgtgcagcaatcgccgggagtgaacaaaggctatggctacgcacgtggtaaaaaccctacccgtgaggcattgcaaaagaacattgctgcccttgagaatggcaaacattgtgtttgcttcagcagtggtatgggagccacagacgcagtgatgcgaatgctaagacctggtgatgaggttatcactggtgatgatctgtacggtggctcttaccgtatgttcactaagatctacgaaaactatggcattaaattccatttcatcaatttaaccgatgccaacaacattaaaaaatacattaacaagaacacaaagttgatatgggccgaaacgcctaccaatcccaccatgcagatcattgatattgctgcatgttcaatgatcgcgaaggaaaacaacttgttactggctgttgacaatacattcgcttctccatatttacaaaaccctttggccttaggtgctgatattgttatgcactccgttaccaaataccttggcggacacagcgatgttgtaatgggtgctttggtcatgaatgacgataaactgcatgagcagatctattttattttgaacagctgtggtgcaaatccaggaccaatggattgcttcctggttatgcgtggcattaaaaccttgcatttgcgcatggaaagacattgctataacggaaaaaagatcgctgaattccttaaaacgcatccgaaaattgaaaagatctactggcctggttttacagaccatccgaaccacgacattgcgaaaaaacaaatgcgtgactttggtggaatgatctctattgttttgaaaggggcaagtattgaggatacattcaagatcgcatcttctttcaaggtattctccttagcagaaagtttgggttgtgttgaatctttgatcaaccatcctgcaactatgacccatgcatctataccaaaagctgaacgcgataaagccggtgtggttgataacctgctaagattaagtgtaggtgttgaggatgttgaagaccttattgaagatctgaaacaagcactatcataaatacaaaggctgggtgattacggcctttagttttttatgaatttgatgctcttagctattccgtgatctgtgctgatgcgcagtagatacatcccactctttaaattgcccaggtcgttcaaatagaactgatactcatctgtttcaaattgatctgcggtaatatgttttacaagctttccggtaacatcataaatgtcaagtttataaatcccctcctttaacacattcaaagtgatgaccgcattttgatctaccggattaggatacaatttcacctgaggctctagttgatcacgatcgtaaggtaaagaggttaacaccggacaaacaccatggctatacatattcgcatccatccaggtcaatctgttctttatccaattcttcattaagcgtacttcttcctgatatgttttggcaaatggtgttggttttggccacacataggttcccaatacagaaaaacgtttgaaatgccttacttgtgcctgatttacaagcgcagaaatagaatccatcacatgaaagatctgcacagtgtccaagagcgtacttctcaattcagtgtatctgcaatacaatttattcttaaaggttgtgtcttgcacaagtttatcccaccagaacgggatctgcctggtatcataaccacacacagaattgaattgataggcccaaccactggtattgctgccactgcagtagttggcatttctaaacgcaaggttaaaatcccataccggccccagttttaattgccctcctttggttatcttttctttatgtaaataagtgctcaaacggtatccatccacatttctgctgagttcattgataataaagaaatcgacaaaggacttcactgaaatgtatttcgcatagccgatcaagggatcttgaaaattaggaccattcagggcaacctcaaaactatctacataatccttgatgtattttctttgcttcttcatgatagccaccgtatcaggatagtaacaagagaatcttattttttgattgttcagtgaattatttggtagaacagaagaataccatgatgccggatctttgtctatattgataatgtaacctccggtgatatccacaccaatcgtatcggcaggatttaatttgctgatgtcaacccttgccgtatcacgtttgatcttttcctggagcacatataccccttggtatacgccatttaataccaactcgcaaagttttccgcgtgatgcccaccttcccattttgcgcgacagatcatacgtgatcgcatttcgcattaacgatttatcattgtaaggagcatacaagatccaatcattttcaggaggcatgcccagtaatgaaacatccaaattgtttcctatggcatctctggttataagtccgtattgcttttgcgggaaggtcaaggacgactgacctctgagttcaataccaatattgccattgtaattattgtacggattattcacataattggtggcgctaacaccattgtaaatgatccccatttgtgctgtgatcttattccctgatgggatggattgtgttccggtatttacaacaacaataggaagattggaagaaaagaaactcaccttgcccgctggcttactgctaaacgttattccccatgaatttaatgtgcctgtttttgtggctgcctgatctttgatgatgagtttccacacaccattggggtttgaattattatttaagtttgataatgcctcatacggagcataggatccggcaaaaggagccgtgcctgcattgatgttcacagggatagtatcaaagaatcttgtattcgtgaagttcaaaccgttagaaccattgccattagtcaatactattgttttacctgaaggtgattgcagtgagatcacaaggtcttgatctttttgatgcgtgatgtttatgcttgctgtttctatcccaaagctcgacagattcatggatgcaggcaagcctgtaacatttaatatgtacgttgtggttgtgttgtcaggtattgccagtaatggtgatgttgagaaggattgtgaccacactgtcatggtcatcatgcaaaacaacagaaaaatcattcttttcattatagcgaaaataactctaaatacgtttaaggtaaagagttaattcgaattattctaacaaagattttaaacctaattaagacccaatttattgtggttgtttatatactagtaagataaaaaaaatgccccgcagggaggcgaggcgctcgatgttttcacaacggaccaaagtccttattgtaaatcgctttcagaatgttttgtaaaattaaaatatttttttaatttaaaaaaaaattacttatgaaaaagattattggtttagatcttggcgtagcctctattggctgggcatttataaaggaagctgaaaatgagaatgaaattaacgaactcgttgacattggagtaagaataattcctctatcaactgattctaaaacccaatttgaaaaaggacaggcaattactctgaatcaggatagaacattaaaaagagtagccagaagaaacctggacaggtatcaattaaggcgtaaatcattggtttcagccttaaaagcgcttaatatgttacccggccaagaattatttaatttaaatgctttagagctttatggcttaagaaataaagccgttaatgaaaaaattgaattaaatgaacttggtagaattttacttcatttaaatcaaaaaagaggttataaaagctccagaaaagaaaaagcaaagaataccgagaattcaataacaaaagaaagtgattacctatcaggaatttcgacacgcagcagatatctgctagaaaacaacttaacaattggtcagaaaatatataacgattttgtttcaaactttaaagaaaacaaagatcagatcctttctcatactattaaaaatgaagtgtatccacgtcatgattatatctctgaattcaacaaaatatgggatacacaacagaaatactatcccacagttcttaccgagcaaataaagcttaaaataagagatgaaatcatttatcatcaacgaccattaaaatcacaaaaaggccttgtaagtatctgcgaatttgaagccaaaacatgtaaaattaaaaaggatgataaattaattgaaaaagtaattggaccaaaggtggctgtccgcagtaaccccgtagcacaaatgtgcagattatgggaaagcatcaacacaatttctcttgaaagtaaagaaggtaatcaaatttatattccaaacatccagcaaaaacacctgctgtatgaatatttatgcgacaacgagaaattaggaattaatgacctaagaaaaattttaaagcttgataaatcatatagaagcaaccaacaattagaaaaagtaggtattaaaggcaatgataccttaataaaaatcaaaaaggcattggaaagtgctgaattgagtgaagaagtaataagagcgttaacccagcttcaaactgctatgcatacagtaccttttgatgaaaaaattaaagcctgtattaataactatcaaaccaaaagtaaatacagaaaatttagtgcagaaagtgtagtagttgatatgcaaaccggagaagagctggaattaatggaaattggacaagaaatagaaaaagaacctctctatgaaatttggcacctattacacagtattgataatgaagacgaacttgaagctgcaatattaaagcacaaacgactcacagacttgggtttaactgaaaaagctgctgaagaactaagtaaagttgtatttaaaagcgacgactacggcaataaaagtgttaaggcaatacgaaaaatattgccctacttaatgaatggatacgtttacagcgatgcttgcgcacttgcaggatataatcatagcgatagctcaaccaaagaacagaatttgaaaagagagctacttgaccaattaccactattaaagaaaggtgaattgcgccaacctgttgtagaaaaaattcttaaccagctaattaatattgttaatgctatcattaaagagcctcacatgggaaggcctgatgaaataagggttgaattggcaagagaattacagcaaagtgccgaggaaagaagtgacacttatagcttcatgaataaaagaagtgccgaaaacgatgaaatcgcaaaagaaattttaaaatacggactaaaaccaactggacatcgtataaaaaaatggagagtctggcacgaaacccatggttattctttatacacaggtaaaacactaggtttagccgaattcctaaatgcagaggctgttgatattgaacatatcattccgcaatcaaaattatttgataacagcttaagtaactgggctatttcggaaagggatgaaaacataaaaaagggcaacatgactgcctatgactggatgaaatcaaaaggtgaaaatgcttttaatgaatatgtaaaacaggtaaatcacttttatcagcagtacattgaaaaaaatccaaaagaaaaaggtatttacagagcaggtttcagtaaacgtaaaagagattacctcctgatgtcttctgataagatcccatcagattttatcaatcgtcagcttaatgaaacgcgctacatatcaagaaaatcaactgaactactgaaacaaatttgtttcaacgttaaagttacaggcggatcagttaccgattacctaagacaccattggggatatgacaatattttacacgatatcaactttgaacgttataaaaatgcaggcctcacctatataaacgaagacaaaaaagaaaggatcattgactggaccaaacgcatggatcacagacatcatgcgctggatgctttggtggttgcctgcacaaaacaatcacttatccaacgccttaataacctcaataaaagcaaagaattttcggaaaatttaaaagatattgaaaacaaaggccttaaaaaagttgtaagtgaaaccaaattattcaacacaatcacagtacagaaaaaactatctgaaacactcgtttcattcaaagccggtaagcgagtagttagccgccgcaaaaataaaattggaaatcaaaccagacttgaacctcgcggaccacttcacgaagaaagtgtttacggcttgatcaggcgcattgcagaaaagcctgttaagctgaatgcaaagtttgatttaaaagttattgaaaacatagttaaccctgctcaaaagcagctgatcattgaaagattacaacaactcaataacgatccggcaaaagcttttgataagttaaataaaaacccgatttggattgataaagaaaaagaaattgccttaacagaagtaaaagtatacgagccggcaaccgttattaaatacaaactcaatgaaacttttaaagaaaaagatgctgattatattgtagatggtaaaataaaagaactggttaaacaacgctttaaagaaaaaggagcagctgcacttaaaaatttagagaatgacccgattttatacaatggcatacctgttaaatcagtgcgttgctttgcagagctcacagcatacgaaacccttaagtacgataaagaaaaaaataaagctattgccgtggttaaacccggaaataaccatcacgttaccatttgtgaagacgaaaacggcaaacgctacgaattagaaacagtaaccttttgggaagctgtagcaagagctaaaaacggaataccaatttacagcactcctaaagaaagtaatcataaggtaatttgtcatttggaagaaaatgaaattgtagaagtgaaatctgaagagtttgtatcgcgatttttccgtcttcaaaaattaacaagtggaaattattggttcatgaatatttttaacacacaacgagatgaaacattaattggaaaaaagagtaagaccgcaatacaatttagtccaggcagttacgaaggcaaaaaagtaaaaatcaatattcttggtaaaataaaatgatcaaacggactttatattttggaaatccaacgtatttaagtttagcgaacaatcagcttttagtaaagcaaccaaaagctgattcagaaaatgctgctttagaagctaaggccagcattcctattgaagatatcggcattgttgtactggataatcagcaaattaccgtaactcaggccgtgattgattttttgcttcaaaacaatgtggcctttattacctgtaaccaaaaccatcacccaaccggtttaatgatgaatcttgacgggcatgtgttacaaaacatgcgttaccgcgaacaattggaggccagtgaacctttaaagaaacaactatgggcgcaaaccatatcgcaaaaaatcaagaatcagaaacttgtattagatgcgcttaataaaaacagcaaataccttgagaatctttataaaaatgtacgcagcggcgatgccgataattgcgaagccaccgcggcggcttattactggcaaacgatatttgatcatattccggaatttaaacgtcacagaaccggtattagtcctaacaattatctcaattatggctacgccattttaagggcaaccatggcgcgtagtattgttggtgcaggcctcctccctacccttggcatttttcatgccaacaaatacaacgcctattgtctggcagacgacctgatggagccctaccggccttatgtagataaacttgtatttgattatatcaaagaaaaaacacctgcggaagatttggtaaaagaagataaagcttaccttttaaaaattcctgtattggatgtggaaataaacggcgaaacaagtccgctaatgattgccacccaacctacagcatacagccttgccaaatgcttttcgcaagaaagccggaaaattttatatcccgaatataaaacatgaatacatcaaatcgtttaagtgcctatagagtcatgtggaccatagtaatgtacgatttaccaacagaaacagccaaagacagaaaagttgctcagcttttcagaaaaaatcttatgaaagacggatttagcatgtatcagttcagcatgtaccttaggcatagacccagtgccgaaa

SEQ ID NO: 3243 - DNA, 17437 bp, synthetic construct
  misc_feature 1..17437: note = Synthetic
  source 1..17437: mol_type = other DNA
tactaatccagtcaggaaatttcctaattcaaacttatatagaaatctttcaaaaaaatagagtttttgtaaaatcatctcaattctaatttctaaataacaatttttccaaatcaggttgtttttatttttttctgaataaaaaaattttttaaaaacaatttccggaaaatattttatttgcaggaaattgaggacacttctggtaattacttcttgtaactgcattatatatttaacacatatcctattttcacaaaccgtgttttttaacgctttacaaatcaactaaattcaaatacttttaccagaatttgcaaattcatttaaaaattttttaataacgaaaaactaaaaaaatcattatggcaaaatcacattatgtaccaaaaacagacgacggaaaagtaacctggctaaacaacttttcttccaagcttccggatcatgcttcagttcttggattaagcccggaacagataacttcagttcagaatgatgctgcaatgttttcatacattgtaaatcttgttaactcattcaaaacaggacttgcagaaagagtggggtataaagatctgctgaagaacggagcagagaattcacctctagggccggctcctgtgtacaacaatacgccggctcctactgttgtaccggcaggtatattcgtaaggatcagtaaactgattatgaccataaaaggtaatcccaactataccgaagcaatagggaataatcttggtatcatcggttcagaagaaaatatagaattcagcgaactcaaacccgtgatcaacatcaagatggaggcaggctatccgaaactgatatggaaaaaaggtaaagccgactccatagacatatatgttgacaggtcagacggcaaaggattcgtttatcttgcaaatgactcatcccctgattttgtggacaaagcatctttaaacggaaatgaaaagacagccgcatgggtatataaagctatctaccgtgtaaaagatgaacaggtaggattattcagtgatgacgtatcggtaacagtaaaaaaggagatcacttaattaaaacagaagcaatcttccgatccggggcagtttgaataaaaaaattcaaactgtcttccggtaaggagaaaatattattaaatttataacacatcatgaatagaaaatcaaaaaataaccggaattctaaagtccatattataacgaagaaagacggaaaatggatagtaaaagggaaaacaaaattaagagcctcattgattgcatcctctgaagaaatggcaatattattaggtaaaaatattgcaagaaatcagggatctgatctttatatacttaaaggaaaaaaaatgcataaaattaactgtgaggttccaaaagaaagaaaatatttagatatgcttaatgagaggagaatttatgtagatgattattgaaagtatttcaaatttattaataaatttttaaaaacatttaaatactaaaaaatgaaaagtaaaaaccaacacgtagtgccggcaaagaacggctgggcagtaaaaggcgaaggcaataaacgcaatacccgaattaccagaactaaaaatgaagcaattgaaatagcaagaaagttcgcaatgaaaagaaaatcagaactggtaattcataacaaagacggaaagatcagtgacaatgacagtttcgggaatgatccatttccgagaagagatatgaagcattaatttacagattttaatctgaaaatttattatgtttgtatcagtcggcgccagccggctattgttctttcatatttgttcttcctttaattaaaccccgcatgttttttgtgcggggtttttttgtttttcaattatttataaatgaacattgaacatttaaaaatgaattcctatttttaatcaaaattccggaaaacaaatattaataattaaagacattgtccctcgaatccgcttacctcaaaatatcagaactcgtaaatgatttcaaaaataatgaaaagcattatttatcttctgtctattccgaagctcaggcaaggatagattttatagataaattcttcattgctcttggctgggatgtgaatcatgacgttcagaagaatccttacgaacaggaagtagtcgtagaaaaaaataccgacaatcataaacgggcggattatatgtatgcccttgctccgaaattccgtgaaccgaagttctttgtcgaagctaaaaaacctttgagggccttaaagaatgttgatgattattttcaggcattgaagtacggatggaatgcacagaatccatttgtaatacttaccgattttgaagaatttcatattctcgactcaagatataaacctgatccgaaatctgtcttcgaaaaatgttataaaaaatttcattatacagattatttagataaagaaaagttttctgagatttattacttattctctcgggaatcagtggaagataattccattgaaaagagagcttccgaacttccaaaacccagaggaaaagcagttcagcggggtttgtttgcttacactaatcagagtattgatgagtcatttctcgatttacttgataagataagacttcatcttgcaaggtctttaaagaagaataacatatatctcgacggcgaactccttaccgaaaccacacagagaattatcgaccggcttgtgtttatcagatttcttgaagataaggaaatcgaagcggaaaggcatattagcgcttacggcgacaaagggaattcatggaaagattttgtgaatgattcgaaagagttcaacgcaaagtataacggtatagttttcagggaacataatataatcgacagtccggaatttaaaggtccggatgaaaatgacttcagtgatatttgtgaagaactttcacatttgaattctccatttgacttcagatatattcctattaatattctcggttctatatatgaaagatttctcggaaaggttattcatgctaccgaaaagagagttacgatagaaaagaagccggaagtccggaaagcgggcggcgtctattacacaccgcagtatattgtagattatatagtagataatactgtcggaaaacagattgaagataaaactcctgtggaaatctctaaaatgagtttcgctgacatttcgtgcgggagcggttcatttcttataaccgtattcgataaacttctacagtatcattcaatttattatcaggaaagaccaaaggaagctaagaaagccggttgttatgaaaaagacggcaaatggattctgtctctgaagcagaagaaagaaatacttttgaataatatttacggagtggatatagattctcaggcatgcgaggtgacacagctatcactctttctaaagcttcttgaagatgaatcacttgcaactgcgcaggagtttgacgcaatgttcaaagaaagaattctccctgatcttggtaaaaacattatctgtggaaattcactgatcggaactgacatttattcgcagagtttatttgacacatcggaagaagaaaagaagatcaatgcaatggattttgagaatgcatttccggaagttatgaagaaaggggggtttgacgggattgtggggaatccgccttggatcgacattaaaggtttagaccctattcatgtcgattattatttcaaaaaatattcttcatctcataataggataaatatttatgcaattttcttagaaaaatctttaaggttattaaatgagaaatctttggttggattcataattcctaattcaatcttataccaaagttcatatgaaaaattaagaaacataatcttaaaagagtttggcatccaaaacattgtaaggttacctgatgatacttttataaatgttaaagctgaaagtgtaattttcataatttctagaagtacaattattgaaacagattgcattatttttgaccgaaaagataaaatagttgatattttaaaagacgctgataatacaaagttaatatatgcgggagattggattaataataagtttttagtatttgacattttcactgacgttgaaactaaaaatttattaaataatattgaatctaagaaaattaaattggaagaaatttgcgatttcacattaggattaacaccttatgataagtacaaaggacattcacaaaagcaaattaaaggaagagtatttcattcaacacaaatgaaagatgatacttataaaaaattactacaaggttctgatgtaactagatattattcagaatggggaggaaaagaatacattagttacgggaattggttaggtgctcctagagaaaagaggtttttcacaaaagaaagaatattaattagacaaatagtaagtggaaatcctttaagaatttatgcaagttatacgaatgaagaattgtacaatactcaaacaattttcaacctagttttgaaagacgatattaagattgatttaaaatttatactcgctattttaaattctaaattaatgaacttctatcattcttttaaatatttagatctttctaaaaatctatttcaaaaaatactaattcaaaattgtaaattattcccgataccaaaaatagattttaagaatgttaatgaatctgaactacattttaaaatagtcaaagaagttttccaaataatggaatccaaaaaacaacttacaaactcccaaaccgacaaagacaaaacctactgggagcggcgttgtaattctatagaccgagagatagataaattggtatatgaactttatggattgacggaggaggagattgaattggttgaatcaaaaaaaaattaaactttaacattaatttaaaaaaatgataaaatagacccaatgtctttgttaattattattttcgctctaatttgtactttttactcaacattaattatgtgaaaaatatatggacactattttcaaaaaactaatttcagaatatatcaattttattgaaccattaataagtgatgttgtaattttatcccatgattttggtaaagatctaaaattcgaaagcattaaatgtaatttttttgaagaagttgccaaaatttgtattattttaaaatttggaaatggaactcattacactgtaaattcaaattttgttaaagagtattttttcgaattacatggaaatattccattaagtatgaaagaaattttttttgaaggctattttgatattcaatcagaaaacttaaataattttacattcctaaacttggtaacaatggctgatagtttcaagtctccttcggattataatacttcaaaaaaattgatcgattattactttatgatatctacaggaattttaaattatcacaatacttctattcaagaaaaagaaaataaatttaaaaatcttaatatgataataattgaccaatttaatgatttgttggaattagataattcagaaatcccagaaagttacattaattcgccaataaacaaaacttttgagtcaacagatttttcagaaccatattttaatttgttattggataatatcattcaaataaaaaaaatattacaagatttatttgacgataaaaattttatttttgagttagagaaaataagtaacgaacaaattgatagcccggaatcaatggagatttatatattatatgatgttcttcaaatactcaaaaaaatacaaccaaaattaatatgtaattctatagaaacattttctatcattatatttatgctaaatttaaatttatttagatataaattttgggaagtaaattataataccttaaaagatttatttttgaaaatacaagaatctgatattgaagaatatttaacttatacaaagaccattgaaacattatctacttctgaaaatccaatcaaagtaaaagcgactataagatctgaatcaattgatctaaattcaaaaaaggtttctgtagatttttcattaccaataatattaaaattatataacactgagctttttgatgtatatgtggctacaatgaatcgttttgcaacaattatagcaaaagcgaataataatatttctaaggaagaggaagaagcctttaaagatatttataaaggactacacaatccagttaatgaagacgaggtgaaatcttatttgaggactacagttaataaaaatgaaaatcttcaagatgtaattaatgagttggaaagtcttataggattagaagacgtaaagactgaaatcaaatccttaattaactttataaaaattaataaagctagagaagatacaggattaaaattatctccaatttcatatcattgtatatttacggggtctccaggcacaggaaaaacaactgttgccagaataattggaaaaatttacaaacacttaggagttctaacagaaggtcaaatgattgaatctgatagagcatctttgataggagaatatttaggtcagacagcacctaaagtagacaaagtagtgaatttagctatgaatggagttttatttattgacgaagcttattcattaatcagtgatgaaagagactattatggaaaagaagcgattgcagccttgataaaaagaatagaggacaatagagataagttagttgtaattatggcaggatatacagatgaaatgaaaattttcatagattcaaatccgggttttaaatcccgattcaataggtatattacatttaaagattacacaccaatacaattaaaaaacatatttattcattattgtaataattctgattataaattgaatgaacccgcatcaaatttattagatgaattgtttgaaaagatgtattacaacagagataaaagttttggaaatgcgagatatgtgagaaacgtatttgaaaaaacattagaaaatcaagcaaacagaatttctaaattaagtagtttgacaaaagaattattagaaacaattgaagaagaggacattcctatttaagaattattcaattcaataagaaattacaatattttcaccaataaaatattcatccttgtaaataatttctaatatatttaccttaattcattatggtaaacaaaaaagatcctaaaaaatacattcttcctcattcagaagcaaaattagaattttatgaatcatatttaaaaagatatctaagaataattttattgtcggagcatattactacaatcagtatttttgatttattttgtggtacaggaatttatgaggatggaaaaagtggaagcccaatattggcattcaatattatacaaaatattcttgctgaatatccaaaatacaaaaatactaaaaccataaatctgattgtaaatgatggtgagtccaaaaacattgaaaaagttaaatcaaaattagatactttaaatacttctaaagtttgtaacatatattacaaatcttatggatcagatgaaatttttaaacgtgtaaataattacctgaaaaagaataatgattcaagagctagaaatttaatatttatagatccatatggctataaagaaattcataaaaacgatattgaaaaattattatctaacggtcacacagaaataattctttttttaccattatctcatatgcacagatttaaaggtgtagcattttcagataaaataaatccaagctacacaaaattgcgaaattttattatagagtttttccccaatgatcatcctttaataaaaggtcaatttacagatatttacaagtttattaattatttaaaagatgcctttagttttaataataaattctttacagcctccttttacattcaaagagacaaggcaaatttcaatgtattattttttatttcaccgaatatttatgggatggaaaaaattctagaagtgaagtggcaattagataggaatactggcaggggatattccataggtcaagatgatttaaatctacaacaattgttaccgggatttcaactcaatcaattcgaaaaaaatttagaaaattatttaaaagggaatactaatacctcaaatttagatctatatctatttacaataaaaaatgaacatcttcctaaacacacaaatgaaattttaaaaaaatggcaaaatgaaaagactttattggttttagatgttgaaaaaaataaagatgcaagaaaaaattctttttatataaatttcgattattacaagaacaataagattaaagtaagctttaaaaaaatttaattatgtcaaaatcctccatagaatggacacaaatgacctggaatcccactaccgggtgtaataaagtttcggcgggttgtaaattctgttatgctttaactatgtcaaaaagactgaaggcgatggacctggaaaagtataagaatggatttaaactgacaattcatccagatactttggagattccttatagctggaaaaacccaaaaactgtttttgtaaactctatgagtgatctttttcataagaatatttctctggattacataaagaaagtcttcaaggtaatgaatgataatccacagcacacatttcagatattaactaaaagggcaaatttacttgctgaatatgataagaataatcaaataagctggactccgaatatctggatgggagtttcagttgaggatgaaagagttacagaaagaattgattatttaagaaacataaaggcagagattaaatttttatctttagaaccattaatcggtccaattccaaatttaaatttacagaatattgactgggtaatagtcggaggtgaatccggtttcaaggcaagaccaataaaggaagaatggatcattgagataaagagtaaatgtaaagatatgaaagtcccgttctttttcaagcaatggggaaaagttgagtttaatcctgatcaaaaagatcctacaattaactccaaaaatattaatcatgcaaaaggcgggtgtatgcttaacggaaaaatatacagagaacttcccttaaaaaagatatctactttaaaagtagcgtaagttataagtaaataataaatatatagaaattgagcataaggagtaataaatggaagatttagtaaaaaaaatatgtgaggaaaccagaatatcagaagaacattcaaaaattgcagttaatctcgtttttgactttttgaaaggtaacttaccacctgagtgtaaaaaggaattaaataagttgtcccgccgttattggtcttccggaaagtttgcactccagaagtttgaaaagtagtttgcatttcattacaaactttccggcgaccaacaacaaacccgttgataagcgtagctcctttataccattctgaattatacttgtaatgaaaatataatggaattatcttagacaggattctgcaaaagggagttaaatatcataataatcctgtgaatcctagatggaacttagttgaaaatcaggagaactataaatattcttccgaaaagttttattttaaagggattgaagaatttggatttcttgaacactacatggatgtataaaagtggttctttcatgaaagggtctttgttgttggtcgccaaaaagtttgtcaggaattattctttcttgaaatcgtcaaaaaaacttttggaagaccaacgacgacgagatataaaaaagtttaataattgtattttaatattaatttattttgttaaaattcaacaaataattaaatgcattaataatataaaaggataaacaggtgtggacttcagataaattttacatttctaaactttttctaaaatcaaatatttttatataaaaaagaaagcgacatcaaattaatgataccgctttaaacttgttaagatttttataaaaaaaaagccccagcacgaagcgggggcgggcttaattgcctaaggaataatccttattgtgataagctttctaatgaatttaattattcttaaatcaaaaacaaatttaaaaaatgaaacatattataggattagatataggtacaaattctgtaggttgggcttttgtaaaagagtctaaaaaagataaaatagaactaattgatattggcacttacatttttccaattggaactatagtagatgctaaatcaaataaggagaaaactaaaaacgaacaaagaagagaatacagaggaacacgaagaaatattttcagatataaattaagaaggaaaaagcttaaatcaattttaaattcaatagatttaattccggactttaagaaaaactataaaataaagggaaaatatcaatctaccgaattatacaagttaagatcagaagcaatagaaaaaaagattcctttagaagaaattggtagaatattcttattattgaacaaacacaggggatttaagagtaatgctaaaaaatttgaaaaagaatcagaagatgaaggaatagtaaagacttcaataaaaagtttgaaagatcttatgaacaaagctgatgctaaaacattaggtcaatatttttataaaatgcatgaattatcaaatgtgaaatataattctggtgactggcataaccctgatgaattaattgatgagagagcttacagtgaaaatggaaagatagttttaaataatagtagagggattagaagacaatttggtagatatacagaaagagaaatgtatttaaatgaatttgacttaatttggtcagcacaaaaaaaatattatttggatactcatcatgatctttttacgggtagtgcaaaagagtataaagaaattttagaaagatataacgatgagcttaaagatataaataatgaaaacagcaaacagataaaatataaagaaaaattaaaagccattaaagaatttaaaaattctaattattggaaaattagaaattattgtatttattatcaaagacctttgagatctcaaaaaaagtttttatcaaattgtcaatttgaaaaaaataaaaaagtaattcctgcaagttctccattatttcaagaatttagaatctggaaagtattgtctgatttaagatattcggatgaaagaaacaatatttttagtgaaattttacctgtcgaatggaaaaaaattctggctgaaaaattagaaactatagaaagggttcgaataaataagccatcaaaaaagggaaaagattctgaaaaaatatgtttgcttgatttgttagaattaagagatagttcaattaaatttaatctgcatattgaagaatcagaaaaagatattaaaggaaatttaacatactatgcattttgccagtcaatgggggctgaaaagtttaatgagcttaaagataaaaataaactaaatgatctatggcatcacatatatatagcaaaagatgacgaatggttaaaagatacattactatacaaatggcaatttagtaaaaatattaatttctcggaaaatgaagcaatcgtatccaaattaatagaatttggccttgaaaatgattacggatcctattcatctaaagtgataaagaaaattttaccttttatgaaaaaaggaaatgatgaatacacttcacttcttttatcaggatatttaaaatcaccggatgaggaaaaagaaaaagtagtattaaagaaaaaaatttctcaattaaaatatcaggaattaagaaatcctgttgtagaaaaatcaatttctcaagtgattaaaattgtaaataaattattagaaaaatataatgatttaattgacagggacaatttagaaattagaattgaatctaccagagaattaaaaaaaccaagatctgaaagagaaaaaatattaagaaataacagggataaagatttaaaacgtcaggagtatgctgatttcttaaatttaaaatcaaaagatgggacatttaattttaataaaagaatagagaaatatgatcggttaatatataaatttgaattatggcttgaaatgaaaatggatcccaatgatccgctttttttagaatttgaaaaaatttcaaaaaaaggggataacgagaaacaaagattatggtgcgaatgtaacaggatatgtccttatacttcaaaagtaatttcactaaaaatgttatttagtccggaaatagagattgagcatataattccactaagcagatctttagatgactcttataataataagacaataactttttcaagcgtaaataaagaaaaaggtaatttaacttcctatgaatatatgaatttaaaaaatgattttgaaaatttcagaaagagaattaaagattttccaaaatcgaagattgccaattttgaaatgaaaaatgtttcaaaagaattttccggtaaccaaatatcaaatacttcttatattgctaaatttactagaactaaattatctgaagtctctaactccgttcaatttactaatggcgctgctacatctcaattacgaaagtatgattggaatcttgatcagttacttgatcaggttagatatgaagaaaaaaccggaattgaaatagataaaattattcaatattacaaaacagagcgaaatactttctataattggtaccatgagacgaaagacaaaattgatgagaaattaaatatttttaatattccggatgatgttttaatggaatatgacaaaaaatttaatgaaaatattttagaaaccgttataaaattaaaaagctatgaagaattcagaaataaatccgggaaaaaggacagaagtgatcacaggcaccatgctatagattcttttattactgcttgttgttcaagagcaattataaaaaaattaagtgatgcaaatagagtgagggaagaatttgggatttcacaatttaatcattcacgtaatatttctagagatttagttgattgcccttttgactatattaaattaaaaaattctattatgaatattattgtagtacataacatatctcagaagttgattagctcaaatgtgaataatataaaatcaggaaaaaagaatctaaaacaaaaaacttatggaccacaaggctctcttcataaagatggaatttatggaaagttaaaaaaccccgaaaaccagaatatctcaaaaaatgacgcatatgtaaaaagaatcccattatatagcaaaaatggctcttcaatggaagttagttttactgatttaaaaagcttagaaaaaatatacgatccgaatttgaaagaaatcatgaaaaagcgcattgaaaaatatggaaatggaaaaaaagcatttagtattgaaaatttaacgattgatcctttatatgtttattccacaaaaaaatatcctgaagggagtataacaagtataaatggagcttcattaccagttataaaaaatataagagttctaaataagaattccaggaatttagtacaacttccagcaaaagatgaacagagtaagattataaatttgaacagatattcagagactgatggtaattatattatgatattttatgaattgaaagaaacaataaagaataaaataaaaataacacgagattatagaattttatctttttttgaagctgtaaatagaaaaagaaccggagtaaaattatttgaagagatggttgaaaaagatggaaaattattaccacttatggaaaattgtaattggcttaaacagggggatttagtcgcaatatataataatcctgatgaaaaagaaaaaatattagatggagataagttttttataaaaaaatgtctgtataaaataacagaattaaacaattgggcgaatttaaattatgagtatggattggtaaaactttcgcatgttaataaagtaaaaaacacttcggaaaaatatactacaactggtgatttcagaaaattttaccacagtagtttaaatgctattaaaattagattaaacgagcttggtgaaattatcagaataggataaatattgaattactaaaagaaattgtacataaatgattaaaaagactctgtattttggaaatccagcgtatctaagtttcaaagatgaacaacttacaattgaaatcagagaagttcttattaatttaaatgaaattgaaaatgattcagattcatcggaaaaatccgaaaatgaaaatgataaatatttaaaaagaaaatcccgaaaagaaactattcctgttgaagatattggaatagttattctggaccatcacggagtgagcacttctcagtatttaatctcaaaactactggaaaataatgtatccgttatcttctgtaatgataagcatcatcctacaggtcttttattgaatcttgacgggaatacaatccaatcggaaaaattcaaatctcagattaatgcatcaataccattaaggaagaatttgtggcagcaaaccgtttcttcaaaaatattcaatcaggcagtactcttaaaagaaagaggagtcattatcggcaatatgcttaactgggcaaaaaatgtaaattccggggattcaaaaaatctggaagcaagagcatcagtatattactggagaaatatttttccggaagaagttaattttttccgggacagattcggagatcctcctaataatttgctgaattacggttacgcaatattaagagcaattgtagcaagaagtcttgttggttcgggattacttcctactctgggaatacatcacaggaataaatataattcatattgtctggctgatgacataatggaaccgtaccggccttttgttgacaaaatagtatatgatattttaaccgaagaaaaagatatgtttgaacttactacagaaattaaaaaagaattactaaacatacctgttgtagatgtggttattggcggagagaaaagtccattaatgatagcggtgcaaagaacaacttcatcacttgcaaaatgctttgaaggaaaaattaaaaagatcatttatccggagtttgtgtaatgcggttggatgaattcagaattatgtggatactggtttttttcgatctgccgactgaaacaaagagagacagaatcaactatacccgtttcagaaaaggaataatgaaagacggattcagtatgtttcagttctcaatatatacccgtcactgtatgagccgggagaatacagaagttcatataaaaagaataagatcaatactgcctccgaaaggacatataggaatattaaggataaccgataaacaattcggcgaaattgaaatattctatgggaagaaaaagaatgaaaataaaaaacctcctccacagcaacttgaattattctgaatagaaaaatcttaaatgttgagttaaaatagaaaaaggaatagttttaaaactattccttttcttttccgacaatattttttaattctatataacctgttaagttccttaaatattagcaacatatgcatatcatattgttgtaaatattgtcaaagaaacttttgaaagcaaatcacaactcagactaccggcattacttgatttgaaatattgttgtaaatattgtcaaagaaacttttgaaagcaaatcacaactattaaacgttgcataatgcttatctggaattgttgtaaatattgtcaaagaaacttttgaaagcaaatcacaacagaggttcaggaacggtattgacggcgaatattgttgtaaatattgtcaaagaaacttttgaaagcaaatcacaactggaggcacaaacaccatttaccaataccgattgttgtaaatattgtcaaagaaacttttgaaagcaaatcacaacgaaactcgatgaagtctcctgcagaaattgattgttgtaaatattgtcaaagaaacttttgaaagcaaatcacaactttgtcaagcaagaatgttattgcatccagattgttgtaaatattgtcaaagaaacttttgaaagcaaatcacaacgtcgcccctgtggcactcatataaaaaaccattgttgtaaatattgtcaaagaaacttttgaaagcaaatcacaaccagtctctccaaatggattaaacaactggaattgttgtaaatattgtcaaagaaacttttgaaagcaaatcacaacgtgttttcagttgctttggcaactacacacattgttgtaaatattgtcaaagaaacttttgaaagcaaatcacaaccttatcagggaattatccttaccggaaacattgttgtaaatattgtcaaagaaacttttgaaagcaaatcacaacttcggagcatccggagccagggagataaaaattgttgtaaatattgtcaaagaaacttttgaaagcaaatcacaactttaacccgattacctgtaacatattaccattgttgtaaatattgtcaaagaaacttttgaaagcaaatcacaactgtttgtaattactgaattgtgaatcgacaattgttgtaaatattgtcaaagaaacttttgaaagcaaatcacaacgtttcctctcccatattcctttcttcaggaattgttgtaaatattgtcaaagaaacttttgaaagcaaatcacaacaatgtatgtatattgacttaagcaaagctaattgttgtaaatattgtcaaagaaacttttgaaagcaaatcacaactaccctgccaagattgagatgtttatacttattgttgtaaatattgtcaaagaaacttttgaaagcaaatcacaaccgcaacatagcataacctacaatgccagaaattgttgtaaatattgtcaaagaaacttttgaaagcaaatcacaactcgcttgttacagcaaagagattcacaattattgttgtaaatattgtcaaagaaacttttgaaagcaaatcacaactcggagagtctctgagcgaacaggtaaaagaattgttgtaaatattgtcaaagaaacttttgaaagcaaatcacaactcatttctaccttcatatcttcttctgttaattgttgtaaatattgtcaaagaaacttttgaaagcaaatcacaaccagcgcatagcagtccaacatttactacaaattgttgtaaatattgtcaaagaaacttttgaaagcaaatcacaactaccctgccaagattgagatgtttatacttattgttgtaaatattgtcaaagaaacttttgaaagcaaatcacaaccgcaacatagcataacctacaatgccagaaattgttgtaaatattgtcaaagaaacttttgaaagcaaatcacaacttcttaaaaatggcaatccttttgttccttattgttgtaaatattgtcaaagaaacttttgaaagcaaatcacaacccgcaagagtctctaactctgcaatcggtaatcaccgccgttattggtcttccggaaagtttgcactccagaagtttgaaaagtagtttgcattttattgcaaactttccggcgaccaacaacaaacccgttgataag

SEQ ID NO: 3244 - DNA, 23390 bp, synthetic construct
  misc_feature 1..23390: note = Synthetic
  source 1..23390: mol_type = other DNA
tgagcgacgccgtgctgctcacatttctgcttcagcagcaccttgagaaggtcgaccacaggcccggcctccacctgctgctcgcgcggcggcgctttcggcaggtcggcctcgtccatcgccaggccctcggcgacggcttccagaatcgcttgtccgaccttgccgcgggcgtagtcggtcgaaacgccgcgggccctggcgagatcctcggccgtctgcggggccagcccggccacgtcgtagatctgctcgtcgcgcaggatgcggttgcgcggtacattccggcgctgcgcctcgcgctctcgccaagcggccaggttgcgcaggtgagcgagatagcgccggtcgcgtgagcggcttttcagccgccgccaggcctcggacggctccaggcgataggtggcggggttgagcaggaccgccatctcttcctccagccagctttcgcggtcggagttggcgagcttcttgcgcagcttctgatagatcacgcgcaggtgcgtgacgtcggccagtgcgtagtcgagctgtttgcggccgagcgggcgatgggcccagtccgcgaagcgcactgacttgtcgatccgtgcgccggccagccggctcgccagcttctcgtagccgacctgatcgccgaagccgcagaccatggccgcgacctgggtgtcgaacaccgggtggggcaggcggctgctatcgtggaagaagatctcgaggtcttgccgggcggcgtgaaagaccttcaacagatcggtcttgtcgaacagcgaccagaccggctccaggtccatgccttcggccagggggtcgatcgcggcggcttcctccggcccggcaatctgaatcagacagaggcgtggccagtaggtggtgtcccgaatgaactccgtatcgacggtgatgaactctgcctcggcctggcgggcgcagaaggcggcggcttcctgagggtcggtgatcaaggtcatggctccgccctatagcagcttccgacccagggctcgaccccaagtcacgcgcgttccctttcttggcgaccttgacaaagcttcacgctccgggcccttttgccggcgcctgttcggcgcgcctatcgagggcgcactgcgacgggcctcgatccctcatgcctctagcgagtttgttgcatgcatccctatcgcacgcacacctgcggcgaactgcgcgccgcgcacaccggccagaccgtccgcctgtcgggctgggtccaccgcaagcgcgaccacggtcagttgctgttcgtcgatctgcgcgatcacttcggcatcacccagtgcgtgctcgatatctcgagcccgcttttcgccgcggtggagcgggcgcgcaacgagtcggtggtcaccgtgaccggcgaagtggtcgggcgcaccgccgaaacggtcaatccgggtctgccgaccggtgaagtcgagttgcgggttcaggccttcgagctggaggcgcgctccgagcaactgccgctgcaggtgaacagcgacgaagacgccggcgaggagacgcggctgcgctaccgcttcctcgatctgcgccgggagaagatgcagaagaagctgttgctgcgcagccaggtgatttcctcgatccgccagcggatgatcgcgcaaggctttcacgagttccagacgccgatcttgaccgccgacagtcccgagggcgcacgcgcttacttggtgcccagccgcgtgcaccccggcaagttttacgcgctgccgcaggcgccgcagatgttcaagcagctcctgatgatcgcgggtttcgacaagtacttccagatcgccccctgcttccgtgacgaagacgggcgcgccgaccgctctccaggcgagttctatcagctcgacttcgagatgagctttgccacgcaagatgatgtttttgctgcgatagaacccgtcctgcatggtgtcttcgaggaattcggcggcgatcgcaaggtgaccgcgctgcccttcccgcggatcgccttcgacgaggcgatgctcaagtacggcagcgataagccggacctccgcaaccccatcgtcatcgccgatgtggccgaggcgttccgtggcggcggcttcggcatcttcgcgaagctgatcggccagggcgcgacggtccgggcgattccggcgccgggcgcggcggcgcggccgcgcagcttcttcgacaagctgaactcctgggcgcagggcgagggtaaacccggcctcggctacatcgtcttcgaaaacggcgaggccaaaggcccgatcgcccgcaacctcgagcccgagcgctgccagcagattaaggaggccgcgggccttgccgacggcgacgccgtcttcttcgcctgcgacaagccgcttgcggcgtcgaccttcgcaggcgcggtgcgcacgaagctgggccaggaactcgatttgctgacgccgggcgtgttcgagttctgctggatcgtcgactatccgctgttcgagttggatgaggagacgggcacggtcgagttctctcataaccccttttccatgccgcagggcggcctggaggccttggagacccaggaccccctgacgatcaaggcctatcagtacgacatcgtctgcaacggcgtggagctctcctccggcgcgatccggaatcatcgtccggacatcatggccaaggctttcgagatcgccggctacgatatcgcggaggtggagacgcgcttcgcgggcttgttccaggccctgcagtacggcgcgccgccgcacggcgggtccgcgcccgggatcgaccgcatcgtcatgttgctggccgatgagccgaacatccgcgaaatcatcgctttcccgatgaaccagaaggccgaggatctgctgatggaggcgccggccgaagtgtctccggagaggctgagggagttgcatctgcgtctggccctgccgccgaaaaaagcagaggactcagcaaaggcggagttaccataaaggaaatattaagtctctttaggcatagaatctcgacatcttgaccaacccgactccggcatgattagttccgcaaggctggaaattggttaacagagtgtttttttgggggcgaagatgtcgcggctggtttttgtgcttggattggtggtccccttgaccgcctgcggaacgccgacgccgctctcgatcgcgtccctggtgctcgacgtcggcagctatgccgtaaccggcaagaccacgaccgatcatgccttctcggcggtcgccggtgaggactgcgcggtgattcgcgttttggaaggcgatccctgcacctcgctggacgattaccaactcgctctcgcggtgctcgaacctcttgccgaggagggcgtcgaagtccggtcggccgcttcggcggatctgttgcggcgtcaaacggcaacggtcggcatcgaagacgtcggccccgtcgcctccttcgcgcaggaaatcttcctgagcgacgaccttgctccgggggcgcaggcgctctcggccgcctcggccgatatcgttcaagtcgggcacgcgggtttcatcagcgacgatctttggccggatcgcggcgcttaaccctacgagacggcgcacgccggcgcggccgccgtccccgagcgacggatagcggctcggccgcctctgccgttcttccgtccaactaactgaattatataaaaaattagttcggctgctcccaatcgctgcgcgccggggcatggacaggacgcgttgtcgagcctagactccaaccgctcgaccgacccgacaaagcaagcataagacgtagcggagcaggggaagggcgggcctttgggcataactgcgggacagcggatcagcatgcgcacgccggccgatgacggcttcttcatgcctgccgaatggcacccccacagtcgctgctggatggcctggccggtccgcgagcaggtctggggcgacgggttggacgaggccagggactcttacgtcgaagtcgccaaggcgatcgctcgcttcgagcaagtgacgatgatcgcgccctcggagcaactcgcggaggtctccgtcgaggtggggcagggaatcggctgtctgccgctgacgatcagcgactcctggacgcgcgacacaggcccgaccttcctggtgaacggtgacggtgccctggcgggagtcgattggagattcaacgcctggggcggactctacccggaccatcaggccgatgccgctctggctgagaatctgctgaactatcttgacgttgcgcgctttgaggcgcctttggtgacggaaggaggcgcgcttcacagcgacggcgcgggcacgttgctggccgtcgaagcgaccctggtcaacgagaaccgcaatccgggacgcagccgcgacgagatcgaggcgctgctgaaggcctacaccggcgccaagaccgttatctggctgcccgaggggttggtcgacgacgacaccgacgggcatgtcgacaacattgcctgcttcgcggccccgggccgggtggtaaccctggcccccggcgacgagggcgatgagaaccatgcgcgcctgctccgcaatctcgaagttctgcgcggcgcgacggatgccgaggggcggcggctcgagatcgccgagttgcccttgccgaagccgcggaagaacgccgacggctcccggctgactctcagctacgtgaatttctatctgccgaacggcggtgtcgtcttgccggccttcgacgatccggccgatgacagggccttggagattctcgaggactgcttccccgaccgcgaactggtgcagatcccggtcttgccgatcctgcggggcggcggcggcatacactgcatcacgcagcagcaaccggacgccctggccaagggcacggatggaaattcctcggcctcttgagccgatcccggcggcgacggattcggaaggtccgtttgcacttagtcgtcgacgatttcccagattttcgcgtgatcgtcggcacgttcgggacggatgacccggaagcgctccagcagttgaccccgctcgtcgaagtcccgttcgacggcgagcaaggtgccggtcttgtgggtacagagctcggaggcgtcgtccacttcggcgcgggcgaccggtagggcctcggccagaccgggtgcgccgtagctctctacgaaatgccgcgcgagccgttcaacgacagcaaagtagccggcctcaccggtttcggccacttcgaccagggaactctgtccgaagctctcggtgccgagccagccgttggccagcgccagcttgtccttggcgtcgaggttcgccgggtcgctgttggcaaaggcgaaggccccggacacagcccattccccaggctcggcagcccgcttgaagacgtagagatcggaggtgtcgagccgcagggttcgcggcagtctgtgcaaggtcatggccgccagactacgcggactcggcagcccggcaaagtcatgcggaggcgagggaagggatcgctttgcgctatgcgctcaagcgttcgcggctgcccggttgatgtcgagcttcttggcgcggtagagggcgcggtcggcagtgaagatcagttggttcgactggctgcgcggtccgtaagcatcccaaccgacgctcgcggaaaccggaatctggatgcgtccgtagggaacgcgcagggcattgatggatctgtcgatcttgcccgccagtttttggccgggcaccgctttggttcgcggcagcaggacggcgaactcgtcgccgccgagccgggccacgatgtcggatttgcgcaccgccgcccgcagcagatctgccgctcccttcaagacggagtcgccggcaaggtggccgtaggtgtcgttgattgtcttgaagcggtccagatcgacgagaaccagcaggccgggttcgccgtggcgctgacaggccgtcaggacccgttccagcgcgtccacgaagccgcggcgattgaacaggcccgtcaattcgtccgtgatcgagagactctcgagctgccggatccgctccgcttgctcggccatcgtttgttcggcttcggtcgcggcgtccagcagctgcacgatcagggcctgatcgtcggccccgagccgtccctcgccgacttcggccaggcggcgcaggcgatgggttgcgaccgcgaggtcgggcacgaaggcgggcgtcgaagcggggaggccgaagtccggatccgcggagatcgaattcaaaagttgtactggcggcatgatcatcccgcaaacatggttactgtgaaagatgcaacggatcttgtaaagcaagcgtcgtgccagttgactttgcttcggaatagcttggattttcgtcgtttgctggggagaatcggcagcttctgccgttcaatcctcgcgcaggtcggcaaggtttgccgcctcgacccaggggaggcaggacttttgaacagcgccaaaccggttaggcggcgaaggatcgcggatggctgaggatggtaagcttcgggttggtgtggcgcagatcgattgccggctcgcggatctggaccacaacgccgccacgcatctgcgaatgatcgagcgcgcgcggcgcgagcggatcgagctgctgctctttcccgagctgtcgctgaccggctatgcggtcggaccgcagacggcggagatctcgatccggcgcgatgccgccctgctttcggacctggcgggggcaagcgccgacatggtgacggttctgggtttcatcgaggagggcgtggccgcgcagtttcacaactccgcggtggctctgcggaacggcgaggtcaccttcattcaccgcaagctcaacttggcgacctacggcaatctcgaggaaggcaaacacttcgccgaaggacgctatttcgagaccttcccgctcgaccgatgctggagagccggcgttctgatctgcgccgacagttggaatccggccttgacccatctcgccatggtgcatggcacgaccttgctgatggtgccgatcgcctcggccgagaacgccgtcgacggaactttctccaacccgaggggatgggacctggcgatgcagttctatgccatgatctatggcgtcccgatcctgatggccaatcacgccagggggcagtccggaccggacttctggggcggcagccggatcgtcgacccttttggacagacgctggcggcggcgcaggagggcgaggatctgctgatcgccgacctggattacgaggcggtcaagcgcgcgcgctatcgtcttccgactctgcgcgacagcaatctggatctcgtcctgcgcgaactgaaccgcttgagctggcagatcggcattccggaagagagccgtacggtttaaggttcgggctgtcggcttgcatgaaaaatctgtgcctccaggctcttacgggttgtgatttgttagcatgcaaagtaaggcttgccgccttgtcgaggggaggggaggctaggaatgccgcgcgaacagcgcacgatatttttcagcgagttcgaggtgatcgacgcgctgcggcgcttcgtcgaagcgagcaaatgggatctcggcgacaacatcatcgagcgtgttcaggccttcgatgaacagccggtgcgggcggtcgctctctgcgggacaggcgaggcggcccggaaggtcaatctgaccgagatcgatctcgcgcgcgccttcatgctctactgcgtcgaacgagagattcccattcccaaacgcggccagaaagacgtgcgaatcgccgagggagccctcgcactcaccattaccgtcaacgattaggcggctgcggacgcgtgagcgctcgaccatgccgcgattcggcgggctccggtcgatctcaggcaagtcgcggtcgcggccggaccttagatcaagaggggccttggatcgccctgcgttcgaacggtcgcgtcggggcgtgaaaatcgattggttccctggcttttcggcatctcgcccagggtcggtccactgccgggtcacgcgaacgccggccgtgcgtgaaacagatttgggggagcggaaagcgtcatggccaagagcgatatcgagattgcgcgcgaggcgaccttgctgccgatcggggaggtcggcgccaagctcgaccttccggcggacagccttcttgcctacggtccgcacaaggcgaaggtctcgctcgacttcctgaagaccttggaagaccgtccggacggcaagctgatcctggtcacggcgatcaatccgaccccggccggcgagggcaagaccacgaccacggtcgggcttggggacggcctcaaccgcatcggcaagaagaccgcgatttgtctgcgcgagccgtcgctcggaccttgcttcggcatgaaggggggcgcggccggcggcggctacgcgcaggtcgtgccgatggaggacatcaacctccatttcaccggcgactttcacgctatcggcatcgcgcacaacctgctctcggccctgatcgacaatcatatctattggggcaacgcgctcggcatcgatcagcgccgcgtcgcctggcgccgggtggtcgacatgaacgaccgggcgctgcgtcagatcacctcgtcgctgggcggcgtggccaacggtttcccgcgcgaggacggcttcgacatcgtcgtcgcgtccgaggtgatggcgatcttctgcctggccaccgacctggcggacctgaccgagcgtctgggcaaggtggtcgtcgcctacacccgcgacaagcggcccgttctggcgcgtgacctggaggcgcccggcgcgatggcggtgctgctgcgcgacgccctggcgcccaatctggtccagaccctggaaaacaatccggccttcattcacggcggtcccttcgccaacatcgcccatggctgcaactccgtgatcgcgacgaagagcgcgctcaagctggccgactacgtggtgaccgaggccggcttcggggccgacctgggggcggagaagttcttcgacatcaagtgccgcaaggccggtctcaagcccgaggcggcggtgatcgtcgcgaccgtgcgcgcgctgaagtctcacggcggggtcggcaaggacgcgctgaacgcgccgaacgtggaggcggtcaaggccggtgccgtcaatctccagcgccacatcgccaacgtgaagaagttcggtgtgcccgtaatcgtctcgatcaatcacttcgtgaccgacagcgatgaggagatcgccgtggtggccgccgccgccgaggagatgggagtcgaggcccttgtcgccacccattgggcgaagggatcgacgggcacggaggagttggcgcacaaggtggtggctctggccgatagcggcagcgcggacttcgcgccgctctaccccgacgacatgccgctctgggacaaggttcataccatcgcgaccgagctgtacggggccgccgagatccaggccgatcagaaggtccgcacgcagttcgacgaccttcaggcggccggctacggtcatctgccggtctgcatggccaagactcagtacagcttctcgaccgaccccgccctgaagggcgcgcccagcggccatgcggtgaccgtgcgcgagctgcgtctctccgcgggcgccgagttcgtggtggcggtctgcggcgacatcatgaccatgcccggcctgccgcgccgccccgcggccgtcgatatccacctggatgccgacggccgcgtgcaggggctcttctaacgccccgattgcacccggctgccgctagtccggaccacgcgatccgcttcgggccggcgcgtctgcgcgcctcgcttgccttaccgccgtgccttggccgcccgacgctggaggcggcagttccccgctgaccctgaagtcagaaacggaaaacgacgggccgcaacccgccgttccgctccgtaaaggagaattttttgcactctagagtgcttgttaacgggtggccctcgatctctaagcggctagcttgcaaggcaccctagaagacaacttacacgatacacgttacactgccaagggtcgatttacttttgtgcagtgcaaccgttggaatttgtccccttcgaggctcaatcgagcttgtgaaacctgtgacggtcatttcgacggcggccctgcccgatagggggctgaatacgatgaaataccggcttggcctggatctcggcagcaattccatcggctggtgcctgctgaagttggaacctcggtgtgttctggatgccggcgtgcgtatcctgacgccgaacgaggaagcggggcgcgatccccagtcgaaaacctccctcgcggccgagcggcgcgatgcgcggtcggcgcggcggcggcgggaccgctttctgcgccggcagaagcggctgctgcaggttctgacggcggccggactgatgccggccgacacagccgcgcgcaaggcgctggagacgctggacccctactggctgcgcgcggaggcgctggaccgcaagctgacgctccacgagatcggccgggcggtctttcacctcaatcaacggcgcggcttcaagtccaaccgcatcgccgatggtgacgatgcggagaagagcgcgaccaagcaaggcatgaaggcgctgcgcgaacggctggaggcggagggcgcgcgcagtctcggcgagctgctcgcgcgccgccaccgccgcgaccgtcaggggcatcggctcagggacggcgggggctgggcggtaccggagccggtccgcttccggccgacgagccagggcagcaagaacctctacgatctctacccggcccgcgagatggtcgcggaggaactggagaagatctgggcggcccaggcgccccatcatcccgagctgaccggcggcctgctggaaagcctgcggcggatcgtgatcgaccagaggccgctcaggactccgccggtcgggcgctgcagtctgcggcccgaggtacagatggtggagcgggcggggctgacgctggaccagggcgagcgtgcgccgaaggcacacccgctgtttcagcgcgtccgcatcctgcaggaggtggccaacctacgtgtcggctgggccggcgcacgcgaccgtgcattgaccctcacggaacgcgacgcgatcgtcgccaagctgatggcctccggcggaaccctcgtcgccttcgacaagctgcgggcggcggcgaagctgccggaggaaagccgcttcaatcacgagctgtccggccgcaagggcttccagcccgaccagacggcggtcaagctcgccatgaagaaggccttcggcaaaccgtggcgcagcctggagcgggaccggcagatcgaggtcgtcgagcggctgctgggcatcgaggatccggaggacctgatcgcctggctgcaggagatctgcaacctggaccccgacgcggccgaggctgtttcggagctgcgcctgccgcaaggccacgggcagttggggcgctcgattctcgccgatctggtggcggtgatggagagccagtctaaggaagcggtcgatcccgaaacgggtgagctctaccgacgccccttgacctatgacgaggcggtcgaggcgctgaatctgcaccattcgaacctgcgtgtggacggcacggtggcgcggcttccttactacggtgcggcgctggcccggcatgtggtctccaaaccggatgcgccggacggcagtcaggagcggatcggccgcgtgccgaacccgacggttcacatcgcgctcaatcaactccgcaagatcgtcaatgccctgatcgaaatccacggcccgccggaggagatcgtgattgagcttgggcgcgagttgaagctgagccgccagcgcaaggaggagatcgagcgggacaaccgggccaacgagcgcaagaacgcggaacggcgcgaacggctggcgaagctgggtgtcgccgactcccacgacgcgcgtcttcggttgcggctcttcgacgagctgccgccggacgaacgggtctgcgtcttcaccggcacgccgctcaacgtcgaacggctgttcgacggctcggtcgaggtcgagcatctgctgcccttctcacagaccctcgacgacagcttcatgaacaaggcgctctgcacccgcgccgccaaccgccagaagggcaaccggccgccggcggaggcctggagcggcgaggtgctgcgggagatcgtcgagcgggccgaacgcatcttgcaaaggaaggcctggcgttttcagcccgacgccatggcgcgcttcgacgccgacggcggtttcctggcgcggcagttgatcgacacccaatacatgtcgcggctcgccaagacctacctggaacaggtctgcgaacgggtctgggcgccgcccggccggctgaccgccatgctgcgcgccaagtggggtctgaacgacctgctgccggaccataacttcaccaatccgaaccagccgaagaatcgcaaggatcaccggcaccacgccatcgatgccttcgtggtggcctgcaccgaccggggtctgctgaaccgcatggcccgcgcttcgggccgggcggagagcctggatctcgaccggctgtttccggacggtggtttccccgagcccttcccaggcttccgcgccgacctctccgccgcgctggagcgcatcgtcgtcagccacaagcccgaccacggcctgccgccgggggcgcaggacaacgtccaggtcacctcggggcaactgcacgaggccaccgcctacggcgaggtgaaggaggagatcgacggcaagccctataacctcgtcacccgtaaacccgtcctgcagctcaccgacggcgacattggccggatccgcgacgcgcgcctgcgcgaagaccttcaggcccgcatggctgcggcggccggcggcggcaagctgacagatgccgagcgccgtgcggtgctggaggccttcgccaacgaccatggtctgcgccgtctgcggattctcaagaccgaggcttcggtgcggcgggtggaacatcgcggcgccgacggacaggttttcacgaaggcctacacccccggcggcaaccaccgggtcgagatcttcaccctgccggacgggagctggggcggcgagggcgtcacggtgcacgatgcgaaccagcccggctaccgcccgcactggcgggaggaatatccgggcgcgcggcttttcatgcggttgcacaacggggacttgcttgaggcggatttcgaaggaaagcacgaaatctaccgggtctatcggctggagccttccgccaagcgggttcgcctcgccggccacaaggaggcgggcagcatcgaccagcgccacaacgatcccgacgatccgctgcgctggatcttcgcgacctacgagcggctgcgcgatgccggagcgcggcccgtccgggtcgatgtgctgggccgggtgtccacgctgctggagccggtcggatgagggcgcgtcggaggtcgcgcgcatgaccggccgcatcgtcgagatcgcggaagacggccggcatcttgctaaaaaccggggattcctgaccgtgaacgcgggcggcgaggagatcggacgtctgccgctcgatgacatcgcggcggtcatcgcctcggcccatggcatcacctactccaattccctgctggtggcgctggccgagcgcaacgcgccgctggtggtctgcgccgccaacttcatgccggccgctgttctgctgtccgccgacgggcatcatgagcaggccggacggatgatggatcaggccgccgcctcgaagcctctgcgcaaacggctctgggcccagcttgtcagcgcgaagatcgaggcgcaggccgcgacgttgaaggttgtgggggcgcggcacgagggcttcgggcttctggcgcgcaaggtgcgttccggcgacccggacaacgtcgaggcgcaggccgcgcggcgctattggccgctgctgttcggcgcggacttccggcgggaccgcgcggccggtgggctcaatgcgttgctgaactacacctacaccgtcctgcgggccggtactgcgcgtgcggtcatgggcgccggtctgcatcccagtttcggcctcgcgcaccgtcagcgcggcaaccccttcgccctggccgacgaccttatggagcccttccggccggtcgcggaccttctggtcttcgaggccgcgcgggccggcatccgcgaaccggacaaggacagcaagccggcgctggccagggtgctgatcaccgacatgagcacggcggcgggcgtcagcccggtcggcgtctgtctgcaacggctggccgtctccctggcgcaatgcttcggcggcgagacgcgaattctcgagctgccgcgcccgacgctgccgctggaggggtagggcgatgccgccggaccggccggccttgagcgggtatcgaatgatgtggctctacgtgatgttcgatctgccggtcggtacgccggcggagcggaaggcggcgacgaagttccggcacttcctgctggatcaggccttcgagatggcgcagttttccgtctatctccgcttcgccgaaagcaaggaggctgcggaaaccctgatcgggcgcgtcggcgatgcgctgccgaggcacgggaaggtccatatcgtcagtctgacggacaagcagtatggcaatgcccgaattttcacgggacgaaaacgcgaacgcagtccgaaaaacccgaaccagcttgctctcttctgagtgcggccaggcgttttcgggtttgtcatggcaagaaaaaaccccggttttcccagggcataggtcaagatctattgtagccgcttagagatcgagggccagccgcaacaagcaggctgaacgcgcgtatgcgtgttctattgtagccgcttagagatcgagggccagccgcaaccatcctttgcagcttcttttcctatgtcgcattgtagccgcttagagatcgagggccagccgcaacgtccgccgcacggcgttggcgcagcgcggattgtagccgcttagagatcgagggccagccgcaacagattttgcacgaggcctacgggccgcgaattgtagccgcttagagatcgagggccagccgcaaccgaaccgtcacgcgctacagtcaccgagcgattgtagccgcttagagatcgagggccagccgcaacagggacgttgatcatgcgcgcggctcccgaattgtagccgcttagagatcgagggccagccgcaaccgaagtgaaaagcgtccacgcgtggcgcgcattgtagccgcttagagatcgagggccagccgcaacgggtaccggtccctcattacccctatatttattgtagccgcttagagatcgagggccagccgcaaccagaagtcacggaacccgctacgcgcgcggattgtagccgcttagagatcgagggccagccgcaaccgcgctcatgtgaagccactgggcaagctgattgtagccgcttagagatcgagggccagccgcaaccgccaaggccgtcatcaagccttgagcactattgtagccgcttagagatcgagggccagccgcaactcctagcgcgttgacgcttcaagtccgggattgtagccgcttagagatcgagggccagccgcaactacgaggtcctgtgatgacgccgacaataattgtagccgcttagagatcgagggccagccgcaacaaggtgtttctgcacggcctcgcgacgcttattgtagccgcttagagatcgagggccagccgcaacgccggcggcgtcgtagacttcgaggccggcattgtagccgcttagagatcgagggccagccgcaacgatgcggctatgcacgcgcgcctgccccaaattgtagccgcttagagatcgagggccagccgcaacgagtaggccacgctacaacgagtgatgcgtattgtagccgcttagagatcgagggccagccgcaaccctgaggtcgcttgaccggtttgtcctgttattgtagccgcttagagatcgagggccagccgcaacgagccggccacgctacaacgagtgatgcgtattgtagccgcttagagatcgagggccagccgcaaccgaggcgctggtcctggcggaactccagggattgtagccgcttagagatcgagggccagccgcaacacataaccgtcggcccaggccggcaggctaattgtagccgcttagagatcgagggccagccgcaacggaggtattcgacggccgaagggttggcgaattgtagccgcttagagatcgagggccagccgcaacccccggaccccagggttcttggccgacctactggagttgcgtcgcactctgacgctacgggttatcgtgatcttcggtgccgtgaacgccgcgctcttcgcgcttctgcgctttgcgtgattcacgcgtctgcgctttctatgagggtgcggcagggccctgccacgcctgctgtccgaagcttcgtggtatagaatcaactcacgctgtctgggtacggtcgccgctttaaagatcggacccttagcggaagcgattgacgccccggtcgaggcggcgcaggcgatcctgggtgcggaaatcgtgggggttgccgcgctgctccagccggcgccgctcgctgttcagcttgctgcgctcgagcaggcgctgcccgctgtcgcgagccggggcgaccggcatgttgagggggcgcagatcgcgggcatcggggatggtccgctccaccggatgaggcgggacccaggcctcctcggccgaagacgccgccgcgtaaaggatgactacagatgctatgcacgtaaagagtgcatgccgcgataatagaaaaagcttcatgaatcccaaatgatgctctgaggcaaaaaaaacaatctgacgtcgttcacgacttgtaaaccgccatggcctaagggtatcactccattatacgaatcctcagagagccaagggagtaaggtcgggtcatgcagcttcccagcctggtgaagtcgattctcgccgcctccgcgacggttgccgttttgatggcgccggcggcggcggacgacttgaagcccgtctacctggatgccgtgatcgccgagggagctacgccactgtccgacgtgtccttcacggtcgaacgggttcagggcggcgtggtgcaggagatgcgcggcggtggcgccgaaatgcagctcccggcgggtcgctaccgggtccgcgccgccttcggccagaccgaggtcgagcgcgacatcgtcgtcgatgccacgaacacccgccacacgatcaacctgaacgccggcgaggtgcagctcaacatgatccatgggatcggtcaggatccgatccgcgatccgatccagtgggatgtcatgaccttcgggcgcgacgccaccggcaatcgccacctgctgcaccaggtcacagcctcgacggcgcatctgaccctgccgggcggctggtactatatcgaggccacccacagcggccggacggtcaagcacaccatcgaggtcacgccgggcgccgccttcaagtacttcgtgatgaaacagtaggcgtgccgctgccgcgaggcagcgctgccggacaagatcgaaagggccgtcgcagcgcgacggccctctttcttttcatgacagtctgccagacccaggctgctagagcgcgatcgtctcaggcggaagcgcttcgcgtccgcctgagacgtgaatcgcccacgaacctgatggtgagagtaggagtcacgccccaggtgggatcgccagagcgagtccacctggggcgatcttgctctaaacccaggggcagtggctgttggaggagccgaaggtggtgccgccggcgaagcgggtgaaggcgaagggctccagctccggcacgcggttctcgccggccaggaccttggccaccagcttgccggcgccgatcatcttgaagccgtggttcgagtccgcgaccatgtaggcgttgtcgagcacccagtcgaagatcggcacgttgtcgggggtgaaggcgccgatgccgccgttgcggcggtccttgaacttgctccgctgacctttgaaacgcggcatcaggtagcccatggccgagacgaagtagtcggcgaaccagtcatcggcctgataggcgtcgttggcgtggccgtaggggtccagcgtcgcgctgttgccgatcttgatcgggatggtgccgccctgcaggccgatggtctccatgcgctcggcggcattcttccaatagacgtagaggtgatcgctcatctcctcgccggtcgtctcgttgatcaccggcgtgttcatcagctccacgtgcaggaccggagggtcgcggtcgtcggccgtgcggtagggccggtcgacgtacatctcgccctcgagcagccgccagtaggtccacatgtcctgggtgaccgtgccgccgtccggatagtggcactccagttcttcgggcagacccagcagatcccagtgcttgcccatccaggcgccgaccgagagcaccacgacctcggccgagatcttgccgaggttggtgtgcagccggcggatcgtgcgcccggccaggtcgtagccggtgacttcgactccggccaggatctcgacgccgtgctgggcgcacttctcggccagtccggcgacggcctgacgggtgccggcgtaacccgagggatgctcgaagtgcgccacctcgatgcggtcggtgttgaagtccggccagatggatttgagaaagctcttggcctcttgcccgacgtagaggtcggagcggtagccgcaggcgttgtggctctccaccatcgactcgtagtcggcttgctgattggcttcgccggcggagatgtagccgacctgctgaaagccgaagcggatcgggtcggactgccagacgtcgaccgagtggcgcaggatcggatgcagctccttcgtcatgtagaggttgcgcacgcagccgcaggcgattcccgtggcgccggcgcccgggccggtcttgtccaacaccacgatatccttgccgctgccctgaccgcgccgttccaactccatggccagatgccaggcggtggacaggccgtgtatgccggcaccgacgatgacgaaacgcttgctttcgggcagaacggacatcccaggattctcgcttcaagggttgcgggaaggggtgactgactctcgagctatatcgtggccggctctttgcggtccatgccggcaacgtcggatttggccgcgaacgcgacgcgctctccgccgcggccgtcgcgggcaacgccgcccagcggatgcagcgacggttcctttggggtgacggcccagcggcgcaggatggtgccgtatccggccaggtagtagccgtcgttcgccctcagaatggcctcccgctcggcgcgccagacggccggaatgcggtaccagggcaggcgcgggcggttatggtgaacggagtgcagattgttgttgaggaacagcagggacagcagcgggccggtctccacgatcgccgttcggcccgcgacgtccgggtgcgcgcgatgttccaggaaggagcgcaggtgggccagagcgatgcccggatagacgtagagcagcaggagctgccagaacgagaggcccgcgacgcccattgcccaggtcaggaccaagccgacggagacggcgtgcagcgcccagatccgcgggcggcgcggatcgccccgcagcagacgcagcgattcgcggcgatagaagccggccacgcagaaaagcgggccgagggccaggcggccgatcaccgtgttgcgcagtcgcagcgacgtccgctcgaccccgcccagcagagcccagcgggccggagcgatgtagtagctctcggggtcctcggcggggtcggtcagccagcggtcgcggtgatgccgcaggtgggtttcgcgatagatctcgtagggcagccaaagccagaggttgggcagtacgatcagccggttcagccagctccggctggtcgggtggccgtggaccacctcatgctgcagggaggcgtgccaggcgatcaggtagctgccgaaggccagctccagataccagggcagggcggcatggaaccaggtgacgagtccgaagccgccgtagatcgcggcggcgacggccagggtcggccattccagttgcaggccgcgtttgcgtgcaggaccgtgtttggccgcggaacggtcggtttcgggtttcctcgacgcccggtgagcgggcatggttagccttgcgggttttcgggcagtgtcccgaacggtggctcgggtgtgacagactaaggacatgaaaaggctcgcagaatgaagggtggcagcacctctcgatgggtgaattgacaccaatatatgggcaagaaccgttgcgttgagtatacgcaacaagtgttgacaaaatacaacgaaccgttcacgggcacaaggcctgtggcgcaggttctgcgggcgaggagtatggtcgggcatgaccacggcaaaagacgacctgattccgccgtttcgagaacgcttggccgaggtgatcgagcggtccgggcaatcccgcgcggccttcgcggcggcgatcggcctcgatcgttccacgctgtcgcagctgctctcttcggaaaacgagcgccttcccagggcggagaccgtggtggctttggccagggaggccggagtctcgaccgactggttgctgggcctcagtcagtcggctgaaatcggcactcaggtggtggcgaaccagttggagatcgagggcggcgccggcgatcccttggacaagcgtttgacccgctggcacaccgaagcggttggctcgaagatccgctacgtcccggccactctgcccgacctgctgaagaccgaagcgaccatcgacttcgagtaccagcagctcagcccgcgcgtgcaggaagcacagcgcgagcgggcggaggcgcggctggcctacagccgcagaccggaaaccgacatggaggtttgctccagctttcagatgatcgaggccttcgcacgcggcgagttcatctggcgcaccatgccggtggcggatcggcgcgcccagttggaacagatggccaagctgctggacgaactctatccgaccttccgctggttcctctacgacgggctgcagcgcttctccgtccccgtcacgatctacggactgcagcgcgcggtgctctacatcggcggcatgttcatcgtgctgcaggcgaccgagcacatccgcgtgctgagcaagcacttcgacgatctcgtgcgggccgccaccgtccagccgccagacgtgatctcgctgatcgagggcctcttgcgcaaaagcaaatgagccttgcctccttgccgatgtacgacctgccggaactgcggtgggcgacggatcgcgtctggcaggccgtgtccgggcgcttgcggatcggcggcttcgcggaggcgccggcggcgctcacccgaaccttgagcctggccgagacctggtcggacccggacctgctgttgagccagacctgcggctatccgctgacccatgctttcgcgggccgcctgtcgctcgtggccgtgccgctttacgacgccgaaggctgcgagtcggagagccgcttcggcccgacctatcgcagcgccatcgtggttcgcgtcgacgactcggcggaggcgcctgccgatctgaaggatcggcgtgccgcgatcaacgattgggactcgcagtccggcatgtcggccttgcgggccctggtcgcgcccttggccgaaggcggccgcttcttttccgaggtgatcgaaacgggagggcacgccgtctccgtcgaagccgttgccgaagggcgggccgacgtcgccgcgatcgactgcgtcacctgggcgctgctcggtgatgtccggccacgggcgctcgagtctctccgcgtcctgacctggtcggttcgggcgccggccttgcccttcgtgacgtcgcccggtcgtgccgcccaggcggcccgcattggaggtgcgctgacggaggcgatggaggaccccgctttgaccgaggccctcgccgcgctgcggctgatcgcggtcgcgccgcccgagcgcgccgactaccgccgtatcctggagatcgaggcggaagccgaagcgcatgggtatccggtcctgcgctagaacgcgccgcgatagcggagggatcaactgggtttggtcgtctcgtagcgcgttatcaaatcggcgaaggcttgtttctcccgggcgctcgcgcgcatctgctcgatcttgtcctgtacgccgctcaggtcaccgccgtctccggcaacgacgagcatcaccatgccgtactgcccatggcgtttgcacctgaagccgtaaagccccgccgtcgggagagagaccagcgcttccttctggttggagattcccacctccggcacgccctcgggccagaattgcggaatggaatgaaccgtgtgctcgccccgactgttcaagaaggcgatctcggcgcctggatcggccagaaccagatccggcgcgaagcgaaacatatccgtcgccgcggtcgcactcacgtctgtgatctgatcgatgctctgaatcggcgactcactgccttgggcctgcgacgcgccaccgcagcaaaccgctgcgacgacgatctgcagggcgcgacgccggtcgataacgtgggaggttccagccatgagagttcctctattttcaccataaggcttccgatccgaactctccggtgtcgcacccgctttttgcctcgtgcgggctgttggctggagactacagcgcttgggggtcttgagcgataggggcttgccggatcgccaagccgaagtgtgctggccgggcctatttctaccgacctgtgggaggctggcccgctccgctgcggtcgatcgccggttgcgccgtccgggcgcgccgattacagcggtaacctcgacacctgaaccggggctgtggcgttgggctctccgtttccgcgccggggccatctgccttcaacgataaacagccgggcggaacaccgtccggagtgagaggactgccgagacgccatgactgacctctgcgaccgttccgccgtcgagctgcgcgccctgatgcgccgccgcgagatttcgcctgtcgagttgctggactcctgcctggctcgcatcgaggccgtgaacccgaagctcaatgccgtcgtcgccctcgacgcgccggccgcgcgcgccgcggcggaggccgccgaggcgctgttccgggtcggtgacggggtgcacccgctgaccggtctgcctgtcggcgtcaaggacctgaacgaaaccaagggactgcgcaccaccttcggctcgccgctctttgccgagcatgttccggccgcggatgccggagtcgtgcgccgactgcgggccgccggtgggatcgtggccgccaagaccaacacgccggagttcggcgcgggcgccaacaccgacaacgccgtctacggctt

SEQ ID NO: 3245 - DNA, 23348 bp, synthetic construct
  misc_feature 1..23348: note = Synthetic
  source 1..23348: mol_type = other DNA
tcgcgcaacgcttccctcaccagctgtccggcgggcaacagcagcgtgtgggcgttgcccgcgcgctggcaggagagccgccggtactgctgatggacgagccgttcgccgccgtcgatccgatcgtgcgcgcccgcctgcaacaggagttcctcgacctcaagaaacaggtgcgcaagacgatcgtcttcgtcacccatgacgtcgacgaggcgatcaagctgggcgataagatcgccattctaaaggaaggcggccggttggcgcagtacggccggccggtggacatcctggcccgcccggccggccggttcgtcgcggactttgtcggccgcgagcgcacgctcaaacgccttgccctgatgaccgcggacagcctcgacgtcaccgccggcaacccggtcgatcccgatgccgacgccgccgtggtcgaagccgcggccgaagaagccgggcaaccatgggtgcccgtggtgggcgcggaccggcgattcctcgggtggtgcgacagccgccagctggtcaacggccacaccgcccggcaaatcgttggcgggcccgagatcgccaccgtcggccccggggacacgttgcgcaccgcgctcgacgccgccttgtcggcggaaagccggtcggtcgtccgggtcgacgccgccggcaactatctgggggtgatcaccctcgaccggatcgcggaggccgggctgtggagctgatccgctggtcctgggtcaggaaccacctggacgacatcggctggctgttcgtcgagcatatccaactggccagcctggcactcctgttcggggtcgcgatcgccttcccgctggcgctcgccgcgctgcgctggccgcgcctctacggtccgctgctgggcttcacgggggtgctgttcacgatcccctcgctggcgctgttcatcctgctgatcccctacaccgggctctccaaggcaacctcgctgatcgggctaacgatctacacgctcctgatcctggtgcggaacatcgtggagggactgcgcggcgtctccccgcacgtgctggaggcggcaaaggcgatgggcctgacccgcacacagcggctgttccaggtggaactgccactggcgctgccgatgatcatggccgggatccggatcgccgccgtgaccacgatcgggctggtcacggtcaccgccctgatcggccagggcggtctgggccgcctgttcatcgacggcttcacccgcgacttcgccaccccggtgatcgttggcttcgtgctgtcggtcgcactcgcgatcgtggtcgacctgctgctggtccgcctgcaaagcgcgttgacgccgtggcatcaggaagcaagcgaccgctagggcgtgatcgcgcgctgtcgacgggcgaaaccggtgttacctgccgtgccgccggcgtccgacagccccaagcgccagcagaccgccaccgaacagcaccagggtgccagggcccagcaccctggtcgttggaaggtcgccggcaaatggctgctgatgcacttccccattcaggaccaggctatcggcgatcaagctgccttcgatcgggctggtattggtgacagccgcattaggcgccaggacggagccgaagaactgggtcccgaacgtcaggctggtcacgtcactgaagttccagaggatattgtccgccaaggcaaacggaccccccaggaaattatcgctgatcgtaagcgcgcccgtcccggtgacgttgatcacgacggtggtcgcgccgttcaggccgagctcgatttcgttgatggcgtcgaagaaactcgtatccacgttgtagacggccagatcattgccatccgggatcgcggtattaaacaggccccggttgccggacaaccccggcgcaacaccggcaagccccgccaaatcggccgaggtcttttgcagcgccgcctggaaatccgggatcgtgaccgcttggttggcgttgacggtgccggcatgcaccgtcccggtcaccgcaccccccaggttcagggtgccattgccgttcaggttcatgttctgaacgttgccgccgaccgtcgcatcgccaccattgttcaggttcttgaaaccaccgccagaaacgttgccgccgacgatcagctcatcgaacgttgagatgggcgcggcgcgggtgttgaaggtcattgagccgccggtcaggtttccgccgatcagcgaacgcccttcaacttccgaagtgcccgaaaggtcgccgaacacgaccagattgaattggtccagaatctcggttgtcgtcattggcgcagccgtcgccccgccagcccccgcgaccatggccacgacaccagcaacggccgcaagaatggccctattcaatacagtcggtttttgcatcataccccgccgcctcctgagtacagttcgataagtcgatccagaaaataatttctattcgaaaaccccggaccgcccgccccacatcgcgaagcttcttaaagcaagcgccatgccagaccctaacccattgatttagcgcctaccccgattgtgttaggagttcatctgttgggatattttacaccttaagaagatactggcgcagaactgtaaaaaccttagacacaaccggggacgcaaacgggcgggtgaatttctacgaaatcgccccccaagacccaagccaaccaggcgaaggtcgggacgtcgccactggccgtatgcccacacagcgcacgagaggccgtcaacggagttgaagcaaaccagcggtctattgggaccagcgggacgttcccgcattgcacccccgccggttaatcgccaccctcgcgctgccttttccgttcatagcagttgcgaggtccgcgcccctatggcgaatgccaattccaagaaggtgatctacgccgccctcgcgggcaacgcgctgatcgcggtgaccaaattcgtcgccgccgggatcaccggctcctcggccatgctggcggagggcattcactctgtcgtggacaccggcaaccaggggctgatgctgcatggcaccgcccgggcgaagaagccagccgacgagaatcatcccttcggctacggccgcgagctctatttctgggcgttcgtggtggcgatcctgatcttcgcggtgggcgccggcgtgtcgctgtacgagggcgtggagaaggtgctgcacccgcacccggtcaccaacccggtcgtcaactacgtcgttctgctgcttgccatggggttcgaaggctgggccttctcggtcgcgctcaaggagttccagcagaccaagggagatcgcggctatatccaggctgtccgcgagagcaaagaccccacggtaatcaccgtgctgttcgaggacacggcggcgctctcgggcctggtggtggccttcctgggcgtgggtatggcgcatctgttcggctgggcggtgatggatggcgtcgcctcgatcgtcatcggcctgatcctgggcgtcaccgccttcctgctcgcctacgaaaccaagggcctgctggtcggcgagtccgccctgccgcacgtcaccgccggaatccgcagcctcgttcggaaagagagcgacgtcgagcgggtgaatcaagtgctgaccctgcaactcggcccggacgacgtgctggccaccgtcagcgtcgaattcgccgacggtctcccgaccggacggatcgagcagacgatcgcccggctcgatgccgccatcaaacaggcccagccggaagtcacccgggtctatatcgaagccgaaacggcgaggtagagccgacaagacgttcatggcgccctgtccaggtcccgcatcccggccccagcacggctgttccgcaatgggcgcgtgacatagatcatttggaccctgaacatttttcggtaagtgagcctggtcccgaaacgaccgtttgaggcagacgggtcctggcaagaagtttgtgtccgcgcgcgcggaacagaactgccattgccctgcacgatattcgtataagcgaccgccggaggtgagccagatgcgaagcgacaccgccaaccggcatgtcattctgtccggctgttcgggtggcggaaaatcgacgctcctagccgagttgcaacggcggggcttccagaccgtcgaagaacccggcagacgaatcgttgcggaggaacagcgcggcgccggaaaggcgctcccctgggtcgatctcgaagcgttcgcgcggcgggcgatcgagatggcctcccgcgatcggcagcacatggatggcgcgcaggcgtgggtcttcttcgaccgtgggcttgtcgatgcagccgtcgcgttggagcacgcgacgggcatcgccgcatccgacaccctccgcgcaacagactgctttcaccggcaggtctttctgaccccgccatggccggaaatctacaagacggatggcgcgcggcagcatggtatggacgacgccctcgaagaataccatcgactgctcaaggctttcgacagcctcggctacgatacgattatcttgccaaagatcgatattaatggacgcgcggatttcgtcctgaactgcctttcctgacagtatgggcacctccgcaaaactgagccgcgctgcaggatgcaccaaaacgcgcccgtttgcgccgtcagcaatcacgactcattccggcgatggaattaatgcaccgcacggtttgccctgggaccatcggcaagccgcgcaaggcacacgcgaacagggatgaccaccttggccatcgatgcccacccgaaagccggtgagcggcctacgccggctacgaaaaccgcgctacaggaccaccgttggccgccgcgcgtgggcctgcacccgggcctggtcctgacgctctatctcgtgctggcgctggccccggtcgcgatcgccgcggcacacccgctaccgccgcggcctttctgggacgaggtggccagcgcactcggcctgtcggcgcttgccatcatgtgcctggagttcatgctgtccgggcgttaccggagcgtgtccgggcggatcggcatcgacctcaccatgcggttccaccagttggtggcgctctcgctggtcggcttcatgctggtccaccctttcgtctattcgaccccgatgggccatgccctgccttgggacaccgacgcgcacttgcgccttggcctcgatacctggtcgatcgccaccggcgcggtcgcctgggggctgctggtggtgttggtggcaaccgcaattgggcgacgtctgctgccctaccggtacgaaagctggcgcggcgcccacgcgatcggcgcggtcctggtgaccggcctggttgctcatcacgcgctcgccgccgggcgctacagcgcgcaacccgcgatgatcgtcttctggggggcgctgctgacgctggcgggcatgacgctgatctacgtctacatcatccgatcgatccagcagaagcgtgcgccctatgccgtgcatagcgtggaatcggtcgccgccgatacgtgggaactgcgcctgaaggcgcgcgacggcgccgggacgcacgggacgctgcgcttccagcccggccagttcgcctgggtgaagatcggcccgcatcccttccgggtgcgcgagcaccccttctcgatctccaccgcgcccgagcagacaccggagatcggcttcacgatccgcgagaacggcgacttcacccgtcacatcggcgagatcccacccggcacgcccgcctatctggacggtccccacggcaacttcgtaccggacgcggaggagatcccaactgtttacatcgccggcggcgtcggcatcgcaccgatgctaagccacctgcgcgcctttcgaaccgaaggcgaccgtcggccgatcaccctgatctatggcaaccgcacggtggactacatcgccagcaaggccgaactcgaccagatggcccagcacctgaacctaaaggtacactacgtgctgcaggagccccccgaagactgggacggccccgccggcatgatcacgcaggatgtcttggacgcttgcctgccccgtgaaagccggcgggtggcccgctacttcatctgcggccccggcccgatgatcgacgcggtggacagggaactacgcaatctggacgtgcccgcccaccggatcatctccgagaagttcgactacacctaatttccgggaccaaccgccatgcgccagcaactcgtgctcgccgtcttctggggcaccaatgcactcgtactgctatccgcactcgcgttcgcgctccgctaggcgtcggcccagcgacacgcctgtccgactcaccatacgtcacaaggcccgtttcctggggaaacgggccttggtggatgcggctgggtggatcgaacgatccgtccccggtcgttaggtgacggctcgttaagtgacggcccgttaggtgaccgccggggcctgctcgaccgcctgctccaggtcgaagaagctgggctgaacggccgtgggcacgttgccacgcccgatctcaacggcgagctggggaccggcgccctgagcgatcgcgaccagcacgtccttgatcacgtgatagaagcgcgaatcgtcctcgacgatctgcgacaggcgcgaggacagcggtccgacgaagccataggccaggaacacgccgaggaaggtaccaaccagcgcgccaccgatcagtttgccaaggacttccggcggctcgttgatcgaagccatcgtcttgatcacgcccagcaccgccgcgacgatacccagcgccggcagcgcgtcggcggtcgtctgcaacgcctgcgcgccctgcatgtcctcgtggtgatgcttttccagcagccgatcgatgtagtcgtcgatctggtgcgggtcctccaggttgagcgtcatcatccgcagcgtgtcgcaaatcatcgcacaggcgaagtggtcgttcagcaccttgggataggtctggaaaatctggctctccgacggttgctcgacgtgttgttcgagaccgagcgcgcctttcttcttgtagacattggccagcgcgtagagcaggcacagcaggtcctgatagtccttctgcttccacttcggccctttgatcacgcgcagaacgccaccgaacgtctgcttcacgaccttcatcgaattggcgattaacagagcgccaagggccgcaccgccgatcatcatgaactcgaacggcaacgccttgatgatcacggacatctttccgccggctagcagatagccgccgaaaacgcccatcacgacgattcccattcctccaagcgacagcacgatccaaaccctttcgacggtgacgtctcatccaacggccgcagttttcgcgacgcaccattggtgcaccggtttcggttacctttggattaaagctgatcgatcgtcccgcccgctggcgcgacactatccttttgagcggggcaaacactcatacctatacgagcgttggtataggcatttacccggcatcggacgtaactttaggcgtgtcgggaagctgcccggcacgcctctgtcaccacgacattccgggacgccaattctccatggcccagcacgctccaacttccccaaccgccggcaccattctggtcgtcgacgacgacgcgctcgtacgcgacatggtgcaaaccgccctcacgcgcgcgggctatcgcgtcatcttggcgcgcgacggcaacacggcgatcgagctcctggacattgcggcgcccgacttgattctgacggacctgttcatgccccactgcgacggcatcgaattgctgcgctcgggccagctgtccaaagtggatgtccccgtgatcgcaatgtccggtggctatgcaggcatcgacatgctgcatgccgccaaagcgctgggcgcggtcgccgcgatcgccaagccgttcatgccgaacgaattaaccgatctggtgcgccggacgctgacgacaccggaagagccggcccgccccacggcgccagccgagcagccctcgcggatggctgtggcaaacacctcctcccgatagacgaagtcgcctgcacggcaacgtcggcgttgatcctctcccccgcggcatgctcaatagagacgggcgcggcgatacgaccgggccctgacgcggccatgcggggaagtgaacgccatgatgaaaccctgggacatactcgccattctgatgtacgggctggtcgccgccctggcggccttggccgcggaacagacgaattcgctggatgtcgtgttctggggcattttcggcgttggcgcggcgttgttcctggccggtctgttcaagcgcatcttcttggcccgctcccgttccctgcccgaagaggtcgccgacgtcgcgggggttgaggccagccgactgaccgcctcgatggcgatgggcctgctgttggcggctgttagcggcggcctgctgtacctgctgtagccaccgcccctccggcgcgcgcacaagtccaaacgcaaacggcgggccgcagcccgccgcgcgcccctccaaaacagaggagggattctgtgcactcaaaggtgcttgttaacgggtgacactcgatctctaagcggctaacaaacaacacccgtagcaatactctccgatgtccaatctttcctgtcaagcgtgttgcgatcgcctacacggcaacctgctcaggttaacgcggtgaggtacggatttcgctggtgccgacgcggagcggtttgattcaaacaggtttccccggttcgaaaggagacctgcggatggatcaggcgccgccccgcgatagtctgcgcctcttgttgcagcacttcagccgggtcgaggatccccgcgatccgtggcgggttcgcttccagctgtcggagctgttgttcctggtgaccagcgccaccatcgctggatgcgatgactacgacgagatcgtggcttggggcgacagccacgtggcgttcctgcgccaacacggagagttctacttcggcgtgcccaaggaggactggctgcgaactgtgatgaaccggatcgatcccgcgctgttcgaggcggcgttcatggcctgggtggccgacttgcggccagatggccccgaggtcgtcgcgctcgacggcaagacgttgcggcgcagccacgataccaatgccgcccaggcggcgcttcatctggtctccgcctgggcgtccaacgagcgcctcgtcctggcgcaggaagccgtgccggacaaagctaacgagaccgcagcgatccgcgccattttggggcgcctgccggtcaacggcgctttggtcactgtggacgcgatcggcgccacgcccgcggtcgccgccgcgatccaggaggccggagcggattacgtcgtcgcgctcaaggccaaccagcccagcctacacgcggaggccgacctcttcttcaccgaccccgccagcgccgggctgcccagtctggaggtcgtcgacaaggaccatggccggctggaaacccggacctaccgggtctgccatgatatcgcgtggctcggcggcaaccggcgctatcccggcgaaccgcggtttcccggcctggcctgcctgatccagacgacctctcgcagcgagaaggccggccacgtcagcgagcagatccggtactacctctcctctgccaaactcacccccgagcgcgccgcccaggcgatccgcggccactgggggatcgagagtctgcactgggtgctcgacgtgaccttcaaggaggacctctcacgcctgcgccgcgggcacggcgccaagaacatggcgctggtcaggcgcttcgccttcaacatcctgcgacgcggcaaagacaaaaactccctgaaaaccgcccggaaaatcgccggctggaacaccgactacctccagaagatcctcacctctgccgcccgttaacccggactcgttgccgtgcgatcgcctagcacccctgtcgaaatcacgaccgacacgctagtatttcttggctaagacgcggatgtggcgagcgcggcgccacaggcatggggcgagcatgggggtgcgataatgcaacagtaccggctaggactcgatctgggcagcaactccatcgggtggtgtgcccttcatctggaaaggaccaccaccacagatggccggccagcgcatcagcccgtcggcttgctggatgcggggacccgtctgctcaccccgcaagaagaggccggacgcgatccgcaatcaaaggaatcgctggctgcagaccgtcgagctgcgcgcagcgcccgtcgacggcgtgaccgcttcgttcgacgtcagcggcggctgatgcagacgctgatcacagccggcctcatgccggaggacgtggaaaagcgcaaagagctggaacggctggacccttactggttgcgcgccgctgcgttggaagggccgctcaacgcctatgaattgggccgcgcgatcttccatctgaaccagcgccgcggcttccagtcgaatcgactggccgataatcaggacgccgagcagggcgccatcaagcaaggcatcgccgagctcacgcaggccctggatgcagaagctgccacaacacttggacagctgctggcgaagcggcacgggcgcgacaaatatggccaccgcaccgaccaagctgaaacgcctcagacggtccgtttccgtccccagcgtaatggcaccaaggtcacctacccctggtacccctcgcgccaactgatcgaacaagaactggacgcaatctggcaggcgcaacagccccaccatccccagctaaccggcgatctgctgcaggacatcaagcgcattgtcattgagcagcgcccgctgaagacaccaccggtcggccgctgcacgctgcgcccggcggtcgcggaggtcgagctggatggcgtgacggtcgaccttggtgcccgcgcccccaaggcgcatccgctgttccagcgcttccgcatgcttcaagacgtggcacaactgcgcgtgatcgcccggcccgggcagccggcgcgttatctgacccttgaggagcgcgataagctgatcggcgtactcagttgccgatccaccaaccgcgtgaccttcgagagtctgcgcaaggccctcaagctgccgggcgaggcccggttcaattacgagttggccggccagaccggtttcccgccggaccagacagcggcaaaactcgcccacaagaacgccctgggcaagcagtggccggccctcccccgcgaccgccagattgccgtcgtcgaacacctgctcgccgtcgaggaccccgacgccctggcggaatggctgcgcgacacccttggtatcgacaccgataaggccaagcacctgaccaccgtgcgcttgcccgacggacacggacaattcggacgcggcgtgctgcgggatctggtccaggggatggagacgcagtcccgcgaggacgggggcgatcccgagacgggcgaggtctatgcccgacccctaacctacgatgaagctgtcgcggcgatcggccaccaccactccgatcaccgccgcgacgggcttgcaacgcgcctgccctactatggcgaggcgctgccccgtcacgtgatctccaacccggccgcgccggacggttcgcaggagcgggttggccgggtggcgaacccgaccgtgcacatcgcgctcaaccaggtgcgcaagctggtcaatgcgctgatcgatagctatggcccgccgacagaagtcgtgatcgagctgagccgcgagctgaagcagaaccaagagcaaaaggccaaggatcagcagcgcaaccgggagaacgagacccgcaacgagcaacgccgcgcccgactggcggagctcggtgtgcctgtcagccgcgattcgatgctgcggctacgcctttacgaagagctgcctccggacgaacgggtatgcgtcttcaccggcaccccaatcggctgccaagacctgttcacgccccagatcgaaatcgagcatattctgccgcactccaagaccctggacgacagcttcgcgaacaaggtgctgtgcacgcgcgaagccaaccgccaaaagggcaagcgcccgccggtggatgtctggtccgggacggagttggaagagatcgtcgcccgggcccagcggatcgtgccggcaaaagcttggcgcttccagccggatgcgatggaaaagctcgcagagcacggcgatttcctcgccagacaactgaacgacaccaaatacatgtcgcgcctcgccaagacctacctggagcaggtttgcgaccaagtctgggtcgtgcccggacggctcaccgcgatgctccgcggcaagtggggtctgaacgtcctgccacgggaggataatcgcaaaaccgaagcggaagccgagagcgatacagcggcgaaaaaccggaacgaccaccggcaccacacgatcgacgcctttgtcgtcgccaacaccgaccgcggcctgctgaaccggatcgcccgcgcctccgcccaagcggaagaactcgacctcgaccgccggtttccgcagggcgcgtttccggagccctaccccggctaccgcgacgacctgtgggcccggctgcggacaatggtggtgagccacaagcccgaccacggcctggcccccggcgcccaggccgacgtgcatcaaaccgccggccgcctgcacgagcagaccgcctatggccgggtcgacgaggagatcgacgacaagcgcttcaacttggtgacccgcaaaccggtgacggacctcaccaacaaagagatcggccagattcgcgacgcccgcctgcgggagaaactgcacgcccacttgcaggcggcagaaacgcgggaaggcacattgaccggcgcacgccggcgcgccctgctggatgaattcgcccgggaccagcaggtctaccgcgtgcgcctcctgaagaccgagaagtccgtgcgcaccgtccgccataccgacagcctgggccggaccttcgagaaggcgtacgtccccggcgacaaccaccgggtggagattttcgagctccccgacggcacctggcagggcgaaggggtgaccatgcacgacgccaaccagcccggctacacgccggactggccagataagaatccgaacgcccggctcgtgatgcggctgcacccgggtgactgcgtcgaagcggatttcgacaatgggctaggcagctgtgtctaccgcgtgcatcgcctggaaccctccgcaaaacgcgtgcgtctcgccgcccataacgaaggcggcagcattcaagcgcggcatgaagacaaggatgatcacctgcaatgggtgttcgccacttggagcaaactgaaaactgccaacgcccgacgcgtccatgttgacgttctcggccgggtcaagcctgcacgcgatggagagccccggtgatcgggcgcgtggtggaggtggcggaaaccgggcggcaccttgccaaggaccgtggcttcctgaccgtcgccgccaacggcgcggaaatcggccgcgtgccgctcgacgacgtggtcgcggtgatcgccagcggctatggcctgacctactccaacgcgctgatcgccgccctggcggagcgcggtgccccggtggtgctgtgcggatcgaaccatttgccggctgccttcctgctgccggtcgccggccaccacacccaggccggccggctcgccgaccaggcggcagcgccgaagccgctgaaaaagcggctgtgggcccaactggtccgggccaagatcgccgggcaggcggaaacgctgcgtgccgtcggcgcaagccacaccggtttccaactgctgcagcgcaaggtccgttccggcgatccagagaatgtggaggcgcaggcggcccggcgctactggccgctcctgttcggaccggacttccgccgcaaccgcgacatggacggggtcaacgccctgctgaactacgcctataccgtgctgcgcgccggcacggcgcgggcgatcatggcggcgggcctgcaccccagcctcggtctcgcccatcggcagcggggcaacgctttccaactggccgacgacctgatggaaccgttccgccccatggcggacctgttggttgccgatctggtgaacgacggggcggaaaccgtcgaccgcaccaccaagccggacctggcgcgaatcctgaccctggacatgagcacgacggacgggatgaccccggtcggcacctgcctggaacgcgccgccgtgtcgctggcgcaatgctacgccggcacggcacgtgaactggacctggcacggcgggtaccgccgctgctggcttgacccatggcccggtcgtatccggcactcagcgggtatcgtctcatgtggctctatgtgatgttcgatctaccggtgggcaccaagcgggaacgcaaggcggcgaccgactttcgcaacttcctgctcgacgaaggcttcgagatggcgcagttttccgtctatctccgcttcgtcgaaagcaaggaagcggcggaaacgcgcatccagcgcattcgcggcagcttgccagcaagcggcaaggtgcacatcgttaccctgaccgataaacaatacgccaacgcgcgcatttttacgggacgaaaacgggaacgcggccgtggaaatccaaaccaactcgcccttttctgaccgccaaacgttcaaattcgcccattggctgggcaagaaaaagcccctgggtcaggggcttagcaaggtatctattatagccgcttagagatcgagcgtcagccgcaacctgggaggacgcgcacaatcgccaccaggtattatagccgcttagagatcgagcgtcagccgcaacccctacggtcgtggcccatttgatgcctggattatagccgcttagagatcgagcgtcagccgcaaccgcagaagaggtgccttactgatggcggaaattatagccgcttagagatcgagcgtcagccgcaacacgccgacgttgccgaagcgcagcgggcgcattatagccgcttagagatcgagcgtcagccgcaaccatcactaccggctggcatgccggggcttattatagccgcttagagatcgagcgtcagccgcaacttgcgtgtgccggtcgtcgtgggcgtcgtcattatagccgcttagagatcgagcgtcagccgcaacactcgacgccggcgtcggcgttgccggccgattatagccgcttagagatcgagcgtcagccgcaaccgagcggatcaccgtcgagatcggggcaccattatagccgcttagagatcgagcgtcagccgcaacttcgcaggggtcgacgtgctctcgaaaccattatagccgcttagagatcgagcgtcagccgcaaccgtctcgaccgcctaccgcggccaagagcattatagccgcttagagatcgagcgtcagccgcaactcccacggacgcgcagcgaactccatatcattatagccgcttagagatcgagcgtcagccgcaacgggatgccggcccgcaggccgtcgggcaggattatagccgcttagagatcgagcgtcagccgcaactcagctttcgtgctagtgcgccaattgtttattatagccgcttagagatcgagcgtcagccgcaaccaggccaggactttcccgctgtagagatccattatagccgcttagagatcgagcgtcagccgcaacatgtcgtcgcgccgccccgatactcaggaagattatagccgcttagagatcgagcgtcagccgcaacgtacgcgaccacgactgcatacgggtgttcattatagccgcttagagatcgagcgtcagccgcaactgcggcgcaccctcggcgtaggtcagaaatattatagccgcttagagatcgagcgtcagccgcaactccaacacctaccgcggcgacatgaaggccattatagccgcttagagatcgagcgtcagccgcaactcgcgagaccggaatgagcaagccgaagcattatagccgcttagagatcgagcgtcagccgcaacttgtcctcgaacaacgtcttgcggaactcgattatagccgcttagagatcgagcgtcagccgcaacgattgaattgaccgcccgacttcctcgaacattatagccgcttagagatcgagcgtcagccgcaaccggtcttctgctgccgcaccatgatgtgccattatagccgcttagagatcgagcgtcagccgcaactgcagtgattgtcaatatattcttggagcattatagccgcttagagatcgagcgtcagccgcaactttctgacgaggctattgcggaccgctatcattatagccgcttagagatcgagcgtcagccgcaacggtgtggacccgatcccgctccggcccggcattatagccgcttagagatcgagcgtcagccgcaacccatcatccggtgaaccgcgtcgaggtatcattatagccgcttagagatcgagcgtcagccgcaactgtccacaacatcgaccgcattatgcggttattatagccgcttagagatcgagcgtcagccgcaacgaccgaattggtcggtgggatgcagctttaattatagccgcttagagatcgagcgtcagccgcaaccttgtacgcgagttatcgacataatatcgtattatagccgcttagagatcgagcgtcagccgcaactacgccggcgggcgcatgcggggcgtggcgattatagccgcttagagatcgagcgtcagccgcaactgctacgacggcgacacctgcacgatgtacattatagccgcttagagatcgagcgtcagccgcaacggccgcgttggcgtctcggtcgcggacgaatggtgcccgctcagagcacttaccagcggttccgccaacggcgggcgaacattaccggaagggaggggatggtgggcctgcaaggactcgaaccttggacaagtcgattaagagtcgactgctctaccaactgagctacaggcccaacgcgggccgggtgatagcaaggcgcgggggctttgtgaaggcctgttttgtctcaggcccgtggtttttgccaagccgtgtccgactccggccggcccgcgctgctctccggcgcccgacgcacagccgccagtgcccccgagacctagggtcaatcctcctcgcccaggccgcggcgcgggatgcgcacgtcgcggtggacgtagaccgagaccaccagaccgaacgagatcatgatcgccagcatcgccgtgccaccgtaggagaccagcggcagcggcacgccgaccaccgggatcaggcccatcaccatggcgatgttgatgaagacgtagaggaacaggttggctgtcaggccgatcgcgagcaggcggccgaactggttgcgggcgcgcaacgcgattgcgaagccatagaggatgacgagcgcgtacagcaccagcagcgccaccccgcccatcagcccgaactcctcggccagcatggtgaagatgaagtcggtctgcttttccggcaggaagttcagatgcgactgcgaaccctccagcagccccttgccgaacatcccgccggcccccagcgcgatcttggactgcatgatgtggtagccggcgcccagcggatcgctttccgggttcaggaaggtgagcacccgctgcttttgatagtcgtgcagaaactgccaggcgaccggcaccgcggccgcgcccaacgccgcgacgacgccgaacttccacaagcgcacgccggcggcgaagaacagcacgccggaaaccatgatcaggatcagcgaggtgcccaggtcgggctgcttcagcaccagcacggtcggcaggccaaccagcaccagcggcccgatcagcttggtcggacggacgatctcctcttccgccatgccatgaaagtaacgggcgagtgccattacgatggcgaccttcatcacctcggacggctgcagggtcagggggcccagctggatccagcgctgcgcgcccatgccgaccgtgcccatcacctccacggcgatcagcagcaacacgccgaccacgtagattggatacgaccagcggaaccagaagcggatgtcgaacatcgcgaccgtcagcagcagcaccaggccaccgccgaagcgcagggcgtgccgctgggcccacggcgtcaggctgccatcggccgcagagtagagcatcacgcagccgatccccgccaacgccgcgatcagcaggatcaggccccagttcacctgcaggatcttctgacccaggctgagttcggggttgcggttgaaaccggcaaggctcatggcatgcgccccgtgccctgcgtccgcgagggggcgtccgcgatctgccgcggcgagtcgttggccagcggatcgaggcgctgggcctccgtcaacacgtcgcggccgatcggcgcggcggcgctgctgccgcccccgccgtgctcgaccacgaccgcgcaggcgtagcgcggcgcgtgcacgggcgcgaaggcgacgtataagccgtggtcgcgccggcgccacggcaggtcctcgttctcgaccacgccctgccgacgctcggccatggtgatccggcgcacctgcgaggtgccggtcttaccggccatggcccagccctcgcgggtaatccgcttgctgtaggcggtgccgccgcgttcgttgaccacggcatccatggcatcgcggatcaatgccagatcggcctcggggatatccagcttggggaacaggccggcacgggcggcgggcgtggcggcagccgcctccgccggatcgccctgccgggccgccatcgcctgggcggcatcaaccgcctgtgccgtgggatcgtcgtcgccgcgcggttgcaggtcgcgggcgaagtgcggggtcacggcatggccgccggcgatacgcgcggtcatcaccgccagttgcagcggcgaggtcagcacgaagccctgcccgatcgaggtgaccagggtctcgccgccctgccagggctcgccgatctgggcgcgtttccaggccttggtcgggatcgtgccgccgcgctcgcccggcaggtcgagaccggtgcgcgcgcccaggcccagcttgttcgacatcgccgcgatgttatcgacgccaacccggcgcgagacgtcatagaaatagacgtcgcacgactccttgatcgcggcgtgcatgtccatcttgccgtggccccagcgcttccagcagtggaagcgggcattgcccagatcgtagtgccccgggcagtagacctcctccgcgggatcgatccccgcctccagggccgccaacgcgacgaccatcttgtaggtcgagcccgggttgtagagtccggcggtcgccttgttggtcagcgggtgcagcgggtcgttcagcagctgacgccagtggcttgacgagatgccgaggttgaaggcgttcgggtcgtaggacggcacggagcccagcgccagcacgccgccggtggcaatgtccagcagcacgacggaggcgctcttctcgcccgccagacgctgctgcacgtaggcctgcagctgattgtcgacgctcagcaccaaatcctgtccgggtgtgccttcctcgcgcttcagctcgcggatggtgcggccaacggcgttgacctcgaccgtcgtggtgccggcggtgccgcgcagcttctcgtcgtattccttttccagcccgttcttgccgatcttgaagcccggcagttccagcagcgggtcctcggccgctttcagctcggcctccgacaccgcggcgacgtagccaaggacgtgcgccatttccttgccgaacggataggcgcgggtctggccgacgtcgatcgaaatgcccgggaggtcgggcgcgttcacctcgatccggctgaccgtctgccaatccaggtactcccgcacggtgacgggcacgaaggcgcgcttcttgcgcacttcggtcatgatccgcgcgcgctcgtccgcgctcagctcgatgacctgccccagacggtcgagcgtgcgctcaacgtcgttcgcctgctcggcgaccagaacgaccttgtagttctgctcgttcgccgccagcgggatgccgaaacggtcgaggatccgcccgcgcggcgggggcagcaggcgcagggagatgcggttgtcttcggcgagcgtggcgtacttgtccgattcgacgacctgcaggtagtacaaccgcgccgccagcgcgccgaacagcagcgccttgcccccgcccagcagggctgcccgccgggaaaaggtcttgaagcggctatgatcttcgttcagcaacgccatcgttgtcggtctctcgtgcgggtccgcaaggacgcttatcaggccgccacgcgcccggccctggtcagcgcagcaccgcccgctgcacctgcgcgaacagccaggcgagcggcggataggccgccaccgtcgtcaggaattgaaacaccgccggacggggcccgatcaaggcaccggccaggatcgcgttcagcagccagagcaccacgctggcgcccagcgcgatgatggcgaagccggcccagacgacgaagaacgaccggctgatgaagaagcgccgctgggtggcgatcagcgcatgcaccagcagcaggatcagaacgcccacgcccagcgccgtgccgccggcaagatcgtgatacagcccgatcaggaacaccactgccgccggcatcagatccggccggtggaccgaccaatagtacacgctgatcagcgcgagccacggcaccaccggcgcgaagtccggaatccgataaggcaccagcgtcagtgtcaccagggccagggtgagcagtagcggcgtgatctgacgcgcgaccagatcgaggcgctgccaaaaggtcgttttcacgccgcactccccgcggtcctgcgacacgttcggctgacatgatcaaactccatggcgcctgtgcgcatgcgtcgtccgacgtgcccaagcgcaagctgcgcccaccggatcactcgcgcggggcctccgcctccaacgcgcgctcggccagcgcgccgccctcgccgcttgcgctcggcaattcgggcagcctgtccatccccggacgtggcgtgcccggcggcttgggcgccgtcgcgccatcggtcatcagaattcccggcatgcgatagtcggccacgcgcaggaattccatccggttccagtcggcgaacggagatatccggacgttgccctcctccgccgtggccacccggccaaccggcagtcccggcgggaagacgccgccgtggccgctggtgacgatccgctcgcccggtttcggccgggcttcctccggcaggtagcgcagctgcgggcgggaggtattgtcgcccgcgagaatgccgcgatagcggctgtcggcgatcacgactggaatgcgcgagttgatatcggtcagcaatagcacgcgcgcgctgtgctggcccacctcggccacacgcccggccagcccatcgcccgccaaggccgcctggcccttctgcacgcccatcgtgcggcccgcgttgatcagcacggaacgcacgaacgccccgccggtatccgcaacgacccggccggtggcgtagctggtgctgggctcgggggcgacattcagcaactggctgagggctgtattctcggcctgcaagcgccgggccaccgtctgccaatgctgcagccgggcgttttcctggcgcagcgcagcgttctgcgcgcgcagcgccgccagctcctgcccctcgcgcagcacctccgcaaccgaggcgatcggccgcgaaacgacgtccagaacgggggtaacggtatcggtgatcgcggtacgggcgcgttcgacaaagaccgtgtccgccttgccgagcagcatcaaggcgaaggccgcacccacgagaagcaggaaagcgaagcgctgggcccacgcccggatcggcgttgccaaggtcagcagcgttcctgccggtcgtctcacgcggtgcctcccgactgccgcacattcggtccgaatcggacccgacgcatgttggcggcagatgccaaactagacaagaacggttaaggattaaacaacagacccgccgagcaggtgaatttttcgcgttcgacctagtcacctgaatctaaagttcggcgcatagggtttgctccgttcgctggcagaaccgcttgacggcggcgagtatttcgtcggcggatttgacccatttgtagggttttggattttcgttatgcgccttgatgaaggcagcgatatcggcttccagttcggtggtcgagcggtgaacgccgcgttgcaactgcttgcgggtcagttccgcgaaccaacgttcgacctggttgatccagcttgccgatgtgggggtgaagtggacgtgccagtgcgggcggcgtgccaaccaggccttgatgctcggtgccttgtgggtggcgtagttatccatcaccagatgcacgtccggccccttcggcacggcagcatcgaccttcttgagaaagtccaggaactctgtcgtccggtggcgcttgtaacatttcccgatcaccgcccctgtggcgatgtcgagcgcagcaaagagtgacgtggtgccatagcgaatgtatgtgtgggttcgccgctcggcgacacccggcgccatcggcagcaccggttgctcgcgatccagcgcctggatctgggatttttcgtccacgcacaacacaatggcccggttcggcggcgacatgtaaaggccgacgatgtcctgcaccttgtcgacgaataggggatcggtcgagagcttgaacgtctcgctccggtgtggctgcaggccgaaggctgtccagatccgccggatcgtggtgtgcgacagcccgctctcggcggccatggttcggatcgaccagtgggtggcgtccctgggcgtggtgtgcagcgtgcgctcgatcacatcggcaacctggtcgtccgaaactgtgcgcggccggccggggcgatgttcgtccgtgaggccctcgatccggtccttcacgaaccgtctgcgccactttccaaccgtgtgctcatgcacaccgagccggttcgcgacttccttactctgcaaaccctgagcacagagaaggatcattcggcagcgatccgaaagcgaccgtgccgccttatgccgacgaacctgcgcttcgagaaaaacctgctcctcgtcactcagaacaactgcatccgccacccgacctgacatcccatcatctcccgaaactgatccagtaaatgatatgaattacagttccagaagactagtacatcgaaatgaggacgttcttcagcgtcttcatttcttccaggcaacgaccggtaccaagcgccacgcacgacagcggatcgtcggcgatcgacaccggcagtcccgtcgaggcgcgcagaacgtagtccagattgccgagcagcgcgccgccgccggtgaggacgatgccct

SEQ ID NO: 3246 - DNA, 23309 bp, synthetic construct
  source 1..23309: mol_type = other DNA
  variation 15501: note = note, n is a, c, g, or t
  misc_feature 1..23309: note = Synthetic
tgctgacgatgccgaacggccgtccgcccagcgcatcgagcagatcgaggtagaggggatagaaatagtcatcggtctgcccacgcggatcgaaggtgaaatccgcgccgaaaaccggcagattcttgctgcaacccatcatgccgacgaagcgggcattgccatgaccttcgagcaccggaacggcacgcgcgagaacatccgggcgagactcgagagagcaggaaccgccgatctgacgccccacagccgcgacgaagggcgcgagccgttcgccagaaggtgcagcagcgaccggtgcggcagccgcaggctgtttcgttccgaagcgcttgctggcgccaccccgtgtctgtccatagcgaacccgggaaagcaggtcgtcgagaacattcgccgccgcagcgaaatcgccatcgttgaactcgagattgatcaggaattgctcaccgctcggccgcggatcgagaaaagcgacagcatggacgcccatctgcccgaaatcggaggtgatgagcatcgcccgccgcccggcgagcgtgaattcctcatggctgacaatgtcggcatagccgagcaacggttcgtcgggaaaccaccagaaggcgtgcatcgtgtaggtgccgtcgggactggaaagctgcacttcccggcccggctgctgatgggcgaccgcccagtcggccggatagtcgatcgacgcctccccggcattgaaggtcagccagtcggccgcatcgccccgcgttggcgcgacggccaaaagaccggcaagcagcacgaaccgtgcaatatcggcaaagcgagaatatttcagtggcgagaacatccccgtgtcccccttagtcgccatcctccgagacgaatttcacgtcatgtttgcgcagggtggcgacgatcttgcgcaacggtttttcaaaagcatcctgcggcagcgacacgtcggaaccgtccgtgagcgcgagcacgatccccgtcgcgtcacgtgccagcagcaccgcgccagccgccgtgtagcgacccgttgcaatcaacagcggcgtcagccaacggatccagcgcggcagccctcgccgatagggacgaacttgcctgatggcgcgaaatggcacggcacgggcgttggaaagcgtattcacctgcaagccgtcgggtttcaggaccacccagaaggcggcgctgtgtgcgctgaaccagaagatcgcgagcgcaatcaacccgagcggccacacaaggatcgcggaggggtgaacgagcggcccgaaatcctcccacaaataggagtcaccggctcgcgcccagaatggcagtgcaaagaagacgcccgatagcagaaaaccgagaatatcggacccgtaaaccgccggcatctggtcctgaaaaacggcgccgtccggcctcttcgctcgcggcaggaagacataaaaggcaatcgccgcaacgatcagggcaagcgcgccgggaaatccgaaatccggtatcccggccagcgcaacgacgacgataaccagcgcaacgatccggcggagaaactcgcgtgacaggagccttttcatggcccgtctcccgagggagcgccccagacataaaatgatacatccgcgcaagcgaatgtgaattgaagaagatcaatgccccgccgtttcaaaaggggatttccgaccacgccgccgcgccggaagttcggcgacacgcgagaccgtccagtcatcaaaagtcaggtgaagagtgtggagaaatggcgcgcttgagtggaccaacctcgaacacgaagggttcgcaagcgcgagtgcgagccgggcggtcaggccacccctcggagcaggcgagcgcaaacgagttaagcgtgagaggataaatggtgccggcagcaggattcgaacccgcgaccccctgattacaaatgtggttgttttgatacagagaaccgcaaaaggcggccgccaaatttctgatttcattgatttcattcatttaaatggatatcatggcatcaatcaagattgcgcagagtaacgcatatcttgtgcccatattgtgcccaagcgacctaaggcgcatcgatgccaagccccattcgcaaatcccgactgactgacgctttcgtcaaatcgaccaaatgcgcggcgagcgacggccaaacggtcgactatttcgacgcgattgaaggcggcctggcgatccgcgtttcgccgaccgggcgcaagacatggacgttgcggtttcgtccgcagggttcgaaaagccagcgccgcttgacactcgggcgcttcgatcccgcctcgggaccgggtcatatgggcgttcacgaggcaaggcttgcggcgaaggcggcgaaagtcagcgtcggcaagggtgacgatcccgccgcggccaaagccatcgcgaaacgtgagctatcggaagccccgactctccgggaagtcggcgaagcctatttcgcaaagacgaccaccggcgaacacagattgcggggtaagccgaagcgcccgcgcacgatcgcggacgaacgtgcgtacttcgacaggcttgtcgctccggcactcggctcgcgaaaaatcgctgctgttggccggcacgacatcgatacgttcctttcagaccaatcaagccgaggggcagcgcggcagtgtcgcgttgttctgaacgcgatcttcaatttcgccgtctggaaagaactcgctccggcaaaccccgtcacctttgtcgcggcgccgaccttcgaggcgcgggaacggattttgaccgacggcgaactgcgcattctttggagcgcgttggaacagccggacggattcaagctcagccgtgccgttgcccttgctattgagttggccgcggtcaccggacaaaggcggggcgaagtcgcgggaatgcgggttgctgagattgacgtggacgccactatctggacgatccctggcagccgcacgaagaacaaacgcacgcacgccgtaccgctgagcccgaaggctctcgcgatcattctcgaagcgaaaacgctggccggcagcagcgagtacctattcccctccccccggcgcgctggcgacgacgacaagccgattacagccgggtcgcttagccatgcctggcgccggctttgcagcgctgtcgacttgaacggcattcggccacatgatttgagacggaccatggcaacccgcatgaccgagcgcttggggatcccgcgattcatcgtttcacgggttctgaaccacaccagcgacagcggcggtgcagcggcggtcacggcgatctatgatcgagccgaatacagcgctgagaaaagggacgccctcgaaaaatgggctggcctgctgcggagcattgtgaggatcgacggtgcctagaaacccggtgatttggtgcaaaaccgcagccctgatctggattgcgtttcgtgatcaagacgcggccgaaagggaaaacgagaggtacgccgctcacgtatgcacttcgggacatgaagcaaaattccaaactggacggtggccagcgtgggtcgaacaagaatttgaggtcgccggattggacatcgtcgacagcggctatcgaagaaaagacatctacgaaaaatggccgaagagcggtggccgcaaaggcgacaggcaatctcgggccggcaaacctttacagcacaacgaggactatgcggttgctcacgaaatcgccatgtacattctcggactccggccgccgcacgatgacggcaccgcgaaaacaagaaggcgacagcttgcgcccgaatacgccaccccatgtgaaggggtactctcgcttgctgagctagcgcatcgttttggatacagcagtgaattcagtggggcattccgccggatctggtggggacggcccaacatcaaaacgggtcatacgacatcgactgatgacccttgggcaacggacgccatatcgctacctctcgctatcgcagagaattacatcctcgttcgcgaacagtttgtcccgttatttgatactggtgacctcgtaccggaacccgaagttgacgtcgcacttctaagagaccgcctggcagcgtggacgaagggagtccgtcgcggacgaaaacccggcgaaaagaatcgtcacggctgaaaaacgcccgactccggtatttctaaaagacatcagcgccgccattgagacccctccgaaaactgaagatatctggaggcatccgtggaaaacaaccttttgagcacgcgcgacgttctcagccttctcggtggcgtaacccaagtgacgctttggcgcctgcgcaggcggcacgggtttccggcccctttccggttgacaccaaacaaaaacgcttaccgtcgcgacgacgttgaagcatggattgaaagtcgccaacagatccgcacctagcgaccgtctgcccattaaatccagtgttttgccaccccggcgtttcatcgtgccggcggggccgtgtttacgaggtagctggtgaaaaaatacaattcgaaaacgatcctcgatccacgcgagtcgataccgcatccgcaggggttccgggtcgaaaaggtcgacagacgcgggcgaatgctgctggttcccggtgaaggcgccggtctgctcacgatcattgacgaccgcgacagctacacaagcctgtcgcgggaagaccgctttcatcccgcccacctcgaacgcgcactgttcgcagcacaaatcgcgatcgtcgaaagctggtcatcgacggttcgcgcgcacccggcattgcaggcgccgaaatactaccaagtggccggtttgatcgaagtgtggcgtgaacccaaaaagcgcgctgtcttggtccgcgcccatgcagaacgggttctcttctggcttcagaaaatatcgcggcacgcgccgtcggcagcgacctttctcacgacaagcgggggcgttttccaaatggcgcgggtgccgtggtatggctaaggcattcaacaaaccttccgattttctgaaagccttcgacgctgaagggcggcataaccttgtcgccattccgctcgacggcgcgcccgtgggtcaaaccttccagccgggcgactggaccggcatcgacaaatttgccgagcgctggaacggccaggcaaacctctatttcagcgtcaacgaaccggcagcagacgcaccccacggaaagcttcgcgccgcgcagatcggcaccgtgcgcgccgtggtggccgatatcgattcgaaagaaggcgaaaaaatcgacgacgcgatcgcccgcggcaaccaggtcgtcgacatgcaactgcagcagccgaccttcacgaccgacagcggcggcggcgtgcaggcattctggctgctcaaggaaaaaatcccgtcgacggatccggccaccgccaaggtctacgaactgaacggcgccatggcagacgcactcgacagcgaccctgccgtcaaagacctcgcgcggatcatgcggctgccgggcacgctcaacctgccgaccgagaaaaagcgcgcaaagaaccccgaccggacggagcgctcggccaaggtgcagatctcgaccggtccacgctatgagctggcggcgctggcggaagcctacccgaccacatcgaagatcaaggtgtccggcaagaccaacaccgccatgatcgagctggaccggccggcctcgatcgagaaggcgaccgactggctacagaactttgcgcccgaggcgatcgaaggcgccggaggcgagccgaagacattcgaggtcgccgccaggatgcgtgatttcgggatcagcgaaactttcgcgctggacctactgctcgatcactggaacgaacagaaggccagcccgccgtggcagccggcagacctgcaggaaaaggtcgccaacgcatacagctacggtcagaacccactcggcgcgcgcttggccaaagcagagttcggagagatcgatctcggggaagacgaagcgaggaaggctgcaagcaagcggcgcctcgacatattcgccgcaagcgagttcgctggaaccgcgcccccgtcgcgggagtggctggttgaagacctgattcctcacaagaacgtgacactgctctacggcgacggcggaacgggaaaaagcctgctggcgttgcaattagccgttgccgttgcaagcggcaccgactggctacaaaaaacaccccgaaccggggcgtgccttttcatttcggccgaagacgacaaggacgaaatccatagaaggttggcagccattgcagcgggcgccaacatcgatctcagcacactatcgacgctgcatgtcgtcaccctggttggagatagtgcggtgctggcggcttcgaacaaaactcgttcttacatacagccaacaaccctgttcgcggcagtagaagccgcaatcgtagaacacaaaccggttctcgtagttcttgacactctcgccgacacgttcggaggcgacgaaaacgtgcgaggtcatgttcgccaattcgtgggtttcctacgggggtgggcgaccaaacacgggtgcaccgtgcttatgctcgcacacccaagccaaacggggctttcgagcaaggccggcacctccggctccaccgcctggtcaaatagcgcgcggtcacgcctctacctcgaacgtgtgcttgacggggctcaactggaacgtgatcccgatatccgaatcctgcgaacaaaaaaactcaactacggacctgttggcgggacaatccgctgccgctggcaagcagggctgttcacgaccaaaacggcacagcaaacggaaagcgacaagtcagcgctcatcgcgcaaatcgacgaaacgttccttgaattggtggaacgttatcaccgcgaaggccgcccggtcagcgcatcaccctcaagcatatacgctccccgcctcttcgcgaaagatggatcacacgcgggcttcacagcaagcgaatacaccgactcgatgaaccggcttttggcggcgggccaactcgtaaatgtaacggaaggccccccatcaaagcgaagacaccggctacgctccgcggcagcgtgttccaacccgccttccccaactgcttccaaccctatgccaacctaggttccaaccgggtcccgacggggtgtgttccaaccccccataccccccgccgctcgggcgggcggttggagccgcccccccccgttcggcaaagcaatggccccggccacgacctgacaatttcttgatcccgtggcgccctgttatgcagccagatcgagcccgccgccgtcaccatccgtggcgacgcattccggatagagcgtgagcgcggcggcaaccgccgtgagtgcggtggccgggccacgcgctatccaactttccgccgcgataccggcagcgcgtgaagccagttcacgtgcgcgctctgcatccgcttcccttgctacgatcgaacgccgcagcctggccaacgcgctacgcaacggccaaagggttgtcccggaacgccggttcatgtgccaacgcacgtatttgatgcggtcaagcaaggccgcccgatcgcccggcatttcgacaagatagcggtccagaaagtccgagtgtttgtttcgcggaattgagcgcaaatcggaaagcagcatttcaaaattcctccggttgtgacgaaggaagcctgccggcgaaaaccgcatttggcaagcaaaaaatttcattaaccaattgtttttattgtgatttttgtgacttcacttgatcgacaaaattcaacaaagcatccaaaaaggtcagcaacactgacttagggggaagaaccccttgagcacggaaccaattggccgagcagccgcggtgctgcgccccgcggtgctgccggcgcttatacggtccctaaaacgtgcacaggagcgccagggaagcccgctgacgggcgtttggggtttcccacgcagagttagcggcacacttggaaagaccgctcagcggcagatatacccgcactgacagcgccgcgggattgcagcagacgtcttgatagatgccagcaccttcgatcgcactcgcccaaagcgaaagacgctcaatcggagcgccaattgtaatcggcagcaacgatcaccgctgacccgtcgttggcgcggtctacgtccccgagaacctcgacttcgcactgttcaaggggcgaaaagtcagcgcattcctctaaggcgcgcttccggtcggcgatgttcagtttgtcggcgttcacttcgatagtgccgacatttcccgttttcgtttcaatgctgcagagcattaggtccaacgatgcgccaagaatcttacagccttcgacgagcacacgcttgttctcgaaagctgccggggccaacgcgacgtccaaagccgacacccgatcttgacagaccgcagaaccaccagcactgacaagaagcgcagaagatacgaacaagagcctatgggttgaaccgatcattgaacgtttcggcgtcatcgtatgctgttgccgctgccacaatccgccatccattgcgaaatcgctttcgttgatccgcgtaccccgaacttcgactcgtgcattatgtcgatggcttcgatggcaacagagatgcgccgcttggcgtcacgaatctgcggagccagatcgtcgggcgcatcggccaacaccgccaggccagtgtcaatcaggacgaattgcccttttattctcatgacctcgccgttgtcgacacgcaccaaaatgcttggcgagaacaacgtattgaactgcgtgacctgttcacggtcgaggctctggtctgtcgtcgtgtaaagcacctcgggaccgcttccgatacaccgaagcccaaacccatagcccatgccgttcgcggtcacggcgatgtatttccccccggtcccgaacgcactgtcgtcctgagaatagaaccactgctgagccgcacttggctccgcgccccaaacggtcgcgcacgcaagcacaacgaacccgaaaaaccaccgatgcatggcaacctcccacacaaatacagccggaggttttcactttttcattcaggagtcgagtaggtctgcacactcgcgcaaaacaaaaagaaccccaccgactcgcgccggcagggttcccttgatcgaagcggacagcgtacggagggttggcaaaagcaccaccaacagcttcggatcggcggaggcatgaccccccaccactattcggcccgaggtaaagccgaactagctgtgcaattctcgcctgtacgcctgccgccatgccgtgagcgcggcggacgcatccggcggcagctccaaagagtcgatcccacggtgttgccgcccaggctccacactgccgaagaccggcgaacgccaggttcgaatatgttgctcccaggtctgcaacgctttcgccgctgcgatcgcgtcacccgccaggttagctgcctgctcaaggtctgcatccgccgcggccaaaatcgcgtcacgccaaggactgagcgccttgtctagccgctccctggcatagccaatctcgacgcgggcacgctcgatctctttgccacacgccgcccgtcgggctgccgggactccgggacgcccgttcatcgcgaagcgcctcgacatcggcaagcgaaacctcagtcgcacgaacccgctcaaggtctctgctatcggatcagcaacgccctcaacggcagtcccgttatggacgttggggcgcaaatagcccactcccgaaaactcgcaatctcgttcttaagcccccgtcaataaaccggctggaaggccttcaagtgtggcgaacggactccgcaagcccataagctgtgctttcaaaaccgacgatctgaacgggatgctctgaaaaagcaaacggcgggccgcaacccgccgcgcttctcgcaatgagaattttgtgcactcaaagtgcttgttaacgggcggcccacgatctccaagcggctaagctaatggtcacccaacttcacagtaacacatcgactttccattacaagttgaatgtcgtaactttccaaggttttcaggatttttggaagaacaaccatggctgccccctaccgcttaggtctcgatgtcggctccaacagtatcggctggtgcgccgtcaccgttgacggcaatggcgtaccgtcgggtgtgctcgacgccggcgtacgcattcttactccgaacgaagaggccggccgggacccgcaatccaagcagtccttggctgccaatcgccgcgttgcacgctcatcccgccgccgccgtgataggttcctgcgtcgccagaagcgcctgatggaaaccctcatcgctgccggcttgatgccttccggcgaggccgatcgcaaggcgaacgagcggctcgacccttattggctgcgagccgccgccttgcgtgcgccccttccccttcacgaaatcggacgcgccattttccatctcaaccagcgccgcggcttcctgtcgaaccgtatcgccgacggtgacgacgacgagggcagcgccatgaaagccggcatgaaggcgctcgccgaacagctcgaagcctcgggcgcgccaacacttggcgccttcatggccgagcgcaacagccgcgaccgcgagggctatctcgtcgaccgtctcggcaaacgcatcggcaaggcacacggcaatcccaaaccccatccaacggataccggcgttcgtttccgctcgcggagcgagggaaacaaggtgctctacgacctctatccgacccgtgcgatggtcgagcatgagttggacgccatctggcaggcgcaagccccgcaccacgacgccctgaccaatgccctcctgaagcggctgaaacgcatcatcatcgagcagcggccgctgcaaaaacccctggtcggcagttgcacctttcgcccacacgaagagcgcgcgccacgcgccctgccgttctttcagcgtttccgcatcctgatggaagtcgccaacttggagatcgaacggccgggacgccgttcccgcaagctttccattcagcagcgcaacgcgctcgtcagcagcctgtccgagaaggcctcccaggtcacattcgcggccatgaggaaagcgttgaaactaccggccgacgcggcattcaacctggagcacggcaagcgcaagggcctcgatccggaccagaccgcagccgtccttgccaagacctcaaagaccggcaagggaaccagcttcggcaagggctggcgcggcctttcccgccaccgacaaaccgaaatcgtcgaaaacctcctgaccgagcccgatgagcgcgcgctgacgcgctggcttcgccaggagtgcggccttaccgaggatgctgccgaagcggcggccaacgcccgcctgccccagggccacgcccatatcggccgctccatgctcgccgatctggtcgacgtgatggagaacatcagcgccgaggcggtcgatccgaagaccggcgagatctacccgcgaccgctcacctacgacgaggcggtggagcatctcggcctgcaccattcgaacatggaagccggacgccacgcccgcctgccttactatggcaccgcgatggcccgtcacgtgatcgccaacccgcgcgctccggaaaacagtcaggagcggatcggtcgcgtaccgaaccccaccgttcacatcgctctcaaccagatacgagcagtggtcaatgccctcatcgaggcatatgggccgcctaccgcgatcgtgctggaactggcgcgcgagctcaaacagaacaagaaacagaaggacgagacgacccgtcaaaaccgcgagaacgagaaggcaaacgaggaaatccgcgccgaactggctcaaatgggtctcgcctatagccacggcaaccggctcatcatgcggctgtatcgcgaactgtctccgacggagcggatctgcgtctataccgggcggccgatcagcaggacgatgatcgaggcgagcgaggtcgatgtcgaccacattctgccacgatcgagaacactcgacgacggctttgccaacaaggtgctgtgcacccgccaggccaaccgggaaaagggcaatcgcgcgcccgccgaggtcaccgaatggcagggtgagcgactgcgggagatccacgagcgcgctaaacggttgtttccccgcaaggcgtggcgcttcgcccccgatgcaatggagaagttcgaggcaaaagacgacttccttgcccgacagcttaccgacagtcagcatattgcgcgtctggccaaggattatctcggccacctcttcggcgaagatcgcaacaagcgagtctgggcgacgcccggccggctgaccgccatgttacgcggcttttgggggttgaacgcgctgctttccgatcacaaccggatcggcaacgacagcgacggaggttcggtcaagaaccgcgacgaccatcgccatcatgcgctcgatgcgttcgtcatcgcctgcaccgaccgggccatcctgcaacgggtggccaccgcctcaggacgtgccgaggagctcgatctcaaccgctgggcggaaaagggccgctttccggagccgttcgagggctacaaggacgcgctacgcgcggcgctcgacgccatggtgatcagtcacaaacccgaccacggtcttggccgcggcgcgcagggcaacgtgcatgtcacctccggcaaattgcacgctgaaaccgcctatgggctggtcgacgcggacatcgacggcaaacacttcaatctggtgacacgcaaaccgatcgaccagttgagcgatcgggaaatcggacaggtgcgcgatgcccggctgcgcgaggcgctggagcagatcgtttacgaagcgggacgcgacggcataaagccagaggccgccctcgccgaatacggccgcaggaacggcatccgccgggtccggatcctgaaaaccaacgaaaccgcgcgtaaagtcacccatggcgacgggttcgagaaagcctacatccccggcgacaatcaccgcatcgagatattctcgctcgtcgatggtgagtggtccggcgaaggtgtttccgtgttcgacgcgaacaaacccggctacgagcccgattggcgccgccgccatcctgaagccaggctcgtcatgcgggtccacaacggcgacctcgtggaagccgatttcggcgaaggccgccgcatctggcgcgtcgttcgcctcgaaccctctgcaaagcgcatccgcctggtccgcgacaccgacgctggcaatttcgaaaagcggcacaaggccggggacgatcccttccgctggaattttgccaccttcaagcgtttgcaggccgccgacgcgcgccgcgtccgcgtcgatccgattggcagggtgagctacgccgaggacacgtaatggcaagccggatcgtcgagatcgccgaggatggacgccacctctcccgcgacagggggtttctcaccgtcagcgccgatggggccgagcttggccgggtgcccctcgacgatattgccgccgtgatcgccaacgcccacggcatcacctactccaacaatctattggtggcgcttgccgaacgcggcgcaccgcttgtcgtttgtggcgccaattttcgcccggcggcgaccctgtggagtgcggtggcacatcacgagcaggccggccgcatggccgatcaggctgccgccgccgttcccctgagaaaacggctgtggagccaactcgttgttgccaagatcgacagccagcgggaaaccttggccgccgtgggcgccgaacacgaagggttccgactgctcgcccgtaaggttcgtgccggcgaccccgacaatgtcgaggcgcaggccgcccgccgctactggcccctcctgtttggcgccgacttccgccgcgacaggcaggcggagggcatcaacgcgatgctcaactatacctacacggttttgcgggcgggaactgcccgcgccatcatgggcgccggcctgcacccaagtctcggcctgtcgcaccgccaacgcggcaatgccttcgccctagccgacgatctgatggaaccgttccggccgcttgtcgacctgctcgtctacgatctgatccacgaaggccgttgcagtgtcgaccgggaaaccaaaccgcagatggcacgcattcttgcaaccgatatgagcacggcagaaggcgcaagccccgtttccagttgcctcgggcgcgtcgcgctgtcgctggcgcgctgcttttccggagaagcgaagaaactcgatctgccgaaccgcgcattgccgttggagggaacgtcgtgacttcgcgctatccagttatgagcgggtatcggatgatgtggctatatgtgatgttcgatttgccggtcctgaccagcgccgagcgcaaggcagcggccaagtttcgcaacctccttctcgacgaagggttcgaaatggcccagtattccgtctatcttcgcttcgcagaaagccgcgaggcggccgaaacatacatcggccggatcgcccaggcgcggccggacgaaggcaaggtccacatcgtcaccattaccgacaagcaatacggcaatgcgcgaatcttcgcaggacaaaaacgtgaacacaggcctgaaaacccggctcagctcgccctgttttgacgacccggggccggtttttcgtgcttctaaagagaaaaaagcccggaaaatccgggctttagagggatatcaagcttagccgcttggagatcgtgggccaaccgcaacgaggtcggtgcgacaggcgatgttcatttcagcttagccgcttggagatcgtgggccaaccgcaaccggttcatctcgccctatttcgacaacggcagcttagccgcttggagatcgtgggccaaccgcaacaggggaaaagggcttcggcatcaccccctcagcttagccgcttggagatcgtgggccaaccgcaacggatggacgtgatgggcaagaacggcaagcagcttagccgcttggagatcgtgggccaaccgcaacgggcgttgcaggtggcgaccacgcgggcgaagcttagccgcttggagatcgtgggccaaccgcaacggcgccctctcgccacatctggccaatcgcagcttagccgcttggagatcgtgggccaaccgcaacaccatcggcaccggcttcaccaatcgctcgagcttagccgcttggagatcgtgggccaaccgcaacggtgatcgccgtgaacaacgtctattcgaagcttagccgcttggagatcgtgggccaaccgcaacaaagaacgatgaagagacgcgtgcgtctcagcttagccgcttggagatcgtgggccaaccgcaacgccggcgtcgcgcgcggccatgtcgaaggagcttagccgcttggagatcgtgggccaaccgcaacctcgacgcggtcataggtatcgcagggcagagcttagccgcttggagatcgtgggccaaccgcaacgcctccgtgtggcttagagaggtggaatcggagcttagccgcttggagatcgtgggccaaccgcaacggatccggcgccgctgtcgggtccatccagagcttagccgcttggagncttggagatcgtggcccaaccgcaactgagatatacttgatgaaccgcacccgcgagcttagccgcttggagatcgtgggccaaccgcaacgcaaaaccctgacgtagatgcccctaccgagcttagccgcttggagatcgtgggccaaccgcaactggtaccaacaaaaaacgataatttttatgagcttagccgcttggagatcgtgggccaaccgcaaccggccaatgtggcgacggatggctcgctagagcttagccgcttggagatcgtgggccaaccgcaacggatccggcgccgctgtcgggtccatccagagcttagccgcttggagatcgtgggccaaccgcaactgagatatgcttgatgaaccgcacccgcgagcttagccgcttggagatcgtgggccaaccgcaaccagatccggccgcgccgccaataccgatgaagcttagccgcttggagatcgtgggccaaccgcaactgcgttcaggggcgggttttccacgtcaccagcttagccgcttggagatcgtgggccaaccgcaacgcgcggcagcgtcgcgtcgccgccctccacagcttagccgcttggagatcgtgggccaaccgcaacagttcttcaaggcgcgtgttttcaaaaacgagcttagccgcttggagatcgtgggccaaccgcaaccgagcggctgcagatgatccttgccggaacagcttagccgcttggagatcgtgggccaaccgcaacatcccgcgcatgggcgacaagttcggcgtcagcttagccgcttggagatcgtgggccaaccgcaaccgcgtcgcgacgctggagccaaagcccggcagcttagccgcttggagatcgtgggccaaccgcaacgccggacgggcggaggtggcacgcggctaaagcttagccgcttggagatcgtgggccaaccgcaacaagagagttccactcgtgttccatcgcccaagcttagccgcttggagatcgtgggccaaccgcaaccgtaaatccgcatcaccgtttcggcgttgagcttagccgcttggagatcgtgggccaaccgcaacgaatgcggtcagctcgaaatcggatccggcagcttagccgcttggagatcgtgggccaaccgcaacgagatagcaccggttgaaagtgttcttggagcttagccgcttggagatcgtgggccaaccgcaacggatgcattcgggaacagcagaaccattgaagcttagccgcttggagatcgtgggccaaccgcaacatagcgggtggcgcgtatgtcttgcgcggaagcttagccgcttggagatcgtgggccaaccgcaacgacgagttcaaacggctcggctggaagccgagcttagccgcttggagttcgtgggccaaccgcaaccgactggacccggcgttcggagagcgtgggccaaccgcaacaaaaatatcgaaaaacagagctgctgccggtttcgaggacacgccgtcaatctagctcagcttgttcctcgaactcgatagcgctcatgttgcccagtgtcgagtagcgtcgccggggggtgtggaagcgctcagtgaaatcgaacaactcggccccggcatcatccctcgtcctgtggactttccgagcggtgcattcggacttgagatacgagaagcagttctccatcactgcattgtcccgggcattcgccgaccggctcatcgaacaggtgatgcgtgatcggtcatcaggcgctggaactgttcgttcgtgtattgactgccttggttgctgtgatgcagcagacgatccggtcagcatcttcgccagatcgccacgatgagggcggcggtcacgagctgggccgccacctccgcttttgtagcccaaccaacaacacgtttggagaacaggtccattacggcaaaaacatagagccatccttcaacggtccagatgtaggtgaagtcgccccccgcttctggttcggcgccgatgactcgaaggcgctatcgagcagattgtccgacactgctgatcgctcgccggcatcttcggcaacccacgtcgccgcgatcgagcgcgcaacccgttctggcgcatgagcctctcaacgcgatgcaggctgcagggcacaccctcggctagcacgtcgagcccgacgcggagagcgccatacgttcggtcgctgctcttgcagctgcgatcgatcgctgtcaccagagccttccttaccggggacgagcgctgggctgcggttgagccaggcatcgacccccgaccgggacctatccggcgcttcgcaaagtcgtgccactggccagatgttccggtgcttcgcgacgaaagcgaacttcatacagctcccctcgcgaagaaggctgcgacgttttctaggatgccgtgctccgccttgagcttggcgacctccttgcgcagccggtcgttcttgagctgttcgggcttcgactgcccacgaccgggaaacgcgtgctggttggcgcttagccgcgtggagatcgtgaaccaaccacagcgcccgcaagcgtcgcgagagtgtcgagaacgatcattcacggcgccccctagtcggaaaggctacgccggagctgcacgccgacatttgcttctgcgcgcgatgcggcggcagccgcctgaccgagcgcggtgttcaactgccgggctttcgaaatggcgttgtcgatcgaggtggtgtccaccttcggggtcgccgtgatcccgagcgcctgctgcatctccgacccggcgctcacagcttccgacttggcggtctcgacgtcggccatatcgaccgacggcttggcgctcggcgcattggcgagcatatgccacatgcgcggggcattcatggcgctgtagctggacgtcggcacgccaacgaacggatcggacagcacgcccggcttgttcatcgggaccggcgccttgccgtacatggcgttgccgaaatgcagccgctccaaccgatcgtacgcagcgcgccgcgccgcccggccgaactcctggcccacatacgcctcggaaagccgccgctgcatctccggatccgtccggtacatgtgcagcttctgatcgagcccttcgcgcgcacgtgcgggcgccatgccgtcggcgatacgctgcgccgcttcccggaagaaatcctcctcgaccgggttgcgcggcgtcttgccgaactgcgcgaggtaaccccgcggatcgtgccacgcctggctcttcttctcctgcgaagatgcataccccgccgccgtaagggccactggcagcgacaagcgcgccgcgaccaatgccgtgctcttcccgatcgatgcccaaccgccgccagctttggtggctttccctgcagcaccgcctgcaacaccgccgtctacgacgccggagccgccaagggcaaccgccgcgcgggtcagcgccgccgcggagccatcaagcgccagtgccgacgacttcaggccgaaggcatccgccgctttcccgacagcccatttgccccccttccacgtgccgtaaccggccgcgccgatcccgagcgaagtgagcagggggttttcctgcgcgacggaagccaagctgttgatgccgtcggccagcttgttcagcccggctgcgatcccgtcgattggcaccagtgatgccgataggttggaaagcgcccccttgaacccgccccacgccacgaacggatcgttgaagcgcgccttgtcggcggcgtcggttcccatggctgattccatcaaactcagccatcgcgcgatctgttctcgctgggtgacgatacgggtgaggaacgccgtggcattggtgttgccagaaagcttgccgacggccgcggcgaccgctgtgtcgttgctcaggtcgacgccgtctttcttcagcgccgggatcaggtatttcaacacccactgatcagggttcgcgccgaacatctccttgtcgacgagcccatgttcgccacggatgcctatgcggttccgttccgccaagtagcgcttgccgccggcagagccgaccgcttcaagcacgaacgctttgaacgccatggccagtgcattgcctgccgtatctggccccatgtcctgcatgtagacggacgcacgggcgagaaaatcgggtgaaagcgccgggccagcgacctttgttcgccgcgcaaaggggaagaacgcccctgcatcgaaatcgggatcgacttgcgccgcttttgttgccgcctcgatcaaccccgtaacctgatcgatcccaagctggcctcccttgttcagaccgaggttatcgaggccacgcagcagcccgacgagctgggagaccgcagcctcagcgcctttggcgctctgaagcgcgacaaacgactgcaccatcttttcgaggacggcgtttgtccgttcagcatcacccatgagggtgtatgcattgcgagccatttccatcgcagcggttaccggaaccgacgggtaacggatcgacagggcttccgcctgatcgaaaatcttgtcttgcgctcgcgatggaatgttggccgtctgctgccggaaaatctcgcggcggcgttccgaactggcagtcaacgcctcacgtccaagcatcccgccgaagtacggcagcgtataggtcccggccatgacgagtgccggtttcagatagtcccgcatgcgcatgccgtgcgacttggcgcgtttctcgattgcgcccagctgctgcgagaacccgacacgggcttgagcaaggtgcgaaagcgtctgcgttttccagttggaaatctcggacttggcaagcgcgcccttaaggttccgctgcttgatcgagtcatgcatcgcgatccaggagttctgaaccgcggccatatcctgtccagccaatttaagcttgtcgagattgcgctgaaagccaacgccccacgaaaccgcaccggtggtgcccaggcgctttgcagcggcctccacctgctgcatcgtggtcatgaccttcctggcttcgccgtgcccctccgaccggagccgaagaataagttgaccgataagcgtccgcgccataactccaccacaaaacaaaaactgcagcggcaattgtacctttgtgttttactttcccgcaaacagcgccaccgaaagcagtctcacctaatgaaatccgattaactagctttaacaacgttcaatagttgcgcacgcgcaacattgatgatttttttgaaacgaaatcgccaagggtattagggcacaagaatctgcaggtcaaataaacccgcagaccgactgcttttttccgcaacaaacaaaacacgacgaaccgtcgacgttttcgttgaagtgaactcagcagcaagcggcgccccgattttgcagcggcggcggatcaagccaacgcgtggcgttgcctacccggcaattccaccgtaaacgctcgtcaggctccgaccgatcggcagagcgaaggtcattaactgtgccctttttgtgcccaaacgcgaagatcggaacacctcttggacgccggagaaaggcccgcagcaacggtttttactaaacgaattcaatagattaataaaatggtgccggcagcaggattcgaacccgcgaccccctgattacaaatcagtctggaatcaatttccggcaaaggcgcctaaactccgggaagcattttttctttttaatttctgtttgttatcgctccatccgattccgatgagcttccctgtttgccgttccggtgctaccgtggtgctaccggagacttaacgcggtagcacacacaatgccgaaactcaccaaacgaaccgtggacgcggcaaaggcaagcgatgccgaatttatcgtgtgggatgacgaaattcccgggttcggcttgcgtgtatatccgagtgggcggaaagccttcatctttcaataccgtacctcgggcggccggcgcggccgggttcgcaaggtgaccatcggaacgtatggcgccctcacgccagaccatgcgagacagcaggcaaaagagttatccgccaacgccgcgcggggtgacgatcccgcagcagccaaacgcgaacagcgcgaagcaccgcgcatgtcagacctttttgtccgctacctctcagaacatgccaccgtctacaagaaggcctcatcagtcacggaagacgctcgcctcataaagctgcacttgttacctgcgttctctacgcgacgtgttcgcgacgtttcccgtgatgaaatcatcaaacttcatcggtctcttcacgccaccccctacgtcgcaaaccgatgcgtcgcgcttctttcgaaagccttcaatctcgctgagctttggggctggcgagccgatggttcgaacccttgcaggcatgtcaggaaataccgggaagttgcccgcgaacgggttctctctccagatgaaattgagcggcttggacgcgccctcgcccaaagcgaaaaagacggagctaatccccacgccatcttggcaattcgcatcgcggccctaacgggatggcgcattggcgaagtgcgaaatctgacatgggagcaagtcgatttcgaacaacgggtggcccatttggtcgacaccaagaccggagaccgaaccgcaccgctcagcgctgcggcattggagtttctagcaaactcgccccgtatgggatcccacgtcatcccgggacgcagcggcgacaatccgctcgactataaggcaatcttaaaagtttggcggcgcgcctgcgagaccgcagggctgaaaaacacgcgactccacgacttaagacacacagccgcgacgatggcagcctcattcggcgccaatgcgcttttggtgcgcgacttactcggacatcgcacgctcgcaatgtccaatcgctacgtcagccgaatgattgacccagtccgcgacctttccgaccgcgtagcctcatcaattgacagaacaatgagaggcgcgggcacagccgacgtagtgccgctggacaaggcggggaggcattgacatgggaacggaagagaacccttacacgcccaagccaagcactatctcctaccttgacccaaagacgggcaaaaaatgtcggaaattgaacgaaggcgcggaagatattgtctcatccatctgtaatgccgtcggtgagagaaacatacctgccaacttggattatgttgcgctatgggatgccctcgacggcttagagatacgtcaaacgttgctggagaagaccggaaacacctcatattatcgccgacaatacaagagcatagaaacaattacgaagaaggccgaaggcctcatggaagcccttcgcagggacgacgcaattgatgcggtcgaagtcctgagcgagtgcctgccgcccttttctgggttccagtggcccaaaaccatcggcagcgaacctctccccaccgatgatgacgggcgcccatcatccgacgaactcgcacaccggactcgcgtccgcccatccggggagccggacatttgcgcgtcaatgactgagctgattaccgcgcttgaccggctcgtcgactacggaaacgaaaggttgaaacagattgaccgggaaggctggacgaagacgccacttcttgacgccgatggctcatccacccgggaaatggtctggcacctcgcgcgcatttacgagaagcatttcgaaagagatgctgggacctcgaccgtcgtagacggaagcgaagaacgcggcggaccatttgtgaggttcatccagcgagtattcaaggcattcgaacttactcaaagccgagacttcccagcgggagagacggtaagaaaggccttgctcaatcggcctgcaaggacctaac

SEQ ID NO: 3247 - DNA, 23294 bp, synthetic construct
  variation 14777..14797: note = note, n is a, c, g, or t
  misc_feature 1..23294: note = Synthetic
  source 1..23294: mol_type = other DNA
cgcgacaagcttgccgccatgcccgccgaggtcggcgaggcgatcccgatgctcgccgaccggcgcatcgagctttccggactggcgcgcgtcaaggccgtcaagctcggcacgcaaaacgtcacgggcgtgcgcttgccggtggtagaggacgtcgagatcgagcggacgacgtatggctatatggtccggccgcactgggtagacgcgctcatcgaccgtctcgaaaccgcgctcaagctgcgcgtcgaggtcgagatcgccgagcggcggctggcggtgctcgagcgcgcggtggtccgcgtgacccagcgggtcaatctgttcgacaaggtgttgatcccccaggcgcgcgagaacattcgccgcatcaacgtctatctcggcgatgcggaacgcgcggccgtggtcggtgccaagatcgccaagcgcaagcgcgagacacaggttacgtcatgaccatcgtcgccatgcagcgcatcacgctttgcggccttgccgccgagaagtcggcggcgctcgacggattgcaggcactcggggtggtgcatctcattccgctcaagcagccgggatcgctcgaaccgatcgatccggtgatgcgccgccgcgccgagacggctttccgtcatatcgcgacctcgcccgagaagatgcgcccctatcgcccgggcaaggcattcgacctggaagcggtggtcggcgacatcatcgccaaccacaccgagctccgcacgctgtccgaccggcgcgacgagcttaccgcgcaaatccgggcgctggagccgtggggcgatttcgccctcccctcgcccgaggctctcgccgggcagaaaatgtggctctacgcgctgccggtcaaggaccgcgcggcgctcgacaagatcgacctgccttgggcgatcgtcggccgcgagccgaccgcgctgcatgtcgtggtggtctcgcacgaggaaccgcccgtcacgctcctgccggtgctgcggctcacgaccggcgcggaacccctctcggcgctcaaggccgagctcgaagagcttgagatcgcctatgagaaggcggccgccgcgcggaccgaactgacccgctggcgcatcctgctcggcgccgatctggccgcggcgcaggacctcgacgagttgcgcgaggtggccgagcagacccatgacgaggacgtgatctacgcgctgcagggctgggcgccggaagagtccatgcccgcgctgaccgccctcgccgacgagcatgggcttgcgctcgtgatcgaggccccgggtcccggcgagcagccgccgaccttgctgcgccagggaagcgaccggttcgccattgccggagacctcacgaatttctacacgagcccgggctaccgcgcctgggacccgagcttcgtcgtgttcacggcgtttgcgatcttcttcgccatgatcctggcggatgcgggctatgccgccctgctcggtctcggcgccgcattcttctggcgcaagatgggcaagacgcctgcggggcgccgtttccgcaccttgcttgcaagcctttccgcggccgccttcgtctatggcgtggccgcgggctcctatttcggctttccgccgcccgaaggcagctttctcgccaagctgcacgtgatcgacgtgaccaatttccagaagatgatggtggtctcggtcgttctcggcgcggcccacatctcgatcgcgctgctcgccgccgcctatttcagtaccggcaagggcaaggccgtcgccgcgctcggctgggttacggtcatcgccggcgggctcctgctctggctcggcgaaggtaccgcgcgcaccgtcggcggcttcaccatcgccgcgggcctcgccgcggtgtttctcggcaatgcgtcggaccggccggtcaattcgccgaaggactggctgctccgcatcaccgacggcatgctcggcctcaccggcgtcaccaagctgttcggcgacatcttgagttatctccggctgttcgcgctcgggctcgccagcgcctcgcttgccgcgactttcaacgagatggcgctcaacgtgcagacctccacgccgggcctcggcgtgctgctactgatcctgattctcctgttcggacacgccatcaacatcgtcatcggcattatgagcggcgtcgtgcacggacttaggctcaactacatcgaattcttcggctggggactgaccgaagaaggctatccgttccgcgctttttcaaagagggagaatcccacatgaacgaactcttggtcctactcggctggctcggggtgttcgcacctgtaggctttggcgcgctcggcagcgccattggcgtggccatcgcgggccaggcggcgatcggcgccatgcaggagaccgaaagcggctatgggcgcttcgtcggcgtcgccgccattccgtcctccaacgtgatctacggcatcgtggtcatgttctcgctgctgcgcgacatcacgccgtcgaacggcggcgcgctgttcggcatcggcgccgtggtcgccgccgctctcctctatatcggcatctggcagggccgcgcctgcgccagcgcgatcgccgcttcgaagaacaagccggagatcttcggcctggcgctcgcacccgcagccatcgtcgagggcttcgccgtgttcaccttcgtgttcgcgctggtgcttgccggcaatatcggagcctagccatggcggagaaaaccaacctccaggccgagcacggcatcgataccttgatcgcgcgcctgcgcgacgacggcatcgccgccggccgcagcacggccgagaagctcgtggccgacgcccagtccaaggcgcgcgccattgtcgacaaggccgacgccgaggcgaacgccaagatcgcggcggcgcagaaggaatccgacaatctgcgccgcgccggcgaggaggcgctgcgcaccgccgcgcgcgacacggtccttagcctcaaggacgaactctctcgccgtttcgccgacgatgtcgccaagaccgtgtccgacgccatgaaggacgagaagctgctccagcagatgatcctcgccgtggtcggccgtacccgcgagcagagcgaggtcgacaaggccaaggacgtggaagtcgtcctgccgcgcaccgcggtcggcctcgacgaactgcgcaagaatccggagaagctgcgcgagggctcgctctcccatttcgtcgccgcgtccgcccgggagatgctgcgcgaaggcctgaccttcggccgcgccgacgacgaggccagcggcatccgcctgcagttgctcgatcgcggcgtgtcgatcgatctcacggaccgcgcggtcgccgaagccatcctcgtgcatctgcagccgcgattccgcgcgctgctcgaaggggtggtgaaatgatcttccagaccgacccttacgtcatgctgatggcgagcctgcccgcggtcggtcccctgctgaccggcaaggcgccgccgatcaaccgcgtgcgtctcgatgagcggctgagacagctatcggcggaagacgccaaggagcttgacgccatggccgcgatcctgagttggggccggctcgatatcggcgacgaggatgccgccttcgtcacgcgtgcggaacggctcatggagaccgtccatgcgccggacctgcgcgccgcgctcaacgaccggctcgagcttcgcacggtgatcgcggcgctccgccgccgccatgcgggacaagaggcgccggcggaaggcgaggtctggggctacggccgctacgccgagcagatccgccgcaactgggccctgccggatttcggcctggcccgtacattcccctggatcaatcccgcgcgtgagcggctcgaggccggcgatcccgcggggctcgagcgcatcgtgctgcaggcggcctgggattccgtcggccgctacgcgcccggccacgaattcgacaaggaggccgtcgccttctatgtcgcgcgctggtcgctcgccgaccgctggtcgtcctacgaccccgagaccgccgccatccgcttcgccgaattgatcgacgaggcttacgccaacgctgaacttccggaagccgcatgaccgataccgccgccaatatcgccgccgtacaggaagacatcgtccgcctgcgtcttgccgatcccgccaagggcaagctcgtcaagaacgaggtggtttacatccgccccgcgcgcgcccccgagcaaagactgaaggccgagatcctacgcgtgctcggagacgccgccgacgcgcaagtctatgagagcacgggaggcgtcggcctcggcgatccggtggaacagactggactgctgctttcggccaagctcggaccgggcctgctgggctcggtggtcgacggcttgcagaacccactcgaagctctcgccacggatcacggcacgttcttgccgcgcggcgtcgaagcgccggggctcgaccccaaggccaaatggtccttcaccgcgacgcggcgcatcggcgacaaggtgcgcgccggcgatacgatcggcacggttcccgagggaccgatcacccacaagatcatggtgccgttcgatctggacgagacgttcgaggtgacctggatccgcgacggcagcgccacggtcgatgagcccatcgcccgcatcaaggccgaatccggcgccgagcgcacgctgaccatggcgcaggactggccggtgcgccaggccttgccgcgccggctgctcgcgcgcggctggtcgacacggctctttccgcacacgccgatgatcaccacccagcgcatcgtggacactttctttcccgtcgcgcaaggcggcacggcctgcattccgggcccattcggcgccggcaaaaccgtgctgctcaacctgatcgcgcggcattccgatgtcgatgtcgtggtgctggttgcatgcggcgaacgcgcgggcgaggtggtcgagaccatcaccgagttcccgcatctgaaggaccccaagaccggcggctcgctgatgaaccgcacggtgatcgtgtgcaacacctcgtccatgccggtcgccgcgcgcgaggcctcactctataccggcatcgcgatcgccgaatattaccggcagatgggcttgcgcaccttgatgatcgccgattccacctcgcgctgggcgcaagcgatgcgcgagacctcgggacggctcgaggaaattccgggcgaggaagccttcccggcctatctcgacagcgcggtgaagggcgtctatgagcgcgccggcgtcatcaagaccaatgacggctcggagggcgcgctgaccatcatcggctcggtctcgcctgcgggcggcaatttcgaggagccggtgacgcaatcgacgctcgccgcggtgaagtgctttctcgggctttcttacgaccgcgcctataagcgcttctatccggcgatcgatccgctgatctcctggtcgcgataccgcggccagctcgcgtcctgggccgaggagcatatgggccccgactggaccgagaaggtcgaggagatgacggaactcctgaagcgcggcgaggaagtcgcgcgtatggagcaggtgacgggcgaagaaggcatcagtctcgaggacttcatccagtcgcaggcggcgaccttcctcgacatggtgttcctccagcaggatgctttcgacgaggtcgactcctcggtcccgctcgagcgacagcgggagctgttcgacagggtgcacgccgtcgtcacgcggccctacggctttaccgagaaggaagcggtgcgccagcacttcaccaagctgaccgggttgttcaagaacctcaactacgcacggcccggctccaacgaagccaagaagctcgaaaaggagatagacgagctcgaccgcacggcgcccacggtccgcgcgggttgagtcccgcgcctgccggcccctacgtcatgtcttccgggtcgccgcgcgctaggtcagccgaccgagccgtgagttgcggaaccgcggatcgccagtgatctcgatcccgacccaatccggcagctctatgacttgatcgggactatccagctcgcattccgcaatcacgagcccggcatgcgcgcccccgtagacatcgacgtgccagagcatgccgccatgttcgaccgtcacgcgcttcttctcgatcagcgggtgcgggcaaaggtcttggagcatcgtgtcggcttcttcaggccggatttcgtattcgaactcgggccgggcgccaccccggcgctttcccttgatcgtaaggaaagcccgctcgcccacgcggcgcacccgcacggtcacaaagcgcttggtcacgaggtagccctgccggatgaactcgcccggcagccgggtcggcacagcgccgtcgcgtacgaggaaccgcctctcgatctccacgcgcgccccccgcgtcgccgagccctcggccggcttttcttccttcgcggtcttcatgagagcgtgtcgcggcgcgttcacggcttgcaggcgcgggaaccgtcgtccgcgctcgattgtttccacttacccaccaagtctcctctccgtcttctggcttagatgccttgtgctgtctgggcgatcgctcgggaaaagcgggcgacctgcttgaattgctcgatcatgtcgctggccagccggaagttcaccgcgtcggccttctcatcgagctgcagcttgttgaagatgctctggcgcgccgccgccgcgagcgcgtcgatctcggccttcgcgtccaccacctccgctgcggctttggccgcgtccggcgcgttgatggcctcgacggcctgcttgagactgtcgagaacggcccgagcgaaccggtccgtgttctcgtccttcagtggcgccaggctgatcccttccgccagccgctgctggcacaccgagaccagattgcttgtcaccacgtcgctgatgccttcaaggctggtgacaatttgcgccagatctatcatctgccggctgtcctctccggtctcccgggaggcccgtccgatataatgaaggatggccgtggcaagctttcgcgtctccttgtccgcctcgagaagcgtgccgatgtcgtcgatcgttccctccacggtcgtcttcctgccccgccgcacggtatccaacacatggtccccgagacgggtaagctccaggcgaacgcgcttcagcgccgccgccggtaccttcagggcggactcgtccagatagaccggatcccccggagtggtgacttcgcccttccccgcggggaccaggtactccgcgagccgggcgatcggtacgacgaaccagatcagcacaaatgtggacgcgacgctgaagatcgtatgggcgttcgcgacctgtcgcggcgtctccgccgcgaaccgctccacgccctggagatcgggggcggccggcgagacatagcggacgagctccgcgaactccggaataaagaagacgaagagcagcacgccgaagcaattgaagatcaggtgcacgatgccgacctgaagcgcctcggcggacttgccgatcgccgaaagcagcgcggtgccgaccgtgccgacattggcgccgagcaccagtgcgatgccggcctcgagcggcatcagcccttggcttgcgagcgcgatgatgatcccgagcgtggcggcggagctttgcacaatcgccgtgaagatggcgccgatgagtatgcccacgagcgggtttctcatctcctgcataaggtcgatgaaaggctggaacgttctgagcggacgggtggcctcgcccatgaagtggatgccgagaaacaagaggccgaagccgagcagaatcccgccgaactgccgcatgagctcacgcttggcgaatgcctgcaggaaaaagccggccgctaggatgaacggagtgatcgcgctgagattgaaggcaatgagctgcgcggtgaaggtggagccgatgttggcgcccatgatcatcgggaccgtctggacgaccgtcatcaggcccgccgacacgaaaccgaccagtagcaccgtggtgatggtggacgagttcaagagcgcggtaacgcccgcaccggcgagcacaccacggaagcgattggcggtcagcgtgccgagcagcatctgcatccgcgcgccggcaatggccgtcaggccgccggtcatcaactgcaggccgaagaggaagatcgcgaggccgccgaggagcaggcctattatctgcaagagatcaaggtcgctcacggaatggggccccggcgccggggtcccatccggggccgtagatcaatggcatcgggcgtcctcgcacgcgcggccaaaatcatcggtttcctcctggcaagatgctctccggcatgcaacaaacgctcactgtgcggcatgcctaagcaaagaatcatcgccggtaaacactgaatagaattcaataccggatgaactgaaatcacggagaagaacgcagtggcgcgaaagcggatcgatctgaacctattccgtgtgttccaagcaatcatgctgcatagaagtgtcagcggcgccagtcgtgacctaggagttactccgtccgccgtgagtcatgctttggcgcgtctgcgggaggcactcggcgatcagttgttcgtcggcagcgaggccggcatggagcccacaccgcgcgccctcgagatcgcccctcgcatccgcgacggactggcgctggtcgacgatgccatcagcagcggaccattcgtccccacggagtccgaccgtgtcttccgcgttgccgccacggagtacggcgcggtcgtgatcctcgccccgcttgcccagcacctcgcgcgcgtggcgcccgacgtcgaattgcgcatcttcccgtacagccgaatggacactatccgccacctggacgacggccggctcgatctggtgctcggctggtttggcgagatccccgaccggattgtccggaccctcgtctgcgaggatcgggaggcggtcgtcgttcgccctggccatcccttgactgagggtgcggtcacccttgagcggctcttcgccttccctttcctcattgtcgagatgaccgggacggagaggcaggcggtcgagggtttcatcgacgaccggggcgtctggaggcgggtatggatcgaccgtctgctgatggagatggggggcagggacaaggacgtcgtcggccgtgtcgccgtctcggtgccgtattatgccgccgttccgtcgatgctcggcacgaccgacatgatcgcaacggtgccgctcagcctcgcgcgcatatccgtggcacagggacggatggtgatccttgacctgccctacgagcctctgaccgtgagggtcgaggctatctggcaccagcggggtgaacgcgatccgggcctccagtggctgatcgcccagatccccgaggcgatgcggggcgcgacctgagccggtcccggccgggtcatggcggcgacggagccaacagcaaagacgctgctacgatgcccatccggtgtgccgctggcgtggccgcaacgaggcgcgcctcttcggtggggtcgcgatcctcgcttcgatgccaaaaagaacagaaacggcgggccgtgacccgccgctctgctcataagagaattttgtgcacttcagagtgcttgttaacgggtgccctcgatctctaagcggctaagctttaagtcacccaaaaagagcttaccagccagaggttgcaaaccgcaagccgattcgctgaaatcggtcctttgtggaagccgaaacggtgtggcgatcatcaagactcgaagaggcgtagccgcttagagatcgagggacagccgcaaccaccaagagcatcaactcgatgaaacatcgaactgactaggtagcacgatcatatagccgcttagagatcgtagtcaagctcttggtagcgcacttgacgcgatttcgaatcgacggtaggctctcagcacattcggtgatcattgcgtgagtgcgaggggggtccaaacctacttgtgcgggaaagagcgggaggtcgcacctcccgctctagttctgcttaggaggatcatcgatggaatatcaaaggtaccgcctcggtctcgacatgggcgcgaactccatcggctggtgcgccgtcgcgtttgacgcggaaggtcagccttgcggcgtgctcgacgccggagtgcgcatcctcacccctaatgaggaagccggccgcgacccccagtccaagcagtcgctggcggcggaccgtcgcgcggcccgctcggcgagaaaacggcgggaccgttttctgaaacgccagaagcggctgatgacgctgctgatccgcgccgggctgatgccggaggacgcgagcgagaggaaggcgctcgaggcgctcgatccctattggctccgtgcggccgcgctcgatgggcgtctggaaccgtacgaactgggccgcgccctgtttcatctcaaccagcggcgcgggttcaagtccaaccgcatcgccgactcaggcgacgacgataaaggtgccgtgcagaccggcatccgggacctgaccagcgcgctgcaagacagcggcgcccggacgctcggcgaacttcttgcgcagcggcatgggcgggacaaatccggccaccgcaagaccaccggcaaaagcgacggcaagagcaccagcaagggcgacggcgcaccgcagccggtgcgcttccgccccaccgccaagggggcgaagaacctctacgccttctatcccagccggaccatgatcgaagacgaactgaagcagatttggaaagcgcaacaagcacatcaccctcggctgacggacgagcttctcgacggcatcgagcgcatcgtcatcgaacagcggcccctcaagaagccgccggtgggccgctgcaccttgcggcccgatgcggacatgcggcaggtcgccgggcttgagctggattacggggagcgcgcaccgaaggcgcacccgctgtttcagcgctttcgcattctacaagatgtgagtcagctgcgggttgtgcgtgccggagacgcggaacgccccatcacgcggcaggaacgggacgcgctcgtcgccaagctcatgtccagcggcggcaacgtcgtcgccttcgacaagctgcgtaccgcgatcaggttgccggacgatgcgcgcttcaactacgaactcgcgggccgcaaaggcttccagccggaccagaccgccgtgaagctctcggccagaaagtgtttcggcagcgcctggcgttccttcccgcgcgagcggcaaatcgaggtggtcgagaaactgctggcggtcgaagttccggaagaactgaccgaatggttgcacgagacgttcgatctcggcgcggaagcggccgaagccatttccgaagcgcgcttgccgcaagaccatggcaatttcgggcgcggcgtgctcgccgatctcgtcgcggccatggaggacggtgagcccgtcgacccggccactggggaagtgctcgaccggccgctcctctatagcgaagcgatccaggtgctcgaccggcaccattccgacttccgtccggaacagaaagtcgcccgccttccctattacggcggtgtcctgacgcgccatgtgatctcgaaaccgacagcaccggaaggcagccaagaacatatcggccgcgtgccgaacccgaccgtccatatcggactcaaccagctgcgcaagatcgtgaacgcgctcatcgaaacgtatgggccgccagagagcatcgccattgagctggcccgcgagctcaagctcaacaaggagcgcaaggacaaactcgcacgcgagaaccgcaagaacgagaagagaaacgagcagattcgcgaagagctcgagtcggtacagcaggcctacacgcccgatgcgcgcctacgcttgcggctgttcaaggagctgccgcccggcgagcgggtctgcgtctattcgggcgacgcgctgtccgtggagagcctgttcgacggctcggtcgatatcgaccacatactgccctacgcccaaactctcgacgatagcttcatgaacaaggttctgtgcacgacacaggccaaccgcgcgaaaggcaaccgggcgcccgcggacgcctggagcggcggcgcgttgcgcgagatcgcggaacgcgccgaacgcctctttccgaagaaggcctggcgctttcagcccggcgccatggaccgcttcaaggaggatggcggctttctcgcccgccagctcatcgacacgcagcatatggcgcgcctcgccaagacctatctcgaacatgtttgcgcaaacgtggtcgcgccgccgggacggctcaccgccatgctgcgcggcagatggggcctgaacagcctgctgcccgatcacaattatgcggccacgggacccaagaagaaccgcaaggaccaccggcaccatgcgatcgacgccttcgtcgtggcctgtaccagccgatccttgttgcaacgcattgcggcggcgtcggcccgggccgaggaactcgatctcgaccgcgtcttccccaaggatggcttccctactcctttcgcgggctatcgcgaggcgctcgacgcgcgcctgcaacaggtgatcgtcagccataagccggatcacggccttccaccgggtgcgcaagacaatatccgcgtcacctcgggccagcttcacgaggaaaccgcctatggccgggtggatgaggagatcgacggcaagacatacaatctcgtgttccgcaaaccgatcgcgcaattgacgtccggcgagatcggccgcgtgcgcgatgccgggctccggagcaagttgcagcaggtggagtacgaagccgatcagtcgggcgagaaattagccgatgcgctcgccaaattcggggaaaccaacaatatccgccgcgtccgtctcctaaagacggagcagagtgtccgcttggtccgtcacggtagcggcttcgagaaggcctacacgccgggcggcaatcatcgcatcgagattttcgaactgccggacggcgaatggtccggcgaaggcgtcacgatctacgacgcgaaccagcctggatacgaacccgcttggcggcgcgagcacgctggagcaaagctgatcatgcgtattcacaacggcgatctgatcgaagcggatttcggcggcggccggacgatcgcacgcgtctacagactggaaccgtcggcgaagcgcgtgcgccttgccccccacaacgcggccggcagcatcgaagagaggcacaaggacgacgacgatcccttacgatggatcttcggcagttacgcaaagctgaaagaaggcggcgcccggcgcgtgcgcatcgacgtactcggacgcaagagctatccggtggatacaccatgattgggcgcgtggtcgagatagcgtctgacggaaggcatctgggaagatcgcggggtttcctgaccgttcatgccgacggagaagaagttggacgcatcgcgctcgactccattgcggccgtgatcgcgaatgcgcacgggatcacctattcaaacaacctactcgtcgcgctggcggaacgctgcgcacccttggtcgtctgcgccagcaatcacaatcccgcggcaatcctgtgggctgccgatggacaccacgaacaagccggccggatcgccgatcaggccacggcctctctgcctctgaagaaacgactctgggctcaactcgtcagcgcgaaaatcacccatcaggcgtcgacattggaggctgttggtgcggaggccgagggctttcagctccttgcgcgcaaagtccgctctggcgatccggacaatgtcgaagcacaagccgccagacgctattggcccctgctctttggcacggcgtttcgccgcgacagaaaggctcccgggatcaatgccttgctcaactatatctacacggttcttcgcgccgggacggcgcgggccttgatggcgagcgggctgcatccgagtatggggctatcccatcggcaacgagggaacgcctttgcactcgcggacgatctcatggaacccttccggccctttgccgatctccttgtccataaccttgtcaaacaaggcgacaccgagatcacacccgacacaaagcggcaactcgcgcgatttctcgcaatcgacttaagcacgtcggccggagtcagccccgtcggcgtttgtctggaacgcctcgccttgtccttgacacgctgttttgccggagaggcgaaacggttggaccttccacggcccgcgctccccctggagagccgatgagaggatgatgcgacatgcgtggccgttcggcgttaagtgggtatcgtatgatgtggctttacgtgatgttcgatcttcccgtcggcaccaaggccgaacgcaaggcggcgacgaaattccggaaccacctgctcgatctcggcttcgagatggcgcaattttccgtctatctcaaattcgcagagagcaaggatgccgccgagacgtccatccagaaggtgaaggaggctttgccgaatcgcggcaaggtgcacatcgttacaatcaccgacaagcaatatggcaacgcacggatcttgaccggaacaaaatctgaacggagaccgaaaaatccagaccaactggcgctgttttgaccgcagatccctcgatttcttgctcgcagagcacaaaaaagccctgcgatttgcagggcttgaaaggagatcgactatagccgcttagagatcgagggacagccgcaacacaatcgagcgccatgcccacgatgcccgcactatagccgcttagagatcgagggacagccgcaaccacaggtttaaatcgaacacccaaacggtgactatagccgcttagagatcgannnnnnnnnnnnnnnnnnnnngatcgagggacagccgcaacagaagctcttcttccgtgcgagcaatgatcactatagccgcttagagatcgagggacagccgcaacgaattgacgcagacccagcgttacttgcgtactatagccgcttagagatcgagggacagccgcaacacggctctctgactgccttcggcaagtcttactatagccgcttagagatcgagggacagccgcaacttcgaggaagtccttaaccagccaatcgacactatagccgcttagagatcgagggacagccgcaacgatccgctcgccaacccgctggtcggctggactatagccgcttagagatcgagggacagccgcaacggcactagcagtgaccccgagaaccgggaactatagccgcttagagatcgagggacagccgcaaccgaacagtccggcaaagccacctaacgagtactatagccgcttagagatcgagggacagccgcaacagactggcacgttgaagcagaacgacaccgactatagccgcttagagatcgagggacagccgcaactcgcggagcatccaagcgacgagcatgtcgactatagccgcttagagatcgagggacagccgcaacagagcccttgcgcgatcgcttcgtcgaacgactatagccgcttagagatcgagggacagccgcaactacgccgcgatacatgcggcggcagatcgaactatagccgcttagagatcgagggacagccgcaacacaccttggaggacatcgccgcagtcggcactatagccgcttagagatcgagggacagccgcaacttgcgcccgcgtctccggcaaatagggcggactatagccgcttagagatcgagggacagccgtaactgtcgtcgatgaagcgcgcagagagcgggcaaccacacgactaggtggctgtgctggcagtccgtcgcgaattcgtctctacttcgcaattccctgatccacgggaaaatacagggaatttcgggtcttcttgccctaccctgccctcccgacaccgatatttccgttttgcgtcataacgatatggacaaattccctaatcagcggatcagggaagtcttctggcgaaacagggaattccgagactgaaacagggacttgagttgctggaacaggtatatgagtcaggagctctgccggttcagatccttggcccgatttgctcaaggacgaactagctgaacgccgctgcagcacgcgtagttgattgctctcgcgcttacgatgtccgccattaaagtaaaagcggatgccgcctccgctcgattgcgtctcatcggggtgtatatggccgtctttacgcttttgacctctccattcctccagcagaacaacagaggcctcatgtctagtctttcacgtcgctcttttcttaagatatctgttatggcgggtgccgctctggccgtgcctaggttcaaccgggcctggcgggaagaaagcaccagaaccattgtcgactcaaaacagttattcaatcgatactgagtccagactcatccttcaccaccgaaagacgtattataaacttagacacattggccaacgcaaaagtgaaagatcactgctttggaaactcaggatgcagagccctgcgaagtcgtacttctcacagccaggagtaagctatcgaatatcgtcataaatgcccttgcgagtcattttggacggatgactgtgctccgagaggagccggagtcaaagtggacaatactcagccgtcgcgcccgactcgtagggccaatttatgccgtcggacaggccatgtgcgggattgcactcaaaatagtgggaaagagcagccgcgggcgcatctctgagatttgcacggagcacaggctgaacgccaacgaaccgactaacgctaacgtggtggctattgactctgtcaatagcggcagctgtcgccaactcctcagagaactaaaccctcgtgttgtcgccgtctatggaacacgaattatcggaaggggcacactcagctcggcgtccgcgcccttcataaactatcacgctggcataactccaaagtatcgtggacagcatccggcctactgggcgctcgtcgcaaaagacccgcaaggagcgggtgtgaccgtacatctcgttgacgagggcgtggacacgggaggcattctttaccaggacactgtcagcttcgtaccgagcgataacatcaccacttatcagtacgtccagatggccacagcacttcccctgtttatccgctctatcgaggatgcgctccggaatcagttgatattaaagaaagtcgacctgccctccagaaaatggttcccacctacgcttctgagctatttcaacaacggcctggcgcgtggagtttggtaggtacacttcctacttatattggcacagagctgacatcaattcctcgaataggcatgtctgcttgagagtacaaagcggacgctcgcacttcatggtcccaagtcaactgaggggcaaggtgaccgtacaagaaccccttgggaggcgaccaagcaacaagtcgtcgttgcgacacctcgaggaaaggcaggcaccgcgcttgctgagattgtcgagaagaccggctggcaggcatactccgcgaggggattcctcccctgctttgtgaagaagagactcgagctatcactcgttacttgtgtgagcgatgacggcgcgtgccgataccgcatcgcgccgctctccttacgcgggcaagtagcgactcaagccaatggcgaagtctgtaggaacgccagcacggacaccaaggtccaacttcattagcgttgcagcagcgttggaaagtcaccgactatggcccggcggctccgcgcacgattgccatggccatagacgtcccatagcgatgtaaatgaatgagccggaccaagtaatcagcaacaagccgtttaaggcctcaacacccgtgataatgcgaaggtggtcgttgggaaagacatcgccgaggcctagcgaagtatagctcacgatagaaaagtaaacatagtcaagcggcttggtcgcggctagaccgccgaagctaccaatggccagcactctatctccgagcgcataggctcccgcgtatagaccgatctcaacaagatgggctccgaggaccaggaagaagataaccatgatgcgaacctcagccgtcatcgcgatgcgcgccatgcgcccagagatccagcgtagaaccaagtaatgaaacaggaaagtcaatatgacgagcgataccgccagtattgctgcgaccaacatcctcgcctaccggtcaattcaggctattcttgcgctttcccctgtaatgcggctggggactcctacgagacaaatgctatcacctcccagctagtcggatgttggccttcgcaagctggacgagatatctagatccggtgccaaatccctatcggggcagctggtctcaacttgcaaggtcgaaaagtagaagccgaacctatctcggagcacgccgtgggcctgagccagaactgtgtccgaactgtcaagttcgtcggtaccaatgtgggctgagaagacattcttgccggaggttaggctccacgcatgcatgtggtgaatgttgcgaacagttgggagctcacccagagcggcggcgacttcattgaggtcgacggactcaggagtcccttccataagaaccgagagcgcatcacggatgatcccccaagaaacagccaacaagaccagaccgaacgccataccaagaatgggatcgatggcaaggaatccagtgaagtagattacggatgcagtcacaatgatcaaaatactgccgataaaggtctgcatcacgtgccagaaggctccccgcaggttgaggtcacctttttgacctgaatacagtagccgcatagagactatctcggttagtagtccgccagcggcggccaccaatagcggggtggtcggaaggtcgatcggagactgcagtcgcattgcgcccatgaccaataccagcacggccatgccagcgaggaagacgccattcaacagagcgccgatgatttccgcgcgaaagtttccgaaggttcgatcaagacttgcggggcgtcgcgcaatcctcgtagctacaaacgctagcaccacgccgccaacggctgagaatgtatggaatgcatccgagatgactgccacggagcccgtgtagagtcctatacccaactccaaaaagaagtagataccagtgagccaacctgaaatcttgagcgcacgttcgttttccttggtgcgctcgggcacatgcgtagaatgatccaacgtgcgttccttcgccattcaataaaagaggtactttcgcaaagactaccagacgtcttcgcatctttggggactagccgggataattcgactccggtcctgttgggctcgcctgcaacgctatcgattctttcggcactagccttgttttctcttagcgctgttcccggatcgtacaaaaactcactcaacggatctgtgcaccgtacgtcgacccgtcttgtccgtttcttggagtaatcactcggtcagtgtagatggtctccatgaccaccgccgcgctcgatatcctccatcatttcgtcatgtgactttggcgcggccctgatgatctcctgatactcttcagccgagagctggggcagttttcgcacgaaagccgttacgtcccagaggagcttgtcattgtgagtcacaccccaagccggcatacccgttgccttgatgccatgcttgacaacccagaaatcctctgcggccgtagaacggcttccgcgacgaagctctggggctctgggataaagacctcgactaatctccgtccgggccataccgggggcaagatggcaaccactacacatttctgcatattgcccagcacccgaggcgatccgttttggatcggaaaggtcgtccggggcgacgatctgtgccgcacgaacagagattgaacggtctcgcactgattccaaaagacgaaatactgccttggtgtgcggtacatctgctgcaacgttgtatacgcccgaatacacggtgaatgcagctgcaccggcgccgactaggacagcgccggccacacaaagcacaatcagccagagcgccacagttcctgtgcttcttgtgttagacatgcttcgtcctcgcctcaccggttttggacgcaatcattcgctcatcgccattatcgcgctctgcatgtgggcatcacagccctccaggtccttcttacgcatcagactcttagctatctctatctcacttatggcgacttccttggcatctccgtcgggcattgactggatgtcggtggtcatcgcgtcaagggcagtcttgtcgcaagcaatctggtccgacgtgtgggccaccgcgaccgcatacggcgtcaaaaacaatgctgtggcaatacaggtatgcagaacgttttgagtgaatgcgagcttatccatagtgattgtcctctaatcttgagagtgcgcgtcagacattcgaaacctattggttgccgccacccgtgcctggcgtcttcatcattgtaccgtcatttgcaataagttgccggagccacagtagaaagctcaagccagtagtgtacgagcgaacactgaagtcatgcgtcttactagccgaggcatctccagtctcgatcgcgacggcgttctgaagcttaccgctggtgctccgcctacgcatgattgtcactccatgcggcctggcacgattcgcatagggtgttctccaagcagcatagatggcggacaaacttttgggcgccaatagcagcttgtcgaacccacagagagccgaatttcatcacgccacctttccacctcggtcaaatatacggggtacaaacgcaggcacgcggcgagcgtactctgtgtagacttcgccgaattgatcgcgcgcttcccgttcttcccgtcgggcaagatgcgcatacatccagactagaaccgggaacatcgtgagcgtgagaatagtcggccattgtagaaggaaaccgaacatgatcacgacaaagccgatgtactgcggatgacggacataggagtacggcccggtgctcgcgagcacattgttctgctgggcatcgtaaagaatgcgccatcccgacgcgatcaggacgaagccaccgccgatgaaaacgaaactgagcagatggaacggcccgaaatgagggttggctttccacccgaacagcatctcaagcaagtgccccgcgtcgtgtgaaaaccagtcgactcccgacacgctgctctggagccaacccgataggaagtagatggtgagagggaagccatacatctcagtgaagagcgcgactaggaaggcgctgaaggcaccaaaggtacgccagtcgcgtttcgttttgggcttaaagaaactgtaggcgaagaggataaagatcgctgagttgacgatcacaagaaaccagagaccgtaggcgggcatcggctctgtcatggtcaagttccgccgtttgagtcgtgatctcggttgccatcaccgccatggccaccgtgaccaccgtgcaggaagaagtgcacgccgacacaaagcacaagcagcacaactagaactccgtattcggaaaagatgtggtcacgatgctcgtagctaagcacgaggccagcaatgccgaggaagacgataagagctatgcccgttcgcgacttccagaacccaacaaccggctcctgttggcttcttgactgatcatcttcgttcattggcatctgtctactctacgatcaaccgaccacggatcatgcccatgggacatgcgaaggagaattccccggcctccttgggcacaagcacgacctctacgagttctcccgcgggcagctcggcacttttgttaaagtgttcgaaaacgaccttgtctgagcaagacgcagtctcctctcgacgaaagttaagtcgcactggcttgtcgcggttcacgataatcgtgtcaggtgtgtaaccacctctcacaaggatcatagcctcctgatagcccccactcatttcggtggctctcacgcctttgctgcgcttcaaccaaaaaaaccacacaatgaaaacaacaagcagaagcccggcgatcagcacaacccaacgatccggtgtcacgatacgaccctcctcggttggaagaagcgcagtctattggcattcgtaacgacggtaaccgagctgaacgccatggctgcggccgcgataagcggcgacagtaatagtccaaggaacgggtaaagtacgcccatcgcgacgggaatcccgagggtgttgtagccgaaggcaccgacgaggttctgtcgtacgttgcgcatggttgcgcggcttatctcaatggcggtagccacgcccacaaggctacccttgatcagggtcacgtcgctggcctcgatggcgacatcagtcccagtgccaattgcgaagcctacatccgcttgggcgagcgctggggcatcgttaattccgtcaccgaccatgcctacagtcttaccctcgagctgcagcttctggacctcatgtgccttttcatttggaagaacttcggagagtacgcgcttgataccaacttcccgggcgatcgcatctgccgttcgctcgttgtccccggttagcatgacgatctcaatacctaggcgttcgagcgccttgatcgcctccttggagtccggcttaaccgtatctgcaaccgcgacgagtccggctggagtgccgttgatcccgacatacattggcgttttgccttcgcttgccagctgctcccagtccttcgtcagttcgtcgctgacgatcccgtgatcgcgcatcagctttgcgttgccgagtagaacatcgcgaccgttgatgcgcccgctcacgccatgccctgggattgcaacgaagctctcggcgtcgacaagcgtgatcccacgctcctgagctccctgaacgatcgcctcacccaaaggatgctcagagccactttcaagtgacgcggcaagctgaagaatatcgtcctcgcgttgaccctgagtgacaatcacatttgtcaatgccggctcgccacgagtgatcgtgccggttttgtccagaatgatggaatcgagattctgagacgtttgcagcgcgtctcctgaacgaatcaggatgccattttcggcagccttgccaataccgacggtcagggaggtcggggttgccaagccgagtgcgcagggacatgcgatgatgagggtcgtgactaggactattgtcgcgtagatgatacggggctccggcccaatcagataccatgcgacgaacgccagagttgccaggatcatgaccgttggaacgaagtatccggagaccatgtcaacgaccctttggatgggagccttcgaaccttgtgcgtccttgaccattcggacaatgttagccagcgcagtatccttacctaccttggtcgccttgaacttaaaggcgccagtcttgttgagtg

SEQ ID NO: 3248 - DNA, 16874 bp, synthetic construct
  source 1..16874: mol_type = other DNA
  misc_feature 1..16874: note = Synthetic
aaccgcttcaagaacatggaaacttctatcatcagtcataggcgcagacatagaaactgacaccgtaagctcctccgctccttcagtgtcacaacctctcgcccataacctcatgccgcgctagatggggtcggcttcgcgcttaccgtgaaactgatcgtctgttactccttttccggatgatagtcagatcccgggaggagcgaccggtccggagccgaaggcgacggccggagcgatctccctggtgtctctgtttcatcacatcaagcaccattggagatgccggatgtgattgacagaaatcgctcttgtcttctttctttcttccggaacgatgtttgatatcccggagagctgaggaccgtcgcgaagcgacggccgcaggctctcggcgtgccaaaggcacgcccccttgataatcgttatgatgtctatgtcttattagtgtctaatggctttcgcttagtcgagaaaccgcggaaatctgcgctggctagccatttcaactgtgttctctaccatgttccgaccgtgtccggcgctatgtttcaactgtggacgcttaacttgtccggtccaggcttcaagcgaccggattacgctcgctgccatatgcttccggcgccaacgaagtttttcgactgtggctttcactgtggttagcgaggagctccgagatacttgcaggcctgattgtagtctcgcttcaacgagtcgttgcgtggcaactcctgatgaccgaagagcaaagacgaggctaccttgagcaatggcccggatattttggcgttcagggctatcagaaccttgcctgcagcatagcggtcagcccaggctgcatggtttgcgttgttgcttgtcttcgatgagttgagctgcgtgacagttcccggaatacccttggtgatgcgttcgaagaccttcttgtcattatccgtccgaagcatctgcgctccaaagcggcagaagcctgggcccgcgtgttcaaggagccccagggcatcaagcttgtcctccctcgaaccaccgtatcgggagaatctgaaggcagcattgaagtcgaagcttgttccagcgagtgcgttccaaccatcttcgtgactgcatgtgcggtgaccacagcaccagaagaaatgcagatcgattaactgacgatcattgagaaagtcagataccaggccgcttatctcgttcccgcgcggaacggttggctgtgggcgtaacattggcgcgactgcgccgatttcgccggcagcgtatttctcgttcagaaggacattgagggcgagatgacgcctgcggagtccgtccgaatatgtggctcccaatcccttgtttttgttcagctcgtccttgatgaaatccagggcttccagcagccgggcgattgagcgtttgcgtagtttgccgagcgcgctttcattccaggcgtgctcaaaatcaggctgctggatgttttcctgatgctcgatttcggggggtgtcatttccggctcttcaagcactgcgtttcggtcctccgtcgccttcgtgtgttttcctggagagggcactgggaagccatctcaccgagttcatgctgtggttatagcggccgaggcagcggccttaccgacttttttcagaaaaattcggcgcggtagagcattctatgaaaatacgtggccttgagctttgagccattcttcaagttctctgatgagatcgtcgttccggatagcggtatcccggtagatcgcgtaggcaattgactggtcgtaagggctgaaacccatttctttcatcatgacgccagccttgatcttgcgacttgccaggacggtttcaatcgccgttttcacatctgccagcagacgtccatcggggtggacaatggaaccggtcgcgcccttcgaagcggtcgtgacagtggacggtctggcaggaaccaaggccggactggagcctggcgccgtcgtgctagccacgcaggtgacggaatattccgaagctagccatttgaggaattcgtctcgctcggccgcggtcgctttcttccaatgctgcttcagcccgttgatcgctttcggccgtggcttgaggccggtttggtgtgccgcttcccagagtgtcaacttgccggctgccacatcccttgcgagtgccggatgttctgcctccagccgtcgctcatagtaggtcttattgcgcttgatgctcatggctgccttgtagagcattctacaaattgcgtccatcgaaaaatagaagattctacgcgctggcttctatcattaaagaagccgaccaatcatcaattgcgttgtggccaggcacgattgagatcttccggcatgaacaaagggggcttaccggcgaatggaagctgaatcgacaagaagcccacccagggcgctggatgggcttctcactgccagcctggctggtcataggcaagcagttaggcgcagcattctcaaattaggagtgtgatgctgatctggtgaatattacatgtgagaatgaagtcttcaagattatttttgagtcatagataagtaaatattgacttattacatgaaaatattagactcagagaataaaatcgcatcaattaaattttcattattgcgatgaaggaggtgatggaatgggttgatttgagcttcaaagtagagcgtgaatataggaaagaaattcgtcaattggcggcaagccttgatgttacgcaggttgacgtaataaaagaagccattggcctgttagcgaatgccaatgtgccgatgaagatgtatccgaacctgaaccaggaggctatggagagcgccgagaagcgccgcaaagctgatgatcgaggcctatgcgcatccgagctcaaggtcgaaagcctgccgcgagatgatgatcccgatccgatggagcgcgagcccggaaaacggggaaagaagaagcgcaaccggaagaaaaagagctaacctccctccggaagacataatcggctaggttgccagacatggagacttgatctagtctctatcgcggagtggccggccagggttgcagccctgactgatcgttttgttacgtgatgacgaagacccggagagtgattgaccagctgctccgggtcttttcgctttcaagtccgtggtttttacggtttgcagcatagtcggatcaggtaatctctcttcaattcagtgttgctatatgcttcctgaacgcgacattcatattatgaaaagcaagtgatctttgcatttcgttgttgatgccatcgactgaaggagcagaaaaacctcataaatccggcagcccctcgatttatttctttgtcgtagcaataaaaagcaaacggcgggccgcagcccgccgcgcttctcaatgaagagaattttgtgcactctaaggtgcttgttaacgggcggcccacgatctccaagcggctaagcttttggctgcccaattacgatcttacacattcaatttggcatggcaagttgaagctgtttcttgtccgtttaaaggttaggcgcctttcgtcaacttgcggaggaatatttttatctcgacaactgagttttgggaattgcagactacccaatgggaggtagtcatgaacgcgcaagatcattcagcaccttacacattaggcctcgatctcggtacgaattccatcggctggtgcgcagtcagattggattcaacgggccggcccagcggagttctggattccggcgtacgcatcctgacaccgaatgatgaggccgggcgcgatccgcaatcaaagaactcgcttgccgccaaccgtcgcgccgcacgatccatgcgccgacgtcgcgaccgcttccagcgccgccagaagacgctgatgaaggcccttgtggcggccgggctgatgcccggagatgaagccgcgcgcaaggacctggaaaggctcgacccttactggcttcgtgccagggcattggagaaccctctgggactgcatgagatcggccgggcgatctttcacctcaaccagcgccggggcttttcttccaaccggattaccgatgcggaagatgcggaaggaagtgccatgaaacaaggcatggccaatctccgccaggcgctgcaggtggccgatgcccggacattgggcgaattcctggctcgccgtcatgcacgcgataaacacggcaaccgcgtcgacggcatggggcggaggattggcaaaaccaatgccaacagcggggcaaagccgaatgcggatggtgtgcgcttccggccgaccgcggacggggccaaggtgctttatgatctctatccgacgcgtgatatggtcgagcatgagcttgaggaaatctggaaggcgcaaagccgacatcattcggaattgacggatgggctgctcgggaaactcaagcggatcgtcatcgcccagagacccttgaaaaaacccctggtcggtcgctgcacattccggcccgaggaagagcgtgctccgcgtgcattgccgctgtttcagcgcttccgcattctctcggaaacatccgcgctggaagtggagcggcccgggcgtccggcccgcaagttgtcgatgcaggaacgcgacagtcttgccagcctgttgatgacgcaggcctccacggtgaaattcgacaagatgcaccgggcgttgaaactgccggacgatgccaccttcaacctggagcgtggcgggcgcaaaggtctcgatccggacaagacttcggccgttctggcgaaaggttccatcttcggcaagtcctggcgcggcctctcccgtgtgcgtcaaacggagatcgtcgagaagctgctgactgaggcagacgaggataagcttgtcgaatggctggagggagattgcggactggaggaaggtgccgcagcagccgcgagcaaggcgcgcctgcctcaggggcatggccatatcggccggtccatgctgtccgatctgatcgatgtcatggagaccgagagcgaggaggcgaccgatccggaaacgggcgagatctatccgaggccgcttacctatgacgaggcggtcgggcgtttggggttgcatcattcgagttttgagtccaaccggcatgcgcgtctgccctattacggttcggcgatggcccgtcatgtcatttccaatcccgctgcgcccgaaggcagccaggagcgtatcggccgggtgccgaacccaaccgttcatatcgcgctcaaccagatgcgtgcggtcgtcaatgcgctgatcgatgcctacggcatgcccgccgaaatccacatcgaactggcgcgcgagttgaagcagaaccgcaagcagaaggacgacgcaacgcgccggaatcgggaaaatgaatcggcgaacgagcggcggcgggacgaactcgccaaactcaatctcgccgacacccatggcaatcgcctgcttctgcgcctttacgaggaattgccggcggacgagcgtgtatgcgtctattcgggcacgccgatttcccgggaaatgctgttttcaggagctgtcgacatcgaccatatccttccgcgctcgaagactctggacgacggcttcgccaacaaggtgctgtgcacgcgcgacatgaaccggtttaagggcaaccgcccgcccgcggaggtctggtctggggaagaactgcaggagatcgccgagcgcgctcggcggcttttccggaacaaggcctggcggtttgcgccggatgcgatggagaaattcgccctcggcaacgactttatcgcgcgccatctgaccgacagccagcacatggcccggctcgccaaggactacctcggccatttgtatggcgacgaccgcaatcgccgtgtcttcgccactcctggccggctgaccgccatgctgcgcggcatgtgggggctgaacgggctgatgagcgatcacaatcgggcggaggagggcgagccggtcaagagccgcgatgaccaccgacatcatgccatcgatgccttcgtcattgcctgcaccgaccgcggtttgctgcaaagggtggccactgctgcagggcgcgccgagacccgggaactcgaccgctggtcggtaaagggagagtttccggagccattcgacggatatcgtgacgccctgcgtgctcggctggagaccctggttatctcccataagcccgatcatggactatcctccggtgcaaagggtagtgcgcatgtcacgtcgggccagttgcatgaagaaaccgcatacggtgcggtaaacgagacaatcggcggcaaggctttcaatctggtgacccgaaagccgattgccgctctcagcgaaaaggaaatcggtcaggtgcgcgatgcgcggttgcgcgaagccctggaggaagtcgcctatgaggcgaaacgaggtgaggtgaagctggcggacgcgctggaaacatatggcaaggcgaatggcatcggtcgtgtacgtatcctcaagaccgaaaaatatacgaccacggttcgacacggcaacggccgttataacaagacttacgtgcctggctccaatcatcgtatcgaaatctacgcgacgccggatggcaggtggcatggcgaaggcgtctcggtattcgacgccaaccagcaggatcacacccccgcctggcgcaaggagacgcccgatgcgcgcctggtgatgcgattgcacaagggcgatatgtttgaagctgatctcggcgatggacctcagtattacgtggtgcgtaagctgtcgccggcgaacagtcgcattgaattcgtgccgcaccgctatgccggcaaggcggaggtaagtgcctatatccgtgccgcctattcgaaactgcagaaggccggcgcccgccctgttcgtgttgatccgatcgggcgtgtcacacctgttggaggaccggtttcatgatcgggcgtgtggtcgagatcgccgaggatgggcgtcatctcgcccgcctccgcggttttctgaccgttaacgccggtggaacggaaatcggacgaattccgctcgacgatatcgccgccgtcatcgcctccgcgcacggcatcacctattccaacaatctgctggtggcgcttgccgagcgcggtacgccactggtcgtctgcggttccaaccaccggcccgctgcatttttgtgggcggcggacagtcatcacgaacaatccgggcggatggccgaccaggcggcggcgtccctgccgttgaaaaaacggctgtgggcgcagctggtggttgccaagatcgaaggccagaaggcgacactcgaagccgttggcgcggtccacgaaggatttgcgttgttggcgcgtaaagtcagatcgggagaccccgacaatgtggaggcgcaggcggcgcgccgctattggccgcttctgttcggcaaggatttcaggcgggaccgggctgccggcgaaacgaatgccatgctcaactattgttacactgtgctgcgggccggtacagcccgggcaatcatggccgccggcttgcatcccagcctgggtcttgcgcaccgccagcgcggcaatgcattcgccctggcggacgatttcatggagcctttccgtccgatcgccgatcttttggtccatgaactggttggggacggtgaaagcgaactgaacggcgataccaagtcccggcttgcgcgtattctcatcaccgacatgagtacggcggaaggaaccagtccggtcggcctctgcctggagcgtttagcactgtcggcggcgcgttgttttgccggggaggcgcaaaagctggacctgccgcgacggacactgcctctggaggcgtgacatgggcacgcagctcccggcactcagcggatatcggatgatgtggctttacgtgatgttcgatcttccagtggtgacaaaggccgaacgcaagtccgcctcgaaattccgtttgttcctgcttgatgaaggttttgagatggctcagttttcggtctatcttcgctttgcggaaagcaaggaagccgccgaggtttatatcggcaaggtgcgggccgcgttaccgggcaagggcaaagtgcacatcgtcacaatcaccgaccggcaatacggaaatgcacaaatcttcacgggacgaaaacatgaacacaagccgaaaaatccggaccaacttgttcttttctaattctgcgacggctgttttcactgagttccagaaaaaaaagccccggaaaatccggggcttggcagaatatcgagcttagccgcttggagatcgtgggccaaccgcaactgtaaaagaggagatggactaaccacccatagcttagccgcttggagatcgtgggccaaccgcaacaagtcaatgtgtaggtcgatgtcgtctgccagcttagccgcttggagatcgtgggccaaccgcaacaagtcggggtcgtgatcgcattttgaaaacagcttagccgcttggagatcgtgggccaaccgcaaccagggctttgaacgccggaattcgccccaaaagcttagccgcttggagatcgtgggccaaccgcaacgacagctcttggtgcggcattgcaacagctagcttagccgcttggagatcgtgggccaaccgcaacgccaggatgccttgggcaatgacagtgccgagcttagccgcttggagatcgtgggccaaccgcaactctttgcataggatggaagtctttctctttagcttagccgcttggagatcgtgggccaaccgcaacaggtcatggtcatgccctgatcgtgtctgaagcttagccgcttggagatcgtgggccaaccgcaacctcgtcgatatggattcgtattgggaaaagagcttagccgcttggagatcgtgggccaaccgcaaccgggaagccgcggacacgcatcctgatttgagcttagccgcttggagatcgtgggccaaccgcaacggcgcgcggtcggacacttcgcctcgcctaagcttagccgcttggagatcgtgggccaaccgcaacaggatctttccatcggcgatcagattgccgagcttagccgcttggagatcgtgggccaaccgcaacgcaggcgtcacacttccagaacggcaggtcagcttagccgcttggagatcgtgggccaaccgcaaccgacagcatcgtcgcttgacctgagcgtcaagcttagccgcttggagatcgtgggccaaccgcaaccatgcgccgcgacatgctcatccagatgggagcttagccgcttggagatcgtgggccaaccgcaacgggcgccggcgccgtacctgtcgcgtgcgcagcttagccgcttggagatcgtgggccaaccgcaaccagggctctgaacgcctgtatttccgccgaaagcttagccgcttggagatcgtgggccaaccgcaactcacggttagtgtgtatccgatcgtgttcaagcttagccgcttggagatcgtgggccaaccgcaactcctccggcttcgattccatttcaggctcgagcttagccgcttggagatcgtgggcaactacaatggtgcgaggttacccatcggtacaaaggcaagagaaaccagtttgagatcgtcgaaaacctcgaagcggccctggagcagttcaggagcgtgacggcggagctggagagctaggctttacgcaatcgagacatcaggcagtttgtcgatctcgcgtttcctgacggcgattgtaacatcgccgtagtcgtcgccggccgttcgtccggcgtggccttggatggcgtctgcgatgcgatctgacaacccatgaatcctcgcgttcgtcttgaacgcgtgtcggaaaccgtggagcggcgcgacttccgccggaaccaggccggcacccttgatccacttggcgacgcggttcgagattgtttctgcggatttgaccgggtcctgcttgccttcccgctttgggtagaacagggggccttgctcggtatcctccacgaatttgaggaagccttgatcgatcagctgacgatgcagcggcacgtcccgataatggccggtcttggtcgtgccggcatccggcgtgatgcgcagataagggatgccgtctttctgcaggatatcctgtttgcgaagctgcgtgatctctccgatccgtgcgccggtgaagtgcgccagccaaggcgcccagcgctttgcggcagacagctgtatgctctcacgcgtctctttcggccgttgataattaaatgcgaactgcagaactttcgcggcttcgtcggcattgtagcctttttctcgattgagccgctttttcggcaccgtcaccgaagcggttatcgcgatcgggtcgatatatccatgattgccagcccatttcagggtggatttcacggcgctgagatagcggctgttgatcgtcttcggcgccaggccttgctcgaattgaagatgcgacagccatttgctgatttttctgttcgtgatcgctgtaacgttgtcgctccccaggaactcgatcaggctctcgatcggacgcgtgtaggcttccgttgttcgaccatcgccatcgctccctgtcttggctttcctgcaaagcttgaacaaggcgcgaatcgatgtctcttcgggctgtttttcggaggtcgtctgctcttgaaactgctttgtcgggttgggcaaatggtccagtgcccattgtggatgagtgatctccaacttcgcctcatcacgttcacaagtccgatgcagcgcttcgagttcagcatgggcaatgaatcgagctaatcgacgccaactcggactgccggctgggaaatcatgaaagccgtgggtgcgatatcgctcaattgcgtttcccaatagattggatatcagatcattattagcctttgcggatgctatctctttaattttattgatgtgctggtcatcaatgagcgagttcgaatattcggacgacagatcgcgaaattcttcgtccagctccagttgctctcgataatgccgtgcagcgatttcctcgatggtgagagggcagaatgcgggcggttgccgtgcgggggaaccggtctgaaggcgttctcgtgcatcgtcaatctgccggttgaagccggcgatcacctcgggcaaggcacgaagggcgacctggcggtcgccgcccagcgccttgatcaattcacgtttgccgataagatcgcgcagctccttgggaacgcccatgcgagcatgaaagcgaccgcgtctgtcttcgtgtagatgtctgaccttgcctgccatttcgaaccgattttgtatgcgtctttgtagacgcagtttgtataaaaccggttataatgcaagagcttataaggatatcaagtggttagctggtgctgccggagagatttgaactctcgacctctcccttaccaagggagtgctctacccctgagctacggcagcatctggcgggaaggcgttaaggggctgggccccggtcccgcgggtttctcgtggggtcctgacaggtccggcggtgggccgggtttttttcaggattttgagaaaccgatgcttgttccggtgggcgagcgcctgccggaatgcgagggcttttgccacagttggcgtgtgggcgcaagcgctatcggaacgtttttttgcaaagcctgtcaaagatcttcggccgaagtcccgctgccccttggcgggcgcggtccgacaggataaatcggggagtgagaccgccttgcaagaaggctcaagcctgtggaaagacgggccggagaggcggcggaccatgtcaaaggacgggatcacttcggcgatgactagcggcaaggacaacgaggccccagtcggcaaagcacaaggcggcaaggcagcggacaacgccggctcttccgcaaagaaggctgcatcggcgagcgggtcaaagacccagtcccgcgaggagcggcttgccgaagcccttcgcgccaatctgcggcgccggaaatcggcggccaagggccggaaggcggaggactgaccggacggccgtgccggcgcggaattcaccgctcgtccggttggcttatccgttaaaatggcgcgatttgccgctggacgggcaaaaaatgggccccttgccgccttgcatgggccacatgtagcgtatagacgacggcatcacttttgagattggtcaaggatagtccggcggatttcggggaagctctcaggatcagcacgctttattgtcggggtgggaagatggacagcatcaaggtagtcgggggccgggagctcaagggtgtgatcccgatttcgggggcgaagaatgccgccctgccgctgatgatcgcctcccttttgaccgaagacacgctgacgctgtccaatgtgccgcgcctgcgcgacgtcgcccagctgacccagatcctgatgaatcacggcgtcgactattcggtcaacggcaagcgctccggccaggacgatctggacggccagacggttcacctgaccgcccgcgagatcgtcgacaccaccgcgccctatgaactcgtctccaagatgcgcgcaagcttctgggtcatcggccctctggtggcgcgcatgcacgaggcccgcgtctcgctgcccggcggctgcgccatcggcacccgcccggtcgacttcttcatcgaggggctggaaaaactcggcgccgacatcgacatcgacgccggctatgtggtcgtcaaggcccccggcggactcgtcggcgaccgggtggagtttccgaaagtttcggtcggcgcgacccacaccatcatgatggccgcgacccttgccaagggcgagacggaaatcgtcaatgccgcctgcgaaccggaagtggccgatctcgcagcctgcctgaccgccatgggcgcgaagatcgaaggcgccggtaccccggtgatccgcatccagggcgtcgaccgcctgcatggtgcccatcacgcggtggtgcccgaccggatcgaaaccggaacctatgccatggcggtcgccatgaccggcggcgaggtgctcttgcgtggtacccgggcgaatctcctggatactgcgctcgacaccctgcgcgaggccggaaccgagatcaccgaggttccggaaggcctcaaggtctatcgcaacggcaacggcatccagccggtcgatgtcaccaccgaaccgttccctggcttcccgaccgacctgcaggcccagttcatggcgctgatgaccatggccggcggccagagccggatcaccgagaccatcttcgaaaaccgcttcatgcacgtccaggaactggcccgcctcggcgcccagatccacatcgacggcaacacggcaatcgtcgacggcgtctccaccctgcgcggcgcaccggtgatggcgaccgacctgcgggcctccgtgtccctggtcatcgccggccttgcggccgaaggcgaaaccaccgtcaatcgcgtctatcacctggaccgcggtttcgaacggctggaagacaagctcacccgctgcggcgcgcagatcgagcgaatctccggataactccggccagaacgccggaggatgccatgtccgcaatgaccatacggtttctggttcaggcgggcttcggcaccgtcggcgtgctcgtcattgtcttcggcggctggccctggggcgcgggtgtcggcacggctctgatcatcttcggcctctggctgggtggccgtattttcaggcgcatcgcgacgctggacgagatcaaggcggatctgcgtcagcgggtcgacgaggggccttgagaactgcataccgtttgccggattgccaaattgtccattcccgtttaggtcaacggctaagaagaccggtctgcagggcaaggccggctcccatcggatgagacggacgcgggtgtgatttgacagccatggatcagctgaaacttgcagcactggacgcggaagaccttgaggttctttccgcccatcttcaggacgcggttctgaccgtcggcgacatccgctatctgccgaaggagcgcaaggcgatcttcgtggtgaaccggttcgtctgggacaaggccgccgacaggcgctccggtgcgcacgagcgacgccgcgccgcattggcagtgacccaggtgtcctccatgaagtccagccggatccgccaggatgccaagggcgccgttctggaacttctggcggtgaccttcgaggaaggcgatgcaccggcgggccggatcaagctggagtttgccggcggcgggacggtgcttctggacgtcgactgcatcgaggcccagcttgccgacctgggggctgcctggtcgacgccgaacaggcctgctcacgatctggactgaatggaaattttaaagggcgcaggcaattgcgcccgcctggaaggagcttgacgggtggcgatacgtctgtcgaacaaggacgccgattttgaaacccgcttcgccgaattgcttgccggcaagcgcgaggcatcggaggatgtcgaccagatcgtgcgcgacattctggaggatgtgcgcaagcgcggcgatgcggcggtcgtggactacacgaagcgtttcgaccgtctggaggcttcaagccttgccgaactcaaggtaacggaagccgaaatcgaggaagcgctctcgcaagtgcccgaggcgacgatcgaggcgctgaagctggcgcgcgagcggatccactcccatcacgcccgccagatgccgaaggacgaccgctataccgacccgatcggcgttgaactcggctcaagatggaccgcggttgaggcggccgggatctatgtgcccggcggcaccgcgtcttaccccagttccgtcctgatgaatgccgtgcccgcgctggttgccggcgtggagcgcatcgccatggtggtgccgagcccggacggcatcctcaatccccaggttctggcggccgcaaagatcgccggtgtcaccgagatctacaagatcggcggagcccaggccgtagcggcccttgcctatggcacggagacgatcgccccggtcagcaagatcgtcggtccgggcaatgcctttgtcgccgccgccaagcggcgggtgttcggcacggtcggcatcgatatgatcgccggtccctccgaggtgctggtggtggccgatgccgagaacgatccggactggcttgccgccgatctcctggcccaggccgaacacgatgcggtcgcccagtcgatcctgatcaccgacagcgaggacctggccgcgggcgtggagcaggcggtggaacgccagctcgccaccctgccgcgggccgaggtcgccggcgccagctggcgcgatttcggcgcggtgatcgtcgtcgacacgcttgaaaacgccatgcccctggtcaaccggatcgcggcggaacacctggaactggccgtcgccgatccggatgccatgctggacaaggtccgcaatgccggtgcggtcttcctcgggcgccatacgccggaagcgatcggcgattatgtcggcggatccaaccacgttttgccgaccgcccgctccgcgcggttttcgtctggtctatcggtgcttgacttcgtcaagcgcacgtcgatcctgaaatgtgacgcggacagtctccgggcgctcggcccggcggccatcacgttgggcgaggcggaaggcctgagcggccatgcccgctcggttgcaatcaggcttaatctttaacaggaacaggctgtaaaaggacaggcaccgcatggacgaggcgcacggcgagactaccgaaccggccggcagcaggctcgtcgacgtcgtactcgacgaggcctcgatcgcccgttccacgccggacgtggagcacgaccgggccgtcgccatctacgacctgatcgaggaaaacagctttcagccggtcggccagccgccggcgaactacgtgctccgcctgtcagttgtcgaaaagaagctcgtgctccagatcagccgggaggacggcaccgaggtcgtcacccatgtcctgtcgctgacgccgctgaggaagatcgtcaaggactacgacctgatctgccagagctactacgaagcgatccgccattcgacgccgagccagatcgaggccatcgacatgggccggcgcggcgtgcacaacgagggctccacgatcctgatggagcggctggagggcaagatcgaggtcgacatgaagaccgcccgccgtctcttcacccttgtctacgccctgcactggaaaggatgacgcggtgaccgggccgggcggccgtccgactgcggttctttatgcctgcggcatgaatgccgtacgctcgcccatggccgcggcgatcacccgccacctgtttcccaaccagatctacgtgcgttccgccggtgtccggcagggcgaactcgatcccttcgtcgacgcggtgatggcggaaatcggcatcgataccagccggcatcagcccaagaccttcgaggaactggacgagtccggtttcgatctgattgtgaccctggcgccggaagcgcaccacaaggcgctggacatgacccgcacggaggccgtcgacgtggaatactggccgaccatggacccgacgcttgccacaggcagccgggagcagatcctggatgcttaccggaccgtgcgcgatcagcttcttgcccgcatcaagaagcggcttgagtgggcgccgccgcccagcggataaggtgcaggacgcccttgcagacccgattgtcccgatatcgcacatctttatgcgaaatgcggcagaaagaacggttcactttcgcggcgctatccgttaggttcgccgctcatcagaaagcctaatcaggataccctatggccaaggaagaagctctcgagtttccgggcgtggttacggaactgctgcccaacgcgacttttcgcgtgaaactggaaaatgaccacgaaattatcgcccacactgccgggcgcatgcgcaagaaccgtatccgtgttctcgcaggcga

SEQ ID NO: 3249 - DNA, 14731 bp, synthetic construct
  misc_feature 1..14731: note = Synthetic
  source 1..14731: mol_type = other DNA
accgccgcaggcgatctccctgctgcgcgacagccatgaaaccctgccgcgcgagcccgatgccctggccgccgccatcaaggctgtgccggtcgccgtcaccggccagcgcgggctggatcgggcgatctcgtcggcggggggtatagcacgcagcgccctgaccggggatttcatgctgaaagccctgccgggtgtgttcgccgccggcgagatgctggactgggacgcgccgaccggcggctatctgctgcaggcctcattcgcgaccggcatggccgccgcccgcggcatcgaggcctggctgtcccgatagcccggaccggacctgtggacccgtcagcgcaacaggtcgttgatcgccgtcttggaccgcgtctgcgcatcgacgcgtttgacgatcacggcacaggccagcgacgggccgcccttggggtcgggcaggctgcccggcaccacgacggcatattcgggcacttcaccgcgggtgatctcgccggtggcgcgatcgacgatcttggtcgactggcccaggaaaacccccatcgacagcaccgccccggtgcgtacgatcacgccctcggcgacctcggaccgcgccccgatgaagacatcgtcctcgatgatcaccggcccggcctgcaggggttccagcacgccgccaatgccgacaccgccggaaatatgcacccgcttgccgatctgggcgcacgagccgaccgtggcccaggtgtccaccatcgtgccttcgccgacataggcaccgatattgacataggagggcatcagcaccgccccgcgggcgatatgcgcgccgcgccgcacggcgcagggcgggacggcgcgaaagcccgccgcagcaaactcggcttcgccccagccctcgaatttggaaggcaccttgtcccaccagcgcgatccggccacgccgccctcgaccagacccatcgggttcagccggaagcccagcagcaccgccttcttgagccattgattgacgacccagtcgccattcgcctccgcgcgttccgcgacccgcgccgcgccgctgtcgagaagaccgatcgccgtctccaccgcctcgcgcaccgcaccggccgtgtccgccgacaccgcctcacgatcctcccaggccgcctcgatggcagtttgcaaagcatccgtcatgacagcccccggcaatcctcaaaaaccagcgcgcgacttagcaccggcagccagacggggaaaggggcgggggtgcgggatgccaaaccatgatcccggatcaaccccggatacgacaacggcgggcctgaacccgccgcgcgtctcttcggaagaagagagattttgtgcccacaatgggcttgttaacgggtggccttcgatctctaagcggctaagctagaagcaacccgcagagattgtcatacggcctgaatttggtgtcaactggtccccacaacaaaaatggggggaagtatgacctaccgcctgggactcgatcttggcaccaattccatcggctggtgcgctgtgcgccttgatgacaaggacaggccgtgcggcattcttgatgccggggtgcggattctcacaccgaatgacgaggcgggccgggacccgcaatccaaggcctcgctggcggccaatcgccgggatgcgcgttctgcaagaaagcggcgcgaccgctttgtccggcgccagaaacgcctgatggacgccctggccggggccggactgatgccggacgatgcgcctgcccgcaaggagctggaaaaactggacccctactgcctgcgcgccgaggcgctggaccggcgtctggagccgcacgagatcggccgggccatcttccacctcaaccagcggcgcggcttcaagtccaaccgcattaccgatgccggcgataatgaggccagcgccatgaaacagggcatggccgagctgcaggccgccctgaaagcggaaaatgcccgcacgctgggcgaatacttggcacgccgtcaccagcgcgaccgtgacggcaaccgcctggtcgacacgccgcgcgccgtgcgtttccggccccaggtcgacggcaacaagctgacctatccgctctacccctatcgcgacctgatcgagggcgagctggacgcgatctgggcacggcaggcgcctttccatcccggcctcctgacgcaggcgctgctgggcgagctcaagcggatcatcatcgagcagcgcccgctgaaaacaccgccggtgggtcgctgcacgctgcgccccggcgaggatatcgagaccagcctgggctttgagctcgatcgcggcgagcgtgcgcccaaggcacatcccctgttccagcgtttccgcatcctgcaggacgcctgccagctgcgcgtatcgcgcgcgggcgagggcgagcgcaagctgagcctgaccgaataccgcgccgtatgcgcggcgctgatggacggaagcggcaatacggtcggtttcgacaaactgcgcaagaaggcgaaactgcccgaggatacccgcttcaactatgaactggcgggccgcaaagggtttccgcccgaccagacggcggtgaagctgagcaacaggaaggcgttcggcaagctgtggcggagttttccgcggacgcgccagatcgagatcgtcgaacgtttgctggccgttgaggacccggatgagttgcaggcctggctgtgcgaggcctgcgggctggatcgcgaagcggcggacttcgtctcggcggtacgcctgccgcaggggcatggccagttcgggcgcggcgtgctggccgatctggtcgcggtgatggaaagcggcgaggaggctgtcgatccggacaccggcgaggttctgacgccgccgctgacctatgaccgggccgtcaagctgctggacctgcaccattcgcgcctggccgaccgggcgacgcacgggcgccttccctattatggcgaggtgctgacccggcatgtgatcgccaaaaagaccgccccggaaggcagccaggatgcgatcgggcgggtgcccaatccgaccgtgcatatcgggctgaaccagttgcgggccgtggtcaacgcgctgatcgacacctatggcccgcctgccggcattgtcttggaactggcccgggaactgaagctgaacaagaagcgcaaggacgatatccagcgtcagaaccgcgagaacgaaaagaagaatgacgaaatccgcgccgaactggcggcgcacaatttcaccgacacattctccaaccggctcttgctgaaactctatgccgaattgccgccggacgaacgggtctgtgtctacagcggaacaccgatcggcaaggcgatgctgttttccggcgcggtcgatatcgaccatatcctgccgcactccaggacactggacgacagttttgccaacaaggtgctgtgcgtgcgcgacagcaaccgtttcaagggcaaccgggcgccgggcgaggcgtgggcgggcgatccgctgcaggcgattgtcgagcgggccgaacgcctgtttccgcgcaaggcctggcgcttccagcccgatgccatggcgcgtttcgaacaggagggcggcttccaggcacgccacctggtcgacacccggcacatgtcgcgcatggcgcgcgaatatttggaacgcatctgtgaccaggtctatgcgacgccggggcggatgacagccatgctgcgggcaaaatgggggctgaacgatcttctgcccgaccataatttcaccgaggccaaccagcccaagaaccgcaaggaccatcgccatcatgccattgacggttttgtgctggcctgcaccgatcgcggcctgctgaaccggatatcgcgggcgtcaggccaggccgaagagctgaacctggagcatctctatccaaaggacagtttcccgatccccttcgagggctatcgggcggaactggaaaactgtctgcgcgggattgtcgtcagccacaagcgcgatcacggcctggcgccgggcgcccagaccgatgtcggtgtcacttccggcaagctgcttgaggaaaccgcctatggccaggtggacgcggagatcgatggcaagcgctataatctggtgacccgcaaaccggtgcgcagcctcacacccgccgagatcgagcgcgtgcgcgatgccgatctgcgcgaccggctgcgcgagctggtctaccgggccaagcaggacggtaccaggctggaggatgcgctggccgcattcgagcgcgataccggaacccggcgcgtgcgcatcctgaaaaccgaaaaatccgtccgtgtcgtcgagcattccgacggggtgaaaactttcaccaaggcgtattcgcccggcgataatcaccgcatcgagattttcgaactgcccgatggcagctgggccggcgagggtgtcaccgtgttcgatgccaaccagcccggctatgcgccggactggcagcgccggcatcccggcgccaggctggtgatgcgggtgcacaagggtgactgtgttgaagcagatttcggggatggcgttggcatctatcgcgtatgtcagcttgatgctgagaacaatcgcctcaaactggcattgcacaacgaggcgggctcgcttggcaaacgccacgacgcggacaatgcggttgacccattccgctggcacatcaaggcatactcaagactgaaggatgccggtgcgcgcctggtccgggtcgatccgatcgggcggatcatgcccatggggccggtctcgtgacgggccgggtcgtcgagatcgccgaggacggccggcatttgtgcaaacagcgcggctttctggtcgtcgaggccggcggtgccgagctgggccgggtgccgctggacgatatcgatgccgtgattgccagcgcccatggcctgacctattccaacactctcctggtcgccctggccgaacggtgcgcgccactggtcgtgtgcggccgcaatcacctgccggccgcgatcctgtgggcggtggatgcccaccatgtccaggccgggcgcattgccgaccaggccggggccgccaagccgctgaagaaacggctgtgggcccagatcgtgcgggccaagatcgacagccagcgggtcacgctggaggagaccggcaatccgcatgaaggcttccgcctgctgtcccgcaaggtgcggtcaggcgatccggacaatgtcgaggcccaggcggcgcggcgctactggccgcttctgttcggcaaggccttccggcgcgatcgcgacgccgagggtgtcaacgccatgctcaactatgcctacaccgtgctgcgatcgggcgtgtcgcgggccatcatgtcggccggcctgcaccccagcctgggcctggcccatcgccagcgcggcaatgcctttgccctggccgacgatctgatggagcctttccggcccgtggccgatcttctggtccacgaccttgccgcgcgcggcatcgatacggtggatcccgacagcaagcgggagctggcgcgcattctcatcaccgacatgagcacatccgtcggcgccagcccggtgcgcatgtgtcttcagcgcctggcgtggtcgctggcgcaatgcctggccggcgaggcacgggacctcgacctgccgcgccgcactttgccgctggaggcatgagcggtggcgcagcgccggccggccctgagcgggtacaggatgatgtggctatatgtgatgttcgatctgcccgtgggcacgcccggcgagcgcaaggcggcaacaaaattccgcaaattccttctcgatgaaggattcgagatggcccagttttccgtctatcttcgtttcgccgacagcaaggaatcggcggaaacctatatgggccggatcggcgaggccctgccgaaaaagggcaaggttcacatcgtcaccctgacggacaaacagtatgagaacgcgcgcattttcaccggaagaaaaggggaaccccgccccaaaaatccggaccagctcgcccttttctgagccaaagacgctggttttgcacgcccggacaaagaaaaagccccggaatttccggggcttgcaagagtatccagtttagccgcttagagatcgaaggccagccgcaactatataaggggaacaggcgcgcgtgagtagagtttagccgcttagagatcgaaggccagccgcaaccacggttatgtcaagcggcgtcccgggcagagtttagccgcttagagatcgaaggccagccgcaacatgcttttggcgttccagaagctggattgcagtttagccgcttagagatcgaaggccagccgcaactatcctcgacagcaatgtcagcgcgaccggagtttagccgcttagagatcgaaggccagccgcaacatgcggaggtcatgctgaaaatcgaaccgtagtttagccgcttagagatcgaaggccagccgcaacatctcgatgcttgaagacggcccggtcgagagtttagccgcttagagatcgaaggccagccgcaactccggcgtctggcgctgcgaagtgctcggaagtttagccgcttagagatcgaaggccagccgcaactgaatgccgatcgccagcgtcacagacgccagtttagccgcttagagatcgaaggccagccgcaacaatgagccgcgcgcggaaatctatgccgcagtttagccgcttagagatcgaaggccagccgcaaccgaaatctatagcgggttaaggcagaaggcagtttagccgcttagagatcgaaggccagccgcaactcgactaggtacaggaaggcgtcgacttcgagtttagccgcttagagatcgaaggccagccgcaacctaggcgtctcggtcgaagaccaggccagcagtttagccgcttagagatcgaaggccagccgcaacaaggtcttcgcgcgaccatcgaccacatcaagtttagccgcttagagatcgaaggccagccgcaacgatgccatgtggcggtcctcctaggcggtcagtttagccgcttagagatcgaaggccagccgcaaccacaacggtctcttgctcataacggaatgcagtttagccgcttagagatcgaaggccagtcctcaccccggcagtgtggcttctgttgccaggatttcgccggcgacttcgcgcaggacgaggccgagggtttccatgctttctgcgagggggctgtcgcggcgccagatcaggctgatctcgcgcttggcggcgctgtagcggatggggcggatcacctgttcggggtcgcggcgcgcctcgaccagggcgtagaggctgggcaggatggcgacgccggcgcccatcaccgccatctggcggatggcgtccagcgaggtgccctcgtattcggtggaaatgcgcgcgccggccatgcgggccagttcctgcacgacttgcgatagtctgtaattattgccgagtgtcagaatttcgcgcccggtcagctcttcgaaacccaccgggccggggcggcgcgagagcgcgttctcattggcggcgcagacaaagagccgctcgtcaaacaggtgcatgctggccgtgttgacatggtcctcggcggtggagatcagcaggtcgagccgcccgtccttgagcttttcgtccaggctcttggtgccctcctcgcgcactgaaaggcgcaagtccgggaagcggcgatgcagttcgcgcacggcgccgggcagcaggtaagggcccagcgtgggcagggtgcccaggcgaaagcggccttgtaccgtgccggcggagcgccgggccacggtcttcagatcctccagctcggtgaagatgcggcgggcgcggcgcaccacttcctcgcccaggggtgtcatgaaggcgcccttgcggtcgcgctcgatcaggcaggcgcccagctcggcctcggcctcggcgatctgggctgacaggctgggctggctgacattcatcaggcgggccgcctcgtggaagcgcccggtctcggcgacggcgacgatgtattgcagctggcgcaatgtggggcgcatgcatgtatcctcagggcggaaccggattgatagtgcagtcctatcgatcttccaacttctttcgattggccgcgatcaacgcgcagggctaggcaggtctggacggaaggcatttttttgttccggtcactgccgcatgtgctgtcccccaacccggcctgcggcgggccgtcccggtgcgcgccgccgctgacgccccccggcggaggccgtgcgtgccgggccggcagtccgggcggccggggctgtcgcacatccggcgccggatatgccttccgtctctcgcaaaccgcgacccagaccaggcatatcaaggaggcattgatgcccaaattcgcagcgggtgtcctgaagttccaggacacggtctatccggaaaaacagggattgttcgaacgcctgagcgagggccagtcgcccgaagccctgttcgtcacctgttcggacagccgcgtcgagctggccatgatcacccagaccgaaccgggcgagctgttcatctgccgcaatgccggcaacatcgtgccgccgcacaccgagcagaccggcgccatgacggcgtccatcgaatacgccgcggcggtgctgaacgtgccgcatatcgtgatctgcggtcacacggaatgcggggccatgaagggggccatgaacccggacggtctggacgggctgccgcatgtcgccaaatggctgggctatgcccgcgccgccgtcgacattgtcggcgaaatggcgccgcaggccgacgaagccacccgcatgcgcatgctgatcgagcagaatgtcctgctgcagctgcaacatctgcgcacccatcccagtatcgcgcggcgcctcgcccgcggcgatctggaactgcatggctgggtctatgacatccgcaccggcggggtcgatgcctatgacgaggccgatggccgtttcgtgcgcgtcgatgcccgctatgcctcggaaatcgctgccctcgccggggctggcgagtgcgcggcctgagccggatcaaaaaggggaagatcatggctgaaaacaaggcgtcgccgggtctcggcggctatttcgacctgtccaatctgaagggcgatctgtttggcggcctgaccgccggcattgtcgccctgccactggccctggcctttggcgaagcctccggcgccggcccgatcgccggcctgtggggggcaatctttgtcggtttctttgccgccctgttcggcggcaccggctcgcaggtgtcgggcccgaccggtccgatggtggtggtgttcgccggcctttatacggcgctgggcggcaatccctcgctggtctttgccgcggtgatcctggccggcgtgctgcagatccttctgggtgtgttccgctttggccagtacgtgaaactggtgccttatccggtgatttccggcttcatgagcgggattggcgtgatcatcatcgcgctgcagctgtcgcgcctgttcgggcatgaacccgatggcggcggcaccattccggccttccaggccgtgcccgcagccattgccgatcccaatttcgtcgccctgggcatcgccgccctgtcgctggcgatcgtctttctgtggcccaaacgcctggcgacctggatccccggcccgctggccgcgctgttcgtgggcacgctggtcagtgtctccattcccggcgctccggttctgggcgatattcccaccggcctgccggcctttgtcgtgcccagcgtggacagcggctcgctgctgatcgtgctggaggcggccttcatcctggccattctcggcgccatcgacagcctgttgacctcgcttgtcgccgacaacatgacgcgcacgcgccaccagtcgaacaaggagttgatcggtcagggtatcggcaattccgtggccggattcttcggcgccattcccggtgccggtgccaccatgcgcacggtgatcaatatccgctccggcgggcgcacgcggatttccggcatggtgcatgcgctggtcctgctggccgtggtcgtcagcctggggccgctggcctcgcagatcccgcacgccgtgctggccggcattctggtcaaggtcggcgtcgacaccatcgacgtcgcctatatccgccgcgcccacaaggggccgcgctgggatctggcgctgatgctgctggtcctgctgctgaccgtgttcgtcgacctgatcacggcggtggccgtgggtgtcgtgctggcggcgctgggctttatcaagaagctcgccgacgaccagatcgcttcggtcaatcagagcgttcccatgcactcgaccgaggaggaagtctcgatcctgaaacgggccggcggcaaggtgttgatgttcgagttcggcggtccgctgagctttggtgccgctgccgatctgggccaccatgtccgccagaagacgggccatggtgcggaaatcctgatcctggattttgcccgcgtgcccttcctggacgtgtcggccgtgaccgccatcgagaccattctggaagatgcctgggccgccggaaaatcggtctatctcagcggtatgaatgagagcgtcgcgcaattgctcgaccggttcagcgtcaccgccgacagcgcgcatccgctcgaggccttcgacagccggatcgaggcgctcaagagcgccgatgcccgcgcatcgggccaggccgtccccgcctgatcggcaggcctggtccagcccggccggacggaggtgcgccgcccccgtccggccggttcatttggccgaccctactcgtctgccagcagcaagggcgtcaccggttccccgcgcggcgccgcataggggatgacgagccggcttccggccggtcccatctgcagattgacggtcgccgtccggctgtcggcccgggtttcctcggcgacgatgccgccggaattgcggttgcgctcgacatggatgccggcacccagcggcaccaccaccatgcggatcacgctgccggcctggatggtgcgggcgatgagctggaagttctcgaaccggtagacatccggctcgcccggcgtgaccggctgcgcggtatggatgtcatgacgatagcgtgcacgcacccagtcctggctgaggaagatgacatcgccatcggccttcacctcgtagagggcgacgcggatgtcggtgtcgggcacgtccatggacaaggacagctgtgcactcgggaagccggcgatatcggtcgcggtttggaagggcgcactgtcatagaccagcccgtcgccgtccagacggtccatcaatccgctatcggtcatgaagtccggcgagaccagggcaccgccttcatatccctcgttgtagccgggcagggacgggtcgtagacatagcggtcgtcggcctgggcgtccggcgcggcggtctcaagctgcccatgggcggcgattgatccggcggtgctgtctggcgagctgagccaccaggtctcgcgccgcgctgtcatcgcctcgacgctgggggcgctgcgccattcgtcggcgccgagcacataatagacgacgtgatcgcgcaggaaggcgggcaggggcccgtccttcatcacatggtcccaccactgcacatgcagcgcccggacgtccaggcgcgaggcagcgcccaggtcgagcccgcccatgtgacgccggggattgcgtgtacccggatggttccacggtccgatcacgagataggagccggctgcggcctccggcgtggcgtgctgcaaatggtcctcgcggaaccgcaccgtgccgacgccgtcgaactgggcgccgatcgacaggacgggcatggtgatgccggcataattctccggggcgatcgtggcggcctcccagaacgtgtccatggccgggtgatccatccagtcctgccagatcgcgctgggatagccgaccagcgcgtcgaattcgcgcaggggaatgtcgccgcgggcgagatcggcataggcgcccagccagaaggcgtcgtcatgggcgatcactgcgttctgcgtggcgccgccggtcatcaccacccagtagaaattgaagggccggtgcacattggaactgtggatgccgatatcccagccgaccatgcccgccgaggcgggcacgatggtgcgcagggcgggcggttgttcgccggcgatcatccactggttcttgccggcataggagccgccccacatggtcacctgaccgtccgaccagggctggtccgcaatccaggcgatgacgtcatagccgtcgcgcccgtcctcggtccacggaatgagttcgccgtccgaaccgccgcggccacggacgttcaccgaggcgaaattatagccgcgccgggcgaaataggcggcgacgtcggaataggaatcggcgccatagggggtgtagagaaggactgtgggctggggccggtcgccgcgcggacgaaagatattcccgaccagttcggtcccgtcgcgcagcgggatggtgacctggaagtccagatcatagggccgggtcagcacgggcggctgcgtcacgccggctccgtcatcctgtgccgctgctgcggttccaaggcccgccagggccagcactgctgcatgcatcatgtgccgcatcgtcatactccataccttgcctgcccccatgagtagcgaggcggcgggccggctggcaagcgcgtggccggaatggacaggagcggtgagaggctggccgctagccggtttcgcgcacgcggacatcgccgagaaaggtgctcaggcagtcgacggcatagtggacatggtccgggtgctcgcccggtgcggcgctttcctcgtcgcgcggcccggccttggcgcggaccagcacggtggtgaagcccatctcgtgcgcggtcttcagattgcgcaccgagtcctcgaagaagacggattcgggcaccggcagatcatagtggcgcgtgaagcggtcaaacccttcgcgatggggtttgggcacgaaatcggcggcttcgacgtcgaaaatatcgtcgaacaaatggtcgatgcccagctggtccatcaggttttccgcgtggcggcgcgaaccgttggtatagaccagccgcttgcccggcagggcctggatacgcgatgccagaaccgggtcgggcgcgatcatggcggtgtcgatatcgtgcacgaaatcgagaaacgcccggcggtcgatcgtgtgattggccatcagcccgttcagcgtcgtgccataggcgcgccaatactgtttctggacggtgcgggcctggtcttcgggcaggtcgagcaggcgggcgacataggccgtcatgcggcggtcgacctggctcatcaccggggcgtcggacgggtagagcgtattgtccagatcgaacacccagtgcgtgacatgggtgagatcgggccgggtattgtcgtcacgcatcaattgctcccgcggaaatcgctctcttccagcgtcacgcggacgccgccattctccggctgcggcacacgccggaaagcagcatcgccatagccgcgttccgcacaggcggtgcggccctcggcgacaaagcgcgccggggcgaggcagaagcgctcgctgcccccggtcatcgggcggcggccggatgacgcaatgcgctcggcatagacataggcattgtcgctctccagccgggtggccagcaggcgcgcgcactcgccggcatggatgcgccaccagccgcgcgactgccagatctcgccgacgcggtgaccgatggccactgcgatatcgccatcggcggtgttgcacacggtcagcccgctaccggcattgcgctcaagcgcataggattccagcgcgtcgaccagcgcgtttccgctgatcgacgagtcgagttcgcggtcgcgtcggaagctcgcgatggcgcggcgggtggaattgccgctgatcccgtcgacggcgttgaccggatagccggaggattgcagcaggcgctggatgccggcgtcttcggcgtcatcgccgaaatcggcgggttcgaccagcacggtccgggcgcgctgttcgccctcgcgcgggaagaaatcgcgggcggccaggcccagggcggcgcagcgcgtattggcgacgacttcgaaatcggtctcgtcgacgcagagcggcacggtgccacgccactcgcgcaccccgcccagataggcgaaggaagagcgggcatagtagaagacgggcagatcctcgcccagttcggcatcgtcgaccatatcggcacaggcgccggggcggatacgggtccagccgcggatcgagacaccgccttcaacggtccaggccactgccgcatcgacgatatagctggtctcgttgcacaattccgcagccgccgcgctgcccgccgaggccccggcaaggccggtggcggcgagggcggcaagcagcaggcggcgcagggcggtcatgtcagctgaactccggcaacaggtcggcaatctcggcgcgcaggacgtcgataccgtcggtcttgctgctcgatgtggcgatgacgcgcgggaaggcggccgggcgtttggcgatggcggccagcgttgcggccaccacgcgctcgacctcggccggcttgatcttgtcggtcttggtcaggacgatctgatagctcaccgcggcttcgtcgaacacgtccatgatcttttcatcgaccgtcttgagaccgtgacggctgtcgatcagcagatatacacgcttcagattgacccgtccgcgcaggaagttgcgggtcagacgggtccatttctcgaccaccgccttgg

SEQ ID NO: 3250 - DNA, 9443 bp, synthetic construct
  source 1..9443: mol_type = other DNA
  misc_feature 1..9443: note = Synthetic
ctcgggcccactgggtgccgcgctgcgggcggaggaagcgctgcgcgccggccgcgagcccgacgccgactgtgtcgagctcggctatgtggcccggacctggacgctgaccgaggcagggcgcaaggcgctgtgggcggcccagggccggacccggccggtgggcgtgcggtgagcggcggtggcccatcgcacggtgatcgaggcggcgcgctgggtgatggcgtggcaggacggcccacccggcgcgtgcgtgcagctctggcacgcggacgcggccgacgccgtgctggtgatcggcggcgcgccggcggccggcgtctgggccgactttcgcgccctggccgacaaccaggtggcgacccacgcctattgtgtgggcttgctgcggggcttgagcgctgggcccggcgagcgcgggcaaaccacgaggcatgagtgatcagtgaccgggccgacaatggggccgataacgggggcagggcgatgcgagacggcacggcggaccaggtgacggcggacgagcggcgcattttggcggcgctgacgcccacacggtccgaccagtggatcactggccgcgatctgaccggggcgctggtggccgggttgctcgccggcggtctggtcgaggcacagaagcgccggggcgcgcgctggctgtcggtggcgtcggtgggcacggcgcgggtgcgcgccgcctcgggcgtctgggtcacccgcatggacggcatctaccgcgcccggaccacggcgcgcggccgccggatcgtggcccagacctatgtgcgcccggcgcaagcgcccgacctgacggccgagcagatccgcaccctgcgccggctcaagcgggcgcgtccggcgggccagatggccaaggccgggcgtcaggcccaagcggggcagggcgacgccgactgggtggcgatcgcgcggttggcggccgacggccgggtgcctttggggcttggagatctggcgcgccgggggctggtcgagacccgctatccgctgcccggtggcgccggggcttgggcggtcggtgcggcggtcgacgtggcgcatggccaggcgcgggtgaccgaggccgggcgccgggcgctggccaaggcgtcgggccccaagcgggccaagcgcgcgctgcgtgccgacccgtcggcgcccgaccgcggcacgcccgagacccgccgtcagcaagcccgggcgccgcgtcgccgctcgggctatcgcagcctggagcgccggctcaagccgcagcaactggctgcctgggccaagatcctggcggcgcgggaggacctagctcgcgacgtgcgcgcccgcccggcctcgcccgagtgccggcagggcgcgggctgtggcaatgtgcccgagcatgtggtggccgagcgccaggaccgcttgcgcgcctatctcgcctggtcggactggctccaccatcgttggccggggcgctggcggtggcggcgtcaggtggcggcggtggtgctcgacgacctgacgatcaccgccgcccgcacccgcttcggcggccgcccggaggtcatcgaacgcgaagtcgccgccgtgctggaccaagcggcgcgggtgctgagacgtcggtgaagaggacgggtcaaggaggtggatcggttttgggtgaaagtggtgtggggcgcgttatcaaccctgcactgatcggcgtaagtatcaacggccccaggcatggctgatgaaggggtgttgttgggttgtaaaggtgaggtgtaaagaaactttttggctcgaaacaaacaacggcggacactgaaggcccgccgtgtcgcccttataaaaagggattttgtgcactttaaagtgcttgttaacggatgccctcgatcccaaattcggcgatccgagcgcaccgtaacaaggtacgcgcttttgcgtcaaggcctttttgtgcaccttttgcttgacgacgcgctcaagccaaggtggtttaggtgtttgagttgaattttgggaatctttgagcgttggcgggagcgtttcatgcgagaacggtatcgcttgggcatcgacatggggtcgaattccatcggttggtgtgcattgtctgtgaatgaccgtggtctggtcgatggactgttggacgcaggtgtgcgggttttgtcgcccagtgaagaggctggtcgcgatccgcaatcaaaggtctcactggctgcagaccgtcgacttgcccggtcggctcgcaagcgtcgagatcgttttattcgtcgccgtgatcgcctgatggagacgttgattggtgccggcctgatgccaacggacaagaccgcgcgcaaggctttggagaaactggacccatacaccctacgtgctgaggcgctcaaacgccctttggcgcctgaagaactgggccgggcgctgtttcacttaaaccagcgccgaggattcaagtccaatcgaattgccgatgccggtgaaaaagaggcgggcgcagtcaaggcaggcgctgacaggttggtggaagcccttgaaaaggcaggtgcagaaacactcggcgcctatcttgcgggtcgccacgggcgtaacctgcaaggcgagtgcctgaaaaacgccgattgtcagccggtccgcttccggcctcgccgcgaaggggcgaaggatgtctatgatttttatccgacccgagatttggtcgagcaggaaatcgacaccatctggtgcaagcaatcaccgcacttgccccagttgagtgattcattgaaggctcgtatcaagagaataattttagggcaacgacctctgaaaaagcccctagtgggaaactgcacgttcaatccaaaagaaaagcgcgcgcctcgtgccctgcctctgtttcagcgctatcgcttactgactgagacggcaaatctacgggttgaagaggcaggtcggcccgaacgcccgttgagcaatgaccagcagcgcctaatcctggggctgctgtcaacgcgttcgggggaggtcagcttcgaggccatgcgcaaagcgcttaagctgcccgaaggcgcggcctttaatctggagcggggtggtcgcaaggggctggatcctgacctgactgccgccaagctggctcataaggatctgttcggaaaagcctggcgcagttttgatatggccaagcaaaacgacattgtgcaccgcctgctgaccgaagaagacgaagccaagcttctagattttttgcaagacgactgtgggctctcggccgaccgcgcggagcgggtgaatgaggctcatctgccgtcagtccatgggcataaggctcatctgccgtcaggtcatggacatattggcgaaacgatgctggcccggctggtggaggtgctcgaaaataatacgcaggactgggaggatcctcaatccggcgaaatcatcacggcgccaataacctacgacgaagcagtgcagcgattggatgctcaccattctgatatgcgcccagcagctacccacgatcgcttaccctattacggcgatgtcttgccccggcatgtaatccagaagcccgatgccaataaagccagccaggattatcgcggccgggtacccaatcccacggtccacattgcaatgaaccagctgcgtcagatcatcaacatgctgatctctgtctatggcccgcctgatagcattaatattgaattggcgcgccagttgaagcaaacgcaagagcagaaagatgagtggacgcggaaaaataaaaaaaatgaaagagagcggatcaatcgccgccagcgtttggccgatcttggtatcgccgacacgccgggcaatatgcagcttatgcggctatatgacgaactgcctccagatcagcgggtttgcgtttacagtaatacgccgctttctatggagatgattgtgtctggcgaagtggaaatcgatcacatattgccccgctccaaaacgctggacgacagtttcgccaataaagtgctgtgtacccgtcaggctaatcgagacaagggcaatcgtgctccggccgatgccttctccgttaatcaactgaccgaaatccacgcgcgagctaaaacgatcctgcccaggaaagcttggcgtttcgcgcctgatgccatggaccggttcgaggctcagggcgggtttttggccaagcaactgaccgacagccagcacatggcgcggttggccaaggaatacctgtcccacatctgtgctgcggacaaggtgactgcttcgcccgggcggttgaccgccctgctgcgcggcaaatggggcctcaacagcctgctctatgaccataatctctacggccccgacgacactccgcccaagcagcgcgaagatcatcgccaccacgccatcgatgccttcgtcatcggctgcacaacccggttcatgctgcaacgagtggctaccgcggcaggccgggccgaagaactggacttggatcgcctagccccgcgcggcgagtttcccgaacccttcccaggctatcgcgaagagttgaaggcacgccttgaggctatgattatcagccacaagccggatcatggccgccaaggccagcttcacgaggagaccgcttttggtcgtgtcgatgaagagatcgacggcaagcggttcaatttggtcactcgcaagcccattgagggcctgaccgaaaagatggttgcccaggtgcgcgacccgcgcttgcgcgacgccttggtcgatcttgttaaggcgaccaaggagactctcgcggctgaggcctgtgtaaccggccaacctttggaaaagcgcgatatagagaaggctatcgcccgggcccttgctgattatggcaaggaccataacgtccggcgggtgagggtgttggtaaccgaatcatcgacccgtactgtgcgtcatggcccgaaccgcgaattcgaaaaagcatatgtgccgggcagcaatcaccgcctggacatctatgaactgcccgatggtacttggaaaggtgaggggatcagcgttttcgatgtcaatcagccgggctttcaaccgcgatggcgtgccgcgcacccggacgcccggctggttatggctctgcacaagggcgatctgtttgaggcggatttcggccatggcccggaaatcctggttgcgcgaaagctgagcccggccaacggccgcatcgagttcgtcagccatcgctgggccggtaagatgacaccccaaacctatcgtcgggcggctttctcaaagctcaaggccgccggtgccaaaccggtccgcgtcgacccaatcgggcggatgagacaatcttagggggcgcccatgtatccacggattgtcgagatcgctgaagatggtcgccacttggcgaagcaccgtggttttttggttgtgcaacaggacggggcggaattggcgcgtgtcccgctcgacgatgtggccgcggtgatcgccacagcccacggcttgacttattccaacgcactggtctgtgctttggccgagcgcggggtcgccttcgtcctgtgcggccccaaccatatgcccgtcggctttttgtggccggccgaatctcaccatgaacaggcgggccgtatcgccgaccagataaacgctagcaagcccacccgcaaacgcctttgggcacaattggtggctgccaaagtaacccaccagggggcaatcctgcgttcgcttggcaaggcaagcgaggggttcctgatgatggctcgtggcgttcggtcgggcgacccggacaatgtggaggctcaggcggcccgacgttattgggcgcggttgtttggctccgatttccggcgtgaccgatcccaggatggggtcaatgcgctgctcaactatgcgtatacggtgttgcgcgccggtacagcacgggccgtcatgggggctggcctgcaccctagcatcgggctgggtcacagccgacgaaccaacagctttctcttggtcgatgatctgatggagccgtttcgaccgatggccgacagggaagtctgtcgcttggttgaagccggcgctacgacggttgatcgaaccgcgaagaaagcgcttgcggctctattgagcaccgacatgagctcacccgacgggatcagccccgtctataaatgccttgagcggactgcctggtcgctggcggcttgccttggggggcgggccaaggtgctggaaatcgcccggccgcctttgccattggaggggtaggcggaatatctcgtaattccaattggttcggggcgcttcgccctgaacccattggtcgaatgaacggcattggggggcacctcaagaacccgagggcagcacaaggtaatgtctacgatattgagcgggtatcggatgatgtggctctatgtgatgttcgacctgccggttttgacccctgacgaacgccgtcgggcgacccggtttcgcaagactttgctcgattgcggttttgagatggcgcaattctcggtttacttgcgcttctgcgatagtaaggaaactgccgaaactcatatccgcaaggtgcagtcagtcctgccgcctgcgggttgtgtccacatcatcactattaccgacaaacagtatggaaacgcacggatcttccaaggaacgatgcagaaacgccccccagaaaacccggatcaattggtgcttttgtgatcaatcggggttgttttttggcgttcagaaaaaaagaaaaagccctgaaaaacagggctttaggtgaggatctaggctagccgatttgggatcgagggccaaccgcaacggcctgaacgacaaagccgatccggagcttaggctagccgatttgggatcgagggccaaccgcaacagaccgaaccaacggcaggagtagcagcataggctagccgatttgggatcgagggccaaccgcaacgccctccggcggcgccagcgaccgagggggaggctagccgatttgggatcgagggccaaccgcaactgcgtgtgctcgtcatattcgtggcggattaggctagccgatttgggatcgagggccaaccgcaactagttgtgtcgcctgcctggcctagcccggaggctagccgatttgggatcgagggccaaccgcaaccaccaggccaatggcggtgagcacaccgggaggctagccgatttgggatcgagggccaaccgcaacgaaatacttggcggccaactcgtcggcgcaaggctagccgatttgggatcgagggccaaccgcaaccgatggtcggaaagacgtgttgcgcgagggaggctagccgatttgggatcgagggccaaccgcaacgacacggtgaaccgggtcacgtccgagcgcaggctagccgatttgggatcgagggccaaccgcaactcaacaaatttcctcataccgcagcaaattaggctagccgatttgggatcgagggccaaccgcaactgtttgctcttggtgacgttcaatatacgcaggctagccgatttgggatcgagggccaaccgcaaccgcatcgagcaaggcccgcctgttcgggtcaggctagccgatttgggatcgagggccaaccgcaacgtcggccagatagtccagctgctcgaagcgaggctagccgatttgggatcgagggccaaccgcaactgtggccgcggactctcgcagttggtcgcaggctagccgatttgggatcgagggccaaccgcaacacaggcggtgaaagccgcgccggcggcgggaggctagccgatttgggatcgagggccaaccgcaacgccgacaccgaccggccgtcggcgcgcgccaggctagccgatttgggatcgagggccaaccgcaaccggggcgttgtcgatgtcatcctggggcacaggctagccgatttgggatcgagggccaaccgcaacgaaaaagctgcgcgaagcctttgcgacggcaggctagccgatttgggatcgagggccaaccgcaacccggcattggcgcaagccttggcgggcgataggctagccgatttgggatcgagggccaaccgcaacgttagaatcacggctaagaaaggaaagccccatatcatttcttagtgcgccggccaaggaaaggggcctttttcagacatggcgttatcaccggagccatcacggttggggcagcgcgtggccatttcgaccgcgggtgagggcgcagaggcgttcgtgccccctcccttgccgccggtgccgtctgtcaggatggaccggctctaccgtccactcgagcgcgcaaaccgcgcgatcggacggctcgatggcgtgacgtccatcctgcccgacaccccgcttttccttcaaatgtacgttcgaaaagaggcgctgctttcgtcgcagatcgagagtacacagtcatcgctctccgacctgctgcagcaggtccttgagaacggcgactgggaggcatggctggagtttttcctcgacggtatcgccgagacgtctctgcaggcatccgaggcggcgcgcgagattcttgcgcttttcgaagctgatcggcaccggatcgaggatctcggtatcgtgcgggaggtgaccgggaagcagtgcggcagactgtatgtctacagcgactatctcgacattctcagccgaggcacggagcccctgtgatccctcgatccgagccgccccggctcaccgggggttctcgcgcttcgatctcgttgtcagcccgcacccccttgcttatgtgctcgataagcgatagggtgtgcttaattccaaaaactgtatttagcccgccccggtcggcgggctttttcgttggaggcttggcccatggctcggcggttcgcgcccgatttgcgggtcgagcaccatctcgacgacgccgtggcgtttctcgatcggttgggctcgaagcgctggcagcgcgcggtcctcacggcgatcaaccgggccggcgcgtcgacccggtcccaggccgcctcgaccgtgtccaaggccatgggcaccaaggtgcgccgcgtgcgccaggatctgcggctggtccaggcgcggcatatcgacgagccggcgcgggtgcgcgccgtgggcaagagcctggggctcatgcagttcgccgcccgacagacccgcaccggggtcaccgcacgggcctatggcgtcagccggcgctatcgcggcgccttcatcgcccagcgccacggcaccgaccacgtgttcatccgcatcggcaaggaacgccacccgctgcaccggctctatgggccgagcgtgcccgagacgctggccgacccggcgatccacgcccgcctggtcgagcatggcgtcgagcggctggcggccgaactcgcccggcagatggaccgggcgctctaccgcaaacacggccggcgctgacgccgccggggaccctgaggctgacaaaccaacacgggtgcgcggcatcgcgatggatcggtatttttcaggggcccaaaactgggtaacacgggtaacaagggtaacaccgacctggtcagccaggc

SEQ ID NO: 3251 - DNA, 23357 bp, synthetic construct
  variation 15757..15785: note = note, n is a, c, g, or t
  misc_feature 1..23357: note = Synthetic
  source 1..23357: mol_type = other DNA
  variation 16142: note = note, n is a, c, g, or t
  variation 15607..15665: note = note, n is a, c, g, or t
tgatggtgtggatcagcatggcgccgaggaaaatgccgagaatcgagccgcgcccaccggtcagcgagacgccgccgatgacgcaggcggcgatggcctgaagttcgatgccgacgccctggcccggctggacactgccgacgcgcacggtcgcaaggatgccggcgaatgccgccatgccgccggcgatggcgaaggcgatgatcttgacccgattggtgttgatgccgatcgcggtggccgccgcctggttgccgccggtggcgaagacgtggttgccgaagcggtggcgatgcagcagaccatagaaggcgagcgacaggaccaggaaccaccagaaggccgcgttgatgccgaggaaggtgccgctgaacaggccctggaagatcgggccgggatcgaaacgaacctgcacggcgccgttgtagagcagcaccgcgccgcgccagaacagcaggccgccgagcgtcacgatgaacgagggcagcctcgccttcagcgtgatcgtcccatgcaggacgccgataaggacgccgatcaggatcgctatcggcgcggccaggaacggggtccagccggcgtttacctgcacggccatgacgatcgcggtcagcgtatagaccgacccgaccgacagatcgaattcgccggcgatcatcaggacgccgacgccaagcgccaagcagcccagcaccgggatcgccttcatcaggatcgtcaggttctgggaagagaggtagcgaaactcgtccggattgatcagcgcatagatgatgcagatgacctgcaaggcaagaaaagcgaccaggatggcgccggcgggcgcgacgagcaggcgtctgaacggcgactgcgtccgcacgcggcgcggggcgacggcggaagccgccggagcggagctgggtgatggtgaggacatctgggatccggcgcaagggaccctccggcatatccggagggtccggttgagaagggctagcggtaggtgccgatcagcggcttgacggcgccgatgcgatccttgtcgaggaacgcgccctggccggtgtcgatatcggtgggggtcaggccatacttcttggccagcgcgatctgggcgatcggatagaagccctggagatagggctgctggtccatcgtcgcgaacatggcgcccgattcaaccgcgttgacgatttccaccgcgaggtcgaagccgccgaagggaatgtcgacgccggcatccttgatagcgccggcaccgaccgtcgaggtgaccgatccggttccgaacagcgccttgacgttcttgttggcgatcaggaactgcgccatgatgttgcgcgcctcggcgagatcgaggccggacttcacggtctcgaccttgatgcccttttcgctcatcgccttttcgatgccgccgccgcgcgccaccgcgaagctggcctccggaatttcgcgcggattgaagacgacatcgccttccttcagcccgaacttctcgatcatgcgctggccgagttcgtagccggaggcgaattcgttcatgccgacataggcctgacggcagttgccttttgcgccttccagatcgtcattgttgaagccgatgacgatgatgccggccttggtggcgttgcagatgctgttgtcgaaggcgtcggagctggagatcgccaccgcgatgccatcgacgccggccgccgtcgcagcttcgatcaggtcgttctggcggaccggatcgttgttggcatactgcacgtcgagatccacgccgaactgcgcggcggcgtcctgggcgcctttgacgaccggattgaagaactggacgcttgggtccaggtagatgatcatcgtcgccttgacgtcggcggccgaagcaattgaagtccaagccgtggcggtgcaggccgcaagcattgcggctgccagttttgtcgatttcatttgcgtgtcctccctttggatatgcaatcgggtcgaaagacccgtatctcggctggcgagctctgaccaaagatcgcgccagccgggatttcctccctctcaattcacgagaaaaccatcacccgaaccagggatccggccgtccgagcgtcacgtggatgcccttgaactgtgagtattcgtcaaaaccgtagcgccccagctcgcgcccgaggccgcttttcttgtagcccccgatcggcagttccggcgtgccgtcaatgacgctgttgatccagcagcgtccggcgcgaatacggcggatgctctgaagcgcggtttcgagactggtggaccagacgctggccgacaggccgaactccgaggcattggcgagcgcaacggcctcgtccgcggtcttgaacgtcatggtcgcaagcaccggaccgaagatttcgtcacgcgcgatcgacatgtcggaagtgacgccgccaaatatagttggcgcataatagagcccggctccgtcacccacacgcgtgccccccagcagcagttccgctccggaggcctggccagtttcgacgtaagaatgcaccttgcccgcatgggcttcggaaatcatggcgccgatcttcgtccgctcgctcagcggatcgccgaatgtgacttttcgggaaatatcgagcagccgttcgagcaacgcgtcgcggatggactcctgcacgatcagccggctgcctgaaatgcagcattggccggcattgtggtagacgccataggcaatgccatcggccgccgcgtcgaggtcggcgtcggcgaagacgatctgcggtcccttgccaccaagttcgaggccgacgcgcttgacgctgcgtgcggcgatctcgcccagcttgatgccgacgcgggtcgaaccggtgaaggcgatcatatcggtgccgggttcctcggccagaacctggccagccggatcgccatagccagtgacgacattgaacacgccgtcggggatgcctgcctcgcgcgccagttcggccatgcggatcgacgtgccggatgtgaattcggatggcttcagcacgacggtgcaaccgccgccgatcgcccagggaacccgttccgacgcgatgatgaaggggaaattccaaggcgttatgatgccgacgacgccgatcggctcccgcagcaccagcccgaggcgattatcgccgatattgttgtgggtctgaccctccagcgctcgggcctggcccgcggcataggaccagaggtcggcgcagaaggtgatctcgccgcgcgcctgggcgatcggcttgccaacttcgaggctctcaatcagcgcgatctcctcgacatgcgcgaggatcagctcggccgtcctgaacatgaggcgggaccgttcggcgccggacatgcgtggccatggcccggtgtcgaacgcgcggcgtgcagccgcgaccgcggtacgcacatcgtcggccgaagcatctggccaggtgccgactacaacgccagcatgacccggacttacccggtcgatcgtcttgcccgacgcggcgtcgacggaccggccgtcgatcagcatcctgtatcgggatttactctgcaggcgcggatcactagaatccggcactatgaagttaggatatactgtcatcaatcaaccgggcgatgtgtcccggcccctccatgctaacccagcttgtcgagcgccgggtttgtgttggccttgaattgtatggtactgtatggtggttctgaactggtgtcaacgttgagctggcggcaacacgcatgaaccttgagatactgaaaatcgagaccggagaatcgaccgcggcgcaggtcgagcgggacttgcgcgaggcgatcattcgcctggattttgcgcccggctcgcgcctttccgagcaggacatcgccacccgcatgggcgtatcgcgccagccggtccgggaagcgttgatcgcactcggaaaatccaagctggtggatatccggcccaaccgcgggaccgtcgtggtcaagatttcagcgcgccagatgatggaggcgcgttttgtgcgcgaggtgatcgaaaccgcggtcgcccggcgcgccagcgaaaacttcgacgcctggaccaggcgcaagctcgacggcattctggcgcggcagcgaagcgccatggaggcgcacgaccacaactggttccgcaaggaggatgagcagtttcatatcgccatcgccgaaggcgccggttgtgcgctcgcctggaatgcgatttccgacatcaaggcgcatatggaccgggtctgcaacctgcagcttcgcaatccggcctcaatgggcaatctgatcggccagcacgaaaagatcgtgatggcgatcgacgggaaggacgcggacgccgccgccgatgcaatgcgggttcatctgaacggcatcctgaccgatctgccgcagatcgagtcggacaatcccggactttttgagtgacggcaaatcctccaaataggtatgtgctgctgtcgccatttcatcgctgccgcggaacaaggcggtcaactcaaggcccgacgcaggcaaagccgaggcacgaggcatcccgaatatgtaactcaatctgtttctgctatccctgacgagatacacgggtcttgatccatgccgaaccaactcgtcgatcgcatctacgaagccgcctttgtaccggacgaatggccgcaagtactggctgcaatcagcgatttgtcggcctccgcaagcggcgcgatttgcctgttcagcgatgagtctccggtaagaggcagcgcccaagagaacgttcgccatcttttcgaagagtttctggccggcgacacatggcggtcttccggcggaattcaacgcatgcgcgccctgcagccaacgagcttcgttgccgtagaggattttatgaccgccgacgaagttgaggaagacccagtgcggtcgaaactcagagcatttgggattggccagcatgtctgcgcggctgtgcccatgccaagcggggaactcgttacattcgtatttcagcgatggacgaaggacggcgcctatgatcgccgttctatccgtttgttagacagctttcgtccccatctagcgcgtgccgggctgatggcggcgcgcctgggcctgcggcaggcacaagcaactgcctcggctttgcaggctatcggactacctgctgccgtgctttccggcaatgggtgcgtgcgggcttcgaacgacctgtttgacagcatgacttcggtattcctgccgaagtcctttggcggcatggcaatcgctgacgtagccgccaacggactttttaggaaggctattcaagcgtcgagccaagccgctgagccggtggtgcgctccatccctgtcagacctaaggaggccggtccgctcgtgatacatataatgccgttgcgtcgcagcgcccacgatattttttcgggtgcggatattctcgtggcggccacggccgtcaatgcgagcaacatcgtcccgtctcccacgttgctgtccggcctgttcgatctcgcacctgctgaagccaagctggcagccgcacttgcgacaggtgtggcgctcaagcaggcagcagcggagcagaatatccggacgacgacggcacgccattacctcgagcagattttccgaaagaccggcacgcaccgccaaagcgaacttgttgcattgatcaagtcgaccctgccgctgcatcgcgccgattgaatccaggctggctcgggctgttgcccacatgtcacaggctgacctcgccgcgcggcacccctgttatatgacgggtattcaaggtttcggaaatcggaaaccctcctcgcgagttgggcagccagaaaatggccatgcggggaagtatgacgatttcaaagctgcggacgggcaaagtcgccgcggtccaaaattttctttgcattgtgtttgtgctgatagcctcggcatttgctgccggccaagcccaggcagaccccattagcgtttcgccggaagttttgccccccggcaaggtaggtgtcgcgtatgaccagacgtacgtcgtatcgggagggttgagcggcggcccgtatttctcaaccttttcgggagcctccgaccggataccgggcctgtgctgcttcgccaacaacgagttccgaatttccggcgtacctaaagccgccggcacatatgtcctgagatacttgttcggtgaaagggcttggctcgacgaggtcccgggcgcgtcgccccccgtcccgaagatatacacggtcgtcattgccgagcccgaccctgtcgagatcacgctcgctggtcttccagatggccaggctggccagccttacagcgcacaactgacggcgagcggcggcgatggagcgtacagtttctccatcgtgtctggagcaatcccgatcggcatgtcattcagtgccgccggtgcgataggcggcacgccaattcaaagcggcagctttaccgtcagattccgcgcgacggacagcggcggccgctctggcgaccggagctacactttcgagatcgcgccgccgccgccggtcgtcgtggcgccagcaatactgcccgatgggcaactcgggcagccttacaatcacacattgacagcatccggtggtgtgcgagggccttatcaattctccatcgtctccggcaacctgcccgttggcacgttcagcagcgcaggggtcatgtcgggcacggcgctcgtcgccggaatatataacttccgaatccgggccaccgacgatgtcggctatacgggcgagcgcgactacaaggtggtgatctccgatgggccgcccgtcacgattgcaccagcaacgcttccagacggaaaagttggccagttttacgatgaaacgatggtagcgtccggcggcgcgggcgggccctattccatcacgcttgtcggcatcccggtcatgccgcctggccttgcatatgctggcggcaggctctccggcacggcgaccgtggcaggcacctacagttttacggtccgggcggtggatcgcgccggaaatttcaccgagcgcgactattcgatcgtgatcgcggacaccccggttaccctctcgccaacggcgctgccagatggccaggtcggccagccttatgatcagacggtagtcgcttccggcggcgcgggcgggccatattccatcacgcttgtcggcatcccggtcacgcctcccggacttgcatatgctgacggcaggttctccggcacggcaacggtcgccggcacgtaccccttcacactgcgcgcgacggatcgcggtggaaatttcatcgaacgtcaatattcaatcgtgatttcttccacgccgcccgtgactttgagcccgaccacgataacggccggccagattggccaaatgtacagccagacatttacggccagcggcggcatcggcgccccgtaccgatattttgtagtcgtcggaaatttgccggacggcatcgacatggcgttggatggaacacttgcgggcactccgacgcagagcggcagttttccctttacggtcgatgtgttcgatgccgccgataatcgcggcagccgccaatacacgctcgtcatcgacgccctgcctccgcccaccgcaccctcgctcaccgcatcggttgttgccggtgaaaccgtcacgctgcctctgacgcagggggctactggcgggccattcagcgacgccgcgatcctatccagcacaccaacggaagcaggtacggccacattgtccggcgcaccggcctacgcactgacttttacgtcgtcatcggcgttttcgggcacggccatcgtgacctacacgctgacgggacccggcggcgtctctgccccggcgaccgtgacgataacggtcgccccaaggcctgatccgtccgacgaccccgaggttgcggggctactcaatgcgcaggcacaggccgcgcaacaattcgccgccgggcagatcgacaacatcaatcaacgcatgggcgctttgcgcggcgagacctgccgcgacacctttgcaaacgcggttcgtttgtccggcgcaggcgaggatggcaggccgggaagcgtcgtactgcctgataaaacggggtgcgacaacgcggccatgaccgggggcgtggggttctgggccggcggctatgtcgattttggctacaaatcgccggacgatgggacgacccgcgactccatctccgtcgatgtgacagcgggtttcgactatcgcttcaacaaccagttcgttgccgggttgggcatcggctatgccagcgacgaaagcgacatcggcgtcaatggcacgaagagttcaggcgaagcttacagcgtcacgctctatgccagctaccgtccaaccgagtggctgtttgtcgatgcattggccggatacggcgacttcagtttcgactcgcgccgcttcgttaccggcacaggcggtttcgcgaatggccagcgcgacggcgatcaggtgttcggctcgatcacaaccggatttgactattcgaccggcagcttgcaattgacgccattcgcccggcttgcagcctcctcgtcgacgctggatgcgttcaccgaaagcggggcgggtatctattcgctagcctatggcgagcagagcgtcgacagccttgacggtacgatcgggcttaccggcagttacgagataccggtggcgattggcctgctcgtgccacgcttccggtttgaatacacgcatgagttttcaggttcgagcgatgtggacatcctctacgccgacctgccgggcggtcccgcttatggtttccagacgacgccgtttgcacgggaccaggtgatgatcgggctcggcgcggatctgcggctgcacaaccagatgaccatcggcttcgactaccgtggcacgatcggcttcgaagacagtcacagccatgccctcggactgaagctaaacagcagattttgaggattaaccagaagctcggcaccaaggcagacacagccgttggccggttcccatgtcgcgccggcaggctggatcctgcgcgatgacttgcgcagtgcctatgacggtgatggcaaccggcatcaggcgcaagcacgagccaccgaggtcctcttacgccccgatccggggggcatattgagggccgattgacaaccgcatcctggcgagcaaagcagttgaccgttttgggaaaagcatcaagcacggattgcaaaccgtccgcaaaccaaagcgccgcagttggccgaaaaagatgccaagtcgtggaaacagtatggcgcgcccgaagagattcgaactcctgccccccagattcgtagtcttgtgtaagttgttgtaattaaagccgtatttttgcaaacacgccagcaatacgcatcaaatagatcaatacttagcgacgcggctgcaaaccggttagcacatcgaatagcctggcttttaataacccgaccgctcgccaaaagacgcttttatctagcctatgaaatctcatgcaccctggctgccggcacggcctggcgcgctatgtcgcacaggtgacgggggtgcataagatagctcacctgcccgacggacgccatctgccaaagcagtcggaacacctcttccgaccgcgacccgtcgaaggtttccatgatatcgtcggcagtcaacgggaccggcggacgcagcgccaggtagagctggaaccacgtcgagaacctcaacatcgacttcgctgtggcccgatcgagttcacatctagggctttgcagtcgtttcagctgagattggcgcttcctctgcgctagatctgtaacaaactcgtaagccgttcgcagagcctgccgtaagctacgtatgctattgaaacggcgcccagatcacatcgagaagcaaaaaggcggaccggagcccgcctttatctggtggcatgaagccttgttaacggagaggccacgccgcgatccttgctagaacgtcctaaagatagccaacgcctcgccatggtgcaagccctgtcttgtcatcctctgtcttgtcatctcgcggatgaagcggttattgggaatggggaaaaacaagaacaggggcacgggatgggcacgcgctattccttcgacatcggcacgaactccataggctgggccgtctggcgcacgggtcgcgaccccaagggcatcttcggcgagaaggatgcgccgctggaactgctcggcgccggcgtgcgcctgttcaaggacggccgcaacccgaaggacgggcagtcgctggcgacgatgcggcgcattccgcggcaggcgcgcaagcgccgcgaccgcttcgtgctgcggcgcgaggcgctggtcgcggcattgatcgaggccggcttgatgcctgccagcgagaaggagcgcaaggcgctggcagacctcgatccctatcagcttcgcgccgccgggctggacaaggcgctggcaccgcatgaactcggtcgcgcaattttccatctgcatcagcgccgcggcttcaagtcgaatcgcaagacagaccgcaaaagcgacgacagggacaagggcaagatcgcgacggcttccgccgcgcttgcaaaaaaattcgaggacgaaaacgcgcgcaccttcggcgaattcctgtggcggcgtcatcgcgaccccgacatgaaacggcaggccgttttgaaagcgcacgacccggccaaagggaagccggatctgcgcgccgcaaagctacgccagccgacccgcatccgcctcgaaggccagggcgcgaccgcgctctacgaattctatccgacacgcgaaatgctgtgccatgagttcgacgcgctctgggaagcccaggcccgccatcatccaatgctgcttacgcgggaagcaggcgacaagatcagatcgatcctgtttcggcagcgcgaactgaagccgccgttaatcggcctttgcactttcgaatacgcggctggcgaaaaggaaagccgactgcccaaggcgctgccttccgtgcaggcgcgcgagatctacgaacggctgggccatatccgcctttccaccggctccggcacggaccgcccgctaaaatcctccgaacgcgacgatttggcgacagcgctgctgcattgcggcctgacgaagatcaaggtcagcaagaccaaagggttggcctttaagactgaattccgcaaggcgctgcgtctcggcggtgaggtcaggatcaatttcgaggaaatgggcgaggaagggttggtcgacttgcgcaccaaccgcctgctcgtccaagacgaccattacggtccgcgctggcgcgcattgtcgtggtcgggcaaggacgccttcgtaaaaaaactgctcgaagcgaccgacgacgacaaactggtcgcccggttaatgaccgaggacggcctgagcgcagtgcaggcgcgcaacgccgcctcgatcccgctgcccgacggctattcgcggctggggccaaccgccaacgccgcgatcctccaggcactgatcgactcgcgcgacgaaaacggcttcgtcgtcacctacgacaaggcggttcgccgcgccggcgagaggctgggcaaggactggcaccattccgatgagcgcgacggcgaaattctcgatgccctgccctattacggcaaggtgctgcagcgccacatcctgcccggcatgatggacccggccgaccgcaaggacgaggcgaaattctacggccgcatcatgaacccgtcggtgcatatcggtctcaaccagttgcgccgactcgtgaacgcgctgatcgaacgcttcggcccgcccgaccagatcgtcgtcgaactggcgcgcgacctgaagatgtcggcgcgcgagaaggagcaggaacagcgccgcaaccgcgacaaccgcgaggcgaacgaaaagcgtactaagaaactggtggaactggggcaggacaacaacggcgagaatcgggcacggctgaaactctacgatgaacagcaacgcgccggcaacggcgtggcgcattgcccgttcacgctcgatccgatcggcatcacgcagcttttcagcccggaaatcgagatcgagcacgtcctgccgcgctcgcgcacgctggacgacagcgccgccaacaaggttctgtgcttccgcaccatcaaccgcatcaagcgcggcaagacgccttgggaagcctttcacgccgatccgaaatggccggacattgccgccaatgccgaaaagctgccgcccaacaagcgctggcgcttccgcgaggacgcgatggacgtcttcgaggcgcgcacctcaggcaagatggacaagaccacgctggagcagatgggcctcaccaccggtttccaggcccgtcacctcaacgagaccaagcacatgtcgcggctggccaaggcctatctcggcaagatctgcgaccccgacgcggtctacgtcacgcccggcgcgctgaccagcttgctgcgcggcaagtgggggctgaattcgatcctctccgacgacaacctcaaagaccgcaccgaccaccggcaccacgcgatagacgccatcaccatcggcgccatgacgcgcagcctgctgctcgagttgaacacgttggccggcaaggccgagcaaagcgactatgacgacgtggtcggcaaggtgccctggcctttcgacaatttccgtgacgccgtgcggtcggtggtggaccgcgtcgtcgtctctaacaagcccgagcacggcaagcagggcgcgctgcatgaagacaccgcctacggcatcgtcggcgacgaggccgaggcggaagagatcggcaatctcgtgcgccgcaagctgctggtagacctgacgcccggcgaggtcgaccgtattcgcgacgcaggacttcgcaaggcgatgcaggccgcggtggcgccgtctcgcgacgccaggggcaaggtttccgacgccaagggctttgccgcagcgctcgataccttcgccaaggcgcaagggatgcgtcgcatccgcgtcggcaaggaggacatgagcgcggtgacgatccacgaccggcaaacagacaaggcctataaggccgtcgcacccggcgaaaaccaccatgtcgatgtcgtgcaaatgcgcgacggcgcatggaaaggctttgccgtcaccgtttttgaagccaaccagaaggacttccggccgcagtgggagcgcgagaaactgggcggcaagctggtgatgcgtctgcacaaaggtgacgcggtggagttggaaagttcaggcgtgcgcctcgtcaaatttgtgcagcaaatctggatgaaatccaacctcgtactgcttaccgagcacaatgagggcggcgacttgcaaaagcgccaccaggacgccgacgatcccttccgctgggacttcgccaacatcggcaaactcaaggagcgcggctgcgtggcggtcaaggtggatgaattgggaagggtgaccaagcgcatttcaaacacataaaacatttctggatcactaaatattctcacttggtctgatccgattattgctttctctacatcccataagcgcacttcctgcgtgacgtagctcaacaggaagagcgccctgcattctgagacaggcggttatgggttcgactcccgtcgtcacgaatgaaaaagcattgtcgaccctaaattggtttatagctcacttaattggggtagccacgttagccgctctcacgatctcgaagttggccgagtgaatgtagagagttgcggttgggtcatgccgctatccttctagaacaacccgccgggtccgcccggcgggttttttctcacttggcactttccttgccggttacctctccaaggggcaatgccggcagcaaaactgtgccggcgtggcgctcctccacggagaactgtgccatgctgggacggatcgtcgaaatcgaaggtgaaggcagaagactttcgctcgaccgcggtttcctgactgtcgccgggccggacggacctttggggaaagtaccgctcgacgacatcgaggccgtgatcctttccaatccggccgccagtttcaccagccagatcatcgctgcccttgccttgcgcggtgcgcctctggtggtgtgcggcaccgatttccgccccgccgcctggctgctgccggtggacggccatcacgcgcagggcgaccgcatggaggcgcaggccgagtccaccctgccgacgcgtaagcgcctgtgggccgaactggtgcgcgccaagatcctcgcccaggcggcagcgctggagcgaaccggcgcgaatccggttccgatccgtgcgcttgccgagcgcgtccgttcgggcgatcccgacaatctcgaggcgcaggccgcccagcgctattttccggcaatgttcggcaagggattctaccgccatcgcgacggcgacggccccaacgccatgctgaactacggctatacggtgctgcgcgccgcgaccgcgcgcgccatcgtcgccgccgggctgcatccttctttgtcgttgcagcaccgcagcaagggcgacgcgctgcgcctggccgacgacgtcatggagccgttccgtcctgccgtcgatctcgtggtccacgccctgaccctggaaggcgtcgaccggctcgatacggcggcgaagcgccggctggccgaggtgctgcacgccgatttcgtcactgcggaaggctccgcaccgctttcaaatgtcctctttcggcttgcggtgtcgctggcgcaggtcttcacaggcgggcgcaaaaaactcatctttcccgcctctccaattccgtcgcttgcagccgatgccttgccgtgaaccaggtctcgctgctgtcggggtatcgcatcttgtggatcatggcgcttttcgatcttccggtattgaccaaggccgagcgcaagcgggcgaacaagttccggctgttcctgctcgacgagggattctcgatgatgcagctctcctgttacatccgtttcacggcaggcaaggagcaggccgaggcgctcacccggcgtatcggtcgcgccgtgccggatccaggcactgtcgaggtgatctggtttacggacaaacaatatgaaggcatccagagctttcgcggccgcgcttcgccgacccggccgggtaagcctgaccaactgaccctattttgacactgattcgccgggaaaatggcgtgactaagcggccaaacctcacttttactgacactttttcatacctaaacgcacaaaaaacccccggaaaacaagaggttttccgggggcagttctagcagggatcgcggcgcggcccaatcgcaactcgatacgagggcgacacttacggtatctcgttctagcagggatcgcggcgcggcccaatcgcaacgatcatggtgcgggatcgtctgtcgttctggttctagcagggatcgcggcgcggcccaatcgcaacgaaatctgccaacgacataccgaaatgatagttctagcagggatcgcggcgcggcccaatcgcaacttgtgaccgtcgaaggaaacaggattgcgagttctagcagggatcgcggcgcggcccaatcgcaactccgctgggtcgtccgccccgaacacgaaagttctagcagggatcgcggcgcggcccaatcgcaactggcttgggccactgtaagcggcgtcatgggttctagcagggatcgcggcgcggcccaatcgcaacctcatgacgtcgaatgcctatgcctatatcnnnnnnnnnnnnnnnnnnnnnnnnnnnnnnnnnnnnnnnnnnnnnnnnnnnnnnnnnnntcctttaagaggtggcttaacaacttgttctagcagggatcgcggcgcggcccaatcgcaaccgaatccattgtcgatcatccactgttgcnnnnnnnnnnnnnnnnnnnnnnnnnnnnnactactcgctggaccatgttcgcttccgttctagcagggatcgcggcgcggcccaatcgcaactcaacgggtaagttggaaaaaagtggaaaagttctagcagggatcgcggcgcggcccaatcgcaaccagtacacctgctataatatgccggtgacggttctagcagggatcgcggcgcggcccaatcgcaaccatgcctccgaaacagggccgtggcaaagagttctagcagggatcgcggcgcggcccaatcgcaaccatgcgaagtcgacagcgtcgaccagcgcggttctagcagggatcgcggcgcggcccaatcgcaaccagtcggcttcatgctgcgcggcgagcttnactactcgctggaccatgttcgcttccgttctagcagggatcgcggcgcggcccaatcgcaacgatcccgccgcgcagcaattgcttggatgagttctagcagggatcgcggcgcggcccaatcgcaaccggcccgctgatctgggtcgcgaatgacgggttctagcagggatcgcggcgcggcccaatcgcaacgggtagccgcaatgatctgccaagcaggccgttctagcagggatcgcggcgcggcccaatcgcaactaaaatcgacttcatatatcccgctattgagttctagcagggatcgcggcgcggcccaatcgcaacttgaggatgttgcggaggatagcctgctctgttctagcagggatcgcggcgcggcccaatcgcaacttttgctgtgttgcaacacggggacgcaaagttctagcagggatcgcggcgcggcccaatcgcaacaactatgacggcgcaacgaagccggttctggttctagcagggatcgcggcgcggcccaatcgcaacgtgatcaacaaggcggcgcgcaccggccgcgttctagcagggatcgcggcgcggcccaatcgcaacccctatggccgatgagaaaaaggagctggaggttctagcagggatcgcggcgcggcccaatcgcaacacgtgctgttttgtataggtgcaaccatgggttctagcagggatcgcggcgcggcccaatcgcaacctgctggatgttcttgacccagcggaggttgttctagcagggatcgcggcgcggcccaatcgcaacgatagtcatccgcagaaggatacgattttggttctagcagggatcgcggcgcggcccaatcgcaacttggctggagagagggatgcgagggccaccgttctagcagggatcgcggcgcggcccaaccgtaaggcgcgcggcgaccggcttgtctccaatatgccctaccgccattggaagcccctcaggttggcgctcgaacagttcggtggcgacattacaaacgtgccgtcgatggatatttggaactcgggcaccgaaagcgagagggacttccgcgcccaaaaaggtagtgagtgcaaactatttgggacgtcctcaaccagatcacctgcctaattaagcttaccttaccgcatcgaaatccagcccgaaccgcaaaaggtatttgcgtaggcggtcggcatcgttgccgctggccttttgaaggcgggagacagcgaagagcttgcgacccgcggcactgacagtggtgctttcgcgacagacgtcgatcacagtcgccagttgagcacgatcgaagaggtcgatctcttcgacgcggtccacgccaaggatagcccgcagtaaactatccgtggaaacgtcctctccggccgacgcccagagcaaccggaggcgctcgatctcgtctcgcacggtttcctcgttgatgcggccctgcggcgccagtgtcgccatgcgcgtcaccgatgcggacaggtcacggaagtttgcgcgccaggtcgcatccgacgccatcgcgaaagcgagataacgatcgcgcgcttccttgttgaaagtcacgttctgcccttcccgctcggagaagcgcttgagctcgaattccaggttcggctcgatatcttcgcggcggtccttcaaggccggcagtctgaaggtccagaggttcaatcgcgcgaacaggtcttctcgaaaacggccttcggcaacagcgatcgagagatcggtgttcgttccagccagcaactggaagtccgatgcgacatcctgatcagacccaaccggcaggaagcgcttctcctcgattgccctcaggcacatcgcctgctcgtcagatccaagctcgccgatctcgtcgaggaacaagacgcccttgtcggccgatttcatcagcccgccgcgggcggtctgcgcgccggtgaaggcgcctttgacatggccaaacagcgtcgacatcgcctggtcgccgcgcagcgtcgcgcagttcacctcgacgaaggcgccggtgacctggtgctgggccttcttcaattcgaagatgcgcttggcaagctgcgacttgcccgctcctgtcggaccggtcaacaataccggcgcacgagagcggatggtgaccttctcgatctggtcgatcatggcgttgaacgacgcgttgcgcgtggcaatgcccgatttcaggaaggatttggcttcctcgcgctcggcggcaaagcgcgttgcgattgcgtcgtagcgcgacaggtccagatcgatgatcgaatggctgccggcgaaattgccaccctcaccgcgatccttcggcggagacaactgcaacagccgtgcggggatgaaatgcgcttcggtgagcagaaaccagcagatttgcgcgacatgcgtgccggtggtgatgttgacgagataatcctcgcggtcgctatcgaagacgtagccgcgcgcgaattcgtgcagcttggtgtagacctcgctgaaatcccacggatccttgaagtcgatcacatgcgggcgcacctcggttgcgggtgaaacctcggcaatctcggtgatcacctgcgtggccaggcccgccgccgagccggagccgtggatcaggtccagccgatcgatgaaaagaccaggctgctgacatagcgcaaccgtgggccgccagcgctgccgtccacctcgccccatgtcgagagtggttccgagaaatccgatggcgacacggcgacgcatagattatccaaaaatctaaaacattatcctttcatatcatagattcttcgcaatctcaaccaggcaatttttcgccaacttcgctccggaattttttatagcaataaaaacattggtttacagcttttcttcccgaagtttgtctgatgccgggccaagttggcacgcaacttggaatgtagagggcgtcaacagaaggatgagagagatggcaaacaaatccgtgtttgcgacgataaagggaaagctgctcccgcgcgctgacgccatgaaccatgaaggcgcacaggcctaccgcctgacgccgcaccaggctctggcgcagttggcgtcgacgggaacgttcaacgcgaccttctatgccgaggcgcgggagcagatggatgaggtcctgaagcttgcctggcaggttgagccggaattcctggccaagactgccgtgcatgcctatgagaccggctacatgaaagacatgccggctgtgctgctgtcggcgctgtccatgatgcagggcgatgcgttcgagcgcgctttcgtccggatcgtgaaaaacggcaagatgctgcgcaacttcgtgcaggtcatgcggtccggggcggttgggcgaaagtcgctcggaacgcggccgaagcggcttgtgctcaaatggctcgagcgtgcctcggatctcgagatcatgcgggcggcggtcggtaacgacccgtcgctggccgatgtcgtgaagatggtgcacccgaagccggcttcggcttcccgtgcggcgctttacggctatctcatcggcaagccgcacaatgttctggccctgccggatctcgtgaaggccttcgaggccttcaagcgcgatccgtcactgccggtgcccgaggtgcctttccagatgttgaccacgatgccgctgacgaaaccgcattgggtgcagatcgccgagacagccggatggcagatgctgcggcagaacctgaacaccttcgcgcgcaatggcgtgttcgaggtggaggggtttgccgagaagctggccgcacggctaagcgatccgacggaggtgaagcgcgcccgcgtcttcccctaccagctgatggtgaccttcacgagccttgtggaggaagtgccaggcgtcgttcggaacgcgttgcaggatgcgatggaaatcgcgctgagcaacgtgccaatggtggacggctgcgtggtggttgcgcccgacgtgtcgggctcgatgggttcatccgtgaccggacgccggaaaggcgcgacttcggccgtgcgctgcatcgatgtggctgccctggtggctgccgccctgctgcgacgtaatccgacggcgaggataatgccgttcgagaatgatgtggtggatatccatctcaacgcgcgcgacacggtgatgaccaatgcgcagaaacttgccgcgatcggtggcggcggaaccaactgctcggctccgctcgcccgcctcgtcaaggagcgcgccaaggtcgatctcgtcgtgttcgtgtcggacaaccagtcctgggtcgatggaacgtcgcatccgcatcagggcaccgcgacgatgcaggaatggcgcaagctcaagggattgaaccccggggcgaagctggtctgcatcgacatccagccctacgacacggctcaggccaagccggaggccgacgtgctcaatgtcggcgggttctccgatcgcgtcttcgacgtggtggtaaccatgctctcctcgaagggcgacccggaccattgggtccgcaccatcgaggcggtcgatttgtaagaagtgtcccggcgggtgcgcctgccgggaccgcagggaagaaattcaaacaggcatgacgaatgccgatggaactacaggctgtaaccctccgtgtcgcgggttcgaatcccgccgggaccgccatatggtcccgtagctcagtggatagagcaggtgccgatccgaaagatcggcgatgtttcatcattcttgtcgtcatgggttggattggagaaaatggaggaaagatttggacgtgacggatgccggtgaaactacagcttaaggtgctccatacgcaggttcgattcctgccgtgctcttaccgagcatgtggccgagtggtcaggcaggaaacgtttcaccattactagccgtcacgacctgattatttccaaggtaaatgccggcaaagatcaaggctaatgcagtaagcgtcttgtcaatttttgccaccggttcacggagcgaatgcaggtgggactacatggatagagcgtccgtctcttcggaaacgggaggtcgagtgttcgaggcactccgtctgcatgagcaggcagtagctcagaaatgtctcaccgccacttgtcgcttcacacacaggcaggacgaatgactgcgaaactacatggggtattggcggttcgagtccgcccggcgattttcgccgaactgtttcgcaaagtgttgtcgtccgcctccggctagatgacggatgcaggtgggactacaggcagacgcagcccgcatatgctggtgccgaaaggcgtgaaggttcatgtccttccttcgcggttgtccgtgaagtggcggaaacaaagtcttgccaactctagccgtcattcggctatcaacattgattgaagtggaagaaagtcatggttgaagttttgagcggacaggatctgatcgacgccggactggcgcaaggccgctggttcggcaaggcgctcgccgaggcgaatgccgtgctggagcgtggcggcacgatggatcaggcgctgcaggtggcgcagggcttcgctcccccgccaacgatcgcacttcatgatgccggttctgtgcccttttacatgaacatccgggctgacaatgccgaagaagcggccaatgtcgaggcggtgacgaagagcatggtcgagctgatgcgcacgcccgtcatccgtgctggcgccatcatgccggacgcctgtccggccgggccttccggcacgattccggtaggcggtgtcgcggtctccgaagccatccaccccggtatgcactcagccgatatctgctgctcgatggcgatctcgacctttccgggggtagcgccagcggcactgctcgacgctgcccaagccgtaacgcatttcggacccggtgggcgtccacgtggacagcagttccggccctcgcaggcaattgcggatcgtttcgaccgcaatcctctcctgaaggatattatgagcgctgcgatcgaacatcttggtacacagggcgatggcaatcatttcgcctatgtcggcacgttgaagtcgactggcgaaaccgcgttggtaacgcatcatggatcgcgatcgcccggcgccaggctctacagcaagggaatgaagatcgccgagggttaccgcaagcagctctctcccgaaaccttgccgcagaatgcctggattcccgccgatagccgggaaggcgatgactattgggatgcgctgcagaccatccgcgcgtggacgaaggccaaccatgagctcatccatgacttggccgcacaacgtgtgtcggccaaggtcgcggaccgtttctggaacgaacacaacttcgtcttcaggcgttctgacggcttgttctaccacggcaagggcgcgacgccggccttcgacaactgggccgacgatgccacggatctgaccctgattccgctcaacatggcagagccggtgctaatcgcccgcggcaagaacgctccgaatggcctgggcttctcgccgcatggcgccgggcgcaatttctcgcgcacgcaacatcgaaggctgaaggcagggcggacaaacgaggagattttcgccgaggagaccaagggcatcgacgcgcgcttcttctgcgggatcaccgacatctctgaactgccgagcgcctacaagaacgcatccgccgtgcggcagcagatcgagcactacgatctcgccgagatcgtagatgaagttctgccctacggttgcatcatggccggcgactgggaagtgaacgcgccctggcgcaagaagaagcagcgccaggaaacgccgaacgcggcctgacgaacattttcctgcgggatgcggatcgtcccgcagggccttttgggtattccgcgtgctgaccgggatctcgcggcgcgccgttggatgccggtcggccgggcgatgaaggccgagatgacagctcagttcgtcaccgacgccctcatcatggcgatctggcgcatgctcacgaaagtcgaggcaaagttcggcacgctgcccatcccggcgcttgatgatccgcgagtgcggcaggatttcatgtcatggcgtgccgaggtcgcgaggtcttccggagatcgcgaggccgacaatcgcctcagcgatatctcggccatgctttcctgggcgagagacagtggtcgcatgacagccagccacgttgccggcttccgtcgttttcacaagtccgatcgctcagagaagatctggcttccgcaggacatcgagcgccctggtggagctgc

SEQ ID NO: 3252 - DNA, 23186 bp, synthetic construct
  misc_feature 1..23186: note = Synthetic
  source 1..23186: mol_type = other DNA
cccaattgcgattgcgcgagaggcgcatcacctgccaggcgctgccgtcgaccggcagcgccaccgcgccggcgaggcagccgcgcgcataggcgccgatcgaccgggcctcgagcggcgcgggcgtggtggcggcgccgaacaggaccttggcggcatcggcgggaagggcggcgcgggccttctccatctcgctccgcccctcggcgcccgaggtctgggcggcggcgggggcgagcgaggcgaggagcacggcggcggcgagcggcagggtcgatcgcatggcgggcctcgaggcgggaggaacgtcgtgagatcctacaggcggggtctttacgaatcgtcgaccatgttcacacggcggcgatcgcgcgatagacgagccgcgccgcgaccagatcctcgagcgcggtgccgaccgacttgaagagggtgatctcctcggcgctcgcgcggccggcgacggtgccccggcagagttcggcgagttcgccggcgaccgccgcctcggtgaggacgccggaggcgagcggctgcgtgaggtcgccggcctccttcagggcgccggcgcgggtgtcgacatggacgcgggcgcgggcgatcgtggcgtcgtcggcctcgcgcatggtcggggtgtagccgccgaccagatcgacgtgcgtgccgggggcgagccatgcgccacggatcagcggctcggtcgacatggtggcggcggagaccacgtcggcgtcacggaccgccgcctcgagatcggaggtggcgcgcacgcggaagggccggccggcgaagcgggcggccagggcctcggccttggcgagcgagcggttccagatcgtcaccacctcgatggggcgaatcgccgcgtgggcctcgatcagatgttcgctcaacgaaccggcgccgaccatggtgaggcgtcgggcgtcggggcgggcgaggtagtcggcggcgagggccgaggcggcggcggtgcgccacagggtcaggcgggtgccgtcgagcaccgccagcggcgcgccggtgacgccggacatcagcacataggcgccgatcaccgaggcgacgccccgggcggcgttgccgggaaccaccgagacgatcttgacgcccatcaccgcgtcctcggtcacggccgaggcggtgtcgctccaggccggcatcaggaggagcatggcgtcgtcctcgccggcgcggcgcatcggatggtgatggcggacgggggtgacgaaggcctcgcggaagccggaccgcagggcttcgaccatggaggcgcgcgtcgcgacgcgatcgatcgcgtcggcatcgatgccgatcatcgggtcttctccgctcggacggcgcgcctcaggcggcgcggccggtgtcgggggtggggagggcggcgcggggcgcgccggcaccgggcagggtgacgaggccggagacgacgccgtcgcgggcggcgacctcggcggcgaggcgcgagcgctcggcctcgagcttggcggcctcgcggcggccggcacgggcggccttgcgataggcgccctggcgccaccacacggtgacgccgccgaggacgacgccgaggatgagggcgccgagcggcaggaggaacagcggcagggcgatcgacagcgccggatcgtcgggccggaacggatcgagcgacagggtgacgaggcgacggttggccaccgcgagggcgacgacgacgatgccgatcggcagcgccagaagccaggtcagaaaacgcttcatcggttctcgtcccgctgggtgtgatgcgacgcgcgcgaggctcagtcgccgagatcgacgccgtcgttgaggcgttcgcgcatttccttgccggtcttgaagaacggcacgtatttctcggtcaccgccaccttttcgccggtgcgggggttgcggccggtgcgggcgggccgattcttgaccgaaaaggccccgaagccacgcaattcgacccgatcaccgcgcgtcagggcgccggtgatctcgtccagcaccgcattgacgatgtgctcgacgtcgcgctggtagaggtgcggattgcgctcggccaaccggctcaccagctcggacttgatcatcgaccgatcccctcggaattactcggattttcgtcacgcccaaggtgccaaacggactgcagtccgtcaagcgagcgaagggtcgcgatcgagccttcgacgccgagggcggaggcgacgccacgggtcgcggcggcggcgaggctctcggcgagcggccagccgacgccctcggccttcggtttccagtcgacgatcggcaggccgctcgccacacccttggcgtgcaaccattcgacggcgacactctcttcgccgatttcgtcgacgagtttcaggtcgagcgcctgatgtccggtgacgacgcggccgtcggcgagttcgagcgcgcgctcgcgggtgaggccgcggcgctcggcgacgaggccgacgaaccagtcgtaggtgtcgcggatggcgcgatcgagcatggcgcgcgcctccggcgaggtcggcttgaagggggtcggctccgccttcatcggggaggacttcacctcctcgaacttcacgccgacggtcttcatcagttcggagacgtcgccccattgcacgaggacgccgatcgagccggtcagggccgagcgccgggcgacgatgtggtcggtgccgagggcggccatgtagccggcggaggcggcgagggagccgacgtgggtgacggtcggcttcttctgggcgagacggcgcagcgcctgatagagcgcctcgccggcggtggtggcgccgccggggctgtcgatgtcgacgacgacgcccttgaccgcgtcggacttggccaactggtcgatggtggcgatgagcgcgcggtcgggcagcatcaggcccttgaccgcgatgcgcgccacatggggccgggtcttggaggtgccgccgccgacgaggtcgaagcgcaccgcgagcgcggcgcaggcgacgaccgcgaggagaatggcgaagatgcgccagcgaccgagcctgcgctcgaggcgacgccgatcggcgatcgcgtccgggtcgagcatcatcgaatgggtctccgccggtgggtccgaggtccgaggggtatcagtccgggcgatggccttcaaccccgtcgacggcgcgcggtcttccgtcgcatgccgggagtgaaacgaaaaagacccgcgccggttccccggcgcgggtcttctcgatcacggaggcgaccggcgcggagcgcgccggccggccgatcacttgtcttcggtgcgggcgcgcagcgccgcgccgaggatgtcgccgagcgaggcgcccgagtcggacgagccgaactgagcgatcgcttccttctcctcggccatttccagcgccttgatcgacacggagaccttgcgggtcttgcggtcgaactggatgacgcgggcgtcgaggcgctcgccgacggcgaagcggtcgggacgctgatcaccacgctcgcgagccagctcggagcgcttgatgaaggtggtgaactcgctgtcgacgatcttcacgtcgatgcccgaatccttcacctcggtgacttcgcaggtcacgatcgcgccgcgacggatgtcgccggccttctcgaaggggtcgccggcgagctgcttcacgccgagcgagatgcgctccttgtcgacgtcgacgtcgaggaccacggccttgatcttgtcgccgcgacggaactcctcgatgacctgctcgcccggacggttccagtcgaggtcggagaggtggaccatgccgtcgacgtcgccgtcgagacccacgaacagaccgaactcggtcttgttcttgacctcgccctcgaccacggtgcccgccggatacttctcgacgaaggtctcccaggggttggccagggtctgcttgaggccgagcgagatgcggcgcttgaccggatcgacctcaagcaccatcacttcgacttcctgcgaggtcgaaacgatcttgcccggatggacgttcttcttggtccagctcatctcggagacgtggatcaggccttcgatgcccggctccagctcgacgaaggcgccgtagtcggtgatgttggtcacgcgacccgcgaacttcgcgttcaccggatacttggcgacgatgccctcccacggatccgcctcgagctgcttcatgccgagcgagatgcggtgggtctccgggttgacgcggatgatctggaccttgacggtctgaccgatcgacagcacctcggagggatggttgatgcggcgccacgcgatgtcggtgacgtgcagcaggccgtcgatgccgccgaggtcgacgaacgcaccgtagtcggtgatgttcttgaccacgccgtcgacgatctggccttcctgcaggctctggacgagctcggaacgctgctccgcccgggtctcctcgaggacggtgcggcgcgacacgacgatgttgccgcggcgcttgtccatcttgaggatctggaacggctgcggcacgtgcatcagcgggccgacgtcgcggaccggacggatgtcgacctgggagcgcggcaggaacgccacggcgccgtcgaggtcgaccgtgaagccacccttgacctgattgaagatgaggccggtgaccttctcgttcttggcgaaggcctcctcgagacgggtccagctctcctcgcggcgcgccttctcacgggagatgacggcttcgccgagcgcgttctcgacacgatcgagatagacctcgacctcgtcgccgaccttgaggccgccgtcgcggccctgggcgccgaattccttgagcgcgacgcgaccttcgaccttgaggccgacgtcgatcaccgcgagatccttctcgatcgcgacgatcttgcccttgacgacggaaccttcgtagaggttcgactgctcgaaggactcttcgaggagggccgcgaactcgtcgcgggtggggttcatctgagacattcaaactcctggtgccgaaaacggctgcgccggcgggggctggtgttcggggacggtctcgatcgcgtccggtttctcgttggtcgagaaacagccccgaggtctcccccgaggtgccggcgccggcgaacatcgatcgaaatcgcttctgtcgtccgaaccgctcttcccatcccccgcgggtgcgggtcggcgtgtcggacgccggggaaaggaaggggcaccccgcgcgaggcgaggcagccgtccgaaccggcgttccatagccgatgaggccggcgcgggcaagcgaaagcgggagggaaccgacgatttcaggccctcgccgccgcgcgcggaggtcagccgcgccgcgcctcgacgatggcgagggcgcgggcgaaggcggcgtcgcggtcgagatcggaggtgtcgaggaggatcgcgtcggcggccggcttcagcggggcgacggcgcggccgctgtcgcgctcgtcgcgttcgcgggtttcggcgaggatcgtctcgtagacgacgtcgcggcccttggcgagcaactcgtcggtgcggcggcgggcgcgcacctcgggcgaggcggtgacgaagatcttcacgtcggcgtcggggcagatcaccgtgccgatgtcgcggccgtcgagcacggcgccgggggcgcgggaggcgaaggcgcgctggaagtcgaccagggcggcgcggacggcggggtggaccgcgacgcggctcgccaattcgccggcctcgcggccgcgcagatcgccgcgcttcagatcctcggggtcgagcgcctcggcgaattggccggcgagcacgggatcgtcgagatcgaagccgcgctcgtccatcagcttgccgatggcgcgatagaggaggccggtgtcgagataggggaggtggagcgctccggcgagccgttcggcgagcgtgcccttgcccgccgccgccgggccgtcgatcgccacgacgaaggggcgggcgctaggggcgtcggtcatggcgggttcgtctctcggaaggtctcggggccgggggtggagatcgcgatcagaaatcgaggtcggcgtaggtggcggccggcgggatcgccaggatgcgatcggcgaggagggtgcggaacgagggccgcgacttgaccagtccgtaccaggccttggtggtgtcgtcctcggcccagggcacctcgccgagatagtcgacgcaggagagcgcggcggcggcggcgagatcggcgaaggtgaggcggccaccggcgagccagtcgcgggtcatggtcagccagccgatgtatttgagatggtggcggatgttggcgcgggcggcgcgcagcaccgccgaatcgggctcgccgccgccctgggcgcgggggatctccagtttgaagatcttctcgtggaccagatagccgacgacctcgccgtcgaacttgccgaggaaccagtcgacgaggcggcgcacctcggcgcgggtctcggcgtgctggggcatcaggcggcggtcgcccatggcgtaaccgcgcgtctcgtcgagatattccatgatgaccgaggcgccgcagatcggcgggccgtcgttctcgaccagcaccggcagggagccggccgggttcatcaggaggaagtcgcggcgccgctcccagggcttttccaccacgaggtccggcacgatgccgtattcggcgcaggccaggcgcacgaagcggctcgaggtggagaagggatggtggaagagcgtgagcatcgcgatccgtatcaggcgccggggacggattccggcgagaatccttcctataggctcacgcgggagacccgacaagccgcgccggagagacgcggtggaaacccggccgcgtcaccccgcgatccccgcgcctcacgccgggcggcgatcgaactggccggtcgggcggaagcgccagagatagccctcgagcaccgcctcgatcgcggtcggctcgatgccgaggccggcgaaggtgcggccctcggcgacggcggcctcggagacgacgttgtcggtcttcagcagttcgacctgatcctcggtgaggagcgggtcgggcaggagctgcagcaccttggccttcagcttggcgaggccgaagggcaccggcaccatcaggcgcttgcggtgggcggtggcgcagaccagctcgaggcattcgcggaaggtcttcacctcggggccgccgagctcgtaggtcgtgccggccttggcgccgccctcgacggcgatggccacggcctcggcgacgtcgcggacataggccggctggaagcgggtcttgccgccgccgatgagcggcaggatcggcgacagcgaggccatcaggccgagcttgttgaagaagtcgtcgtcgggtccgaacaggaccgagggccgcagcaccaccgaatcgggcaggacgtggagcaccgcgccttcgccctgggccttggtgcgggcatattcggaggtggaggcctcgtcggcgccgatggcggagacgtggaccatcgaggtcaggccggcggacttggcggcctcggcgatcatgtgggcgccgtcggcctggacgtcggcgaaggactgcttgcccgagggggcgaggatgccgaccagattgatcgcggcgtcggcgccctcgagggcgcggtcgatcgaccagcgatggtcgcggcggatgttggcctggacgcccatgatctggccgacggcgccggagggctgattctgaccggcgagatcgggacggcggcaggcgacgcgaatgcgccagccgcgccgcgccagcgcccgcacgacctgacgaccgaggaagccggagccgccgaacacggtgacgagcttggcctcggaggaggggaggagaggagcggtcatgcgaaacctcgtcgactgtcgtgtgcggccttgaaacccgttcggttcttagccctccccgggcgtcctgtgaagcgcctcgcgcactcgtccttggtggaaagcgaaattcgcttcgtcggagcgattgacaagcgtccggcgaccgcttaatcacgccgccgttgcccaggtggcggaattggtagacgcgcacggttcaggtccgtgttccgcaaggagtggaggttcgagtcctctcctgggcaccatctctcccgagatgtgtttcgcgtcaataagttgaagcccatcagagtgttgtggtcacccgactgtgttacaagggtgtgctacatgctgttcaggctggtccaacccgtgaaacgttcgggctcctcgaaggggcagttccagaagcgaattcccgaggacctgcgcgagcgaatcgcggggcggaaactcgtcgtgccgatcggcggcgagctcgtctccatgacagtcccggcgaaggccgcgagcatccgcttttcgctgcgcaccagcgacccgagcgagatcaagatccgccacgccgaagcgctcgcccacctcgaagggatcttcaggtcgctccgcgagagccgccctttgaagctgacccgagcgcaagccgcctcgctctccggcgatttctaccggaactgggccgacgccgaagccgagaagcgatcccgcactatcgtcgtcgaagtcgacgagaacggcgcccgagtcgtcgatgaactggacgagggtgaagccgcagggttcgaagtggcggtacagcgctttcggaacctgaaggacaaaggcgaggcctcggagatcgaacgcactctggggccgatcatcgaccgcctgctgacggtgaagggcattcccgaggtcgaccagccgagccgcgtcatgcttctcgaagcgttcctcgaagctgcgatcgacgccatggaagcgcggcggcggcaggcgggctacgacttctcggatgatcctcgcgccaaacgcttccccgactgggaatgcgtgaagcccgcacgtccgagccccgaggcaccgaaggcgaccgggaaggcatcactcaccggcttggtcgaggattggtggaaggaagcaaaagcggctgggcgaaagccgagcacctacgagagctattcccatacgatgaaggcctttgtcgccttcctgaaacatgacgacgcgagtcgcgtgacaccgaccgacgtcgtcgccttcaaaggccatcgtctcgcctcgatcaatccgaggaccggcaagccgatttcgccgaagacggtcaaggacagtgatctcgcgggactgaaggcgatcttcgattgggcggtggccaacaaaaggatggcgtcgaacccggctgcgggcgtcacgctgaggctgagcaagcccgcgaggctccgctcgaaggggctcaccgacgaggaggcactggcgatcctgaaggcagcccttcaagtcggagagggacgtgcaagaccggagacacgcgccgcgaagcggtgggttccctggatttgcgcgtacagcggggctcgcgtcggcgaaatcgcgcagctccgcaaatccgacgtccgcaaggaaggcgagcattggaccgtcaccatcacacccgaagccggcacggtgaagaccaacgaggcccgctcgttccccatccacgcccatctcgtcgaacaggggttcttggagtttgtctccaagtctgccgaaggccacctcttcctgcgccccggcaatgacggcgacgtactcggaccgcttcaaggcgtgaagaatcgtctcggcgaactcgcccgcaaggccatcggggacgccaaggtcgccccgagccatggatggcgtcatcggttcaagacggtcggccgcgaagtcgggatcgagcaacgcgtgctcgacgccatccaagggcacagcgcgagaacgcaaggcgagagctacggcgacgtgaccatggcgacgatggaggcagcgatggcgaaggtgccgagatacgacacgagatgacgtcaaaagcaaagaggcggaccggagcccgcctcgatttggtggcatgaagccttgctaacggagaggccacaccgcgttccttgctagaacgctcattggatagcatgcgtgtaaccgttttcaaagggtcatgacgagttgtagtctctccccaagctgggagggaagctcatgagcagaattcggttctccttcgatatcgggaccaattcgatcggatgggcggtctggcgaactggtgatgggatattcggatccgatacggcgctggatctcgcgcgagcgggtgtcctcatcttcaaggacggccgcaatccgaaggacggacaatcgctcgcgaccatgcggcgggttcccaaacagagcaggaagcgtcgcgaccgtttcgtcctgagacggaccgacctgttggaggctctgcgctccaacgacctcattcctgcccacgaggacgaagctcgtgatttggcggagattgacccctatttcctcaggaccaaggggctggacgagccgctgacgccgtacgaattcggccgggttctctttcacctgaaccagcggcgcggatttcgttcgaaccggaaagccgatcggaaggacaatgagaagggcaagatcgcggaaggctcggaacgccttcgtgttctgctcgaagagaccaatgcccgcactctcggcgaattcctatggtcgaagcatcgcggcacgccgagaacacgtcaggcgacgcgcattcgcgtcgaaggcgagggcgcgaagtccctctacgccttctatccgacccgcgagatgatccgagcagaattcgaatgtctctggtcggtgcagtcacggttcgcgccggagcgctataccgccgaccttcacgatctgctctgcacgatcattttccggcaacgcgacctgaagcccccgaggatcggcgtgtgcacgttcgagcccgacgaacagcggctgccgaaggcgcttccctcggtcgaagcgcgtgcgatctacgagcggttggcccacttcaggttttcgatcggtcccgtccaagagcgccctttgacgaagacggagcgcgacgtcgtcgccaccgcgctcatgatcggcaaaaacctcacgttcaaggcaatccgcaaggcactgaaggttcccgcgcaagtccgcatcaatttcgaagaggccggcgagagcgggatcgagggggctgcgaccgcgaagttcctctccaagccggatcactttgggccgagatggctcgccttgccgttcgaccgacgtgaccagttcgtcacgaagctgctcgacgaagccgacgaagaccgattggtcgagcggctcgtgacggaagacggcctcacggacgcgactgcacgccgttgcgcgacgatccccctcgcggacggatacgcgcgattgggggcgacggcgaaccgggaagtccttgaagcattgatccgcgaaacggatgccgacggtcacgtcgtgacctacgcggaagcggttcgtcgcgctggtgaacgaatcggtcggccctggcatcactcggacgagcgagacggcgagatcatggatcggctgccctactacggcaggatcctgcaacgccacatcatgcccgggtccggcgagcccggtgaaaaggacgaggcggctcgcttcggccgcatcatgaacccctccgtccatatcgggctcaatcaattgcgcaaggtggtcaacgggctcgtcgccgagttcggccatcccgatcagattgccgttgaactcgcccgcgatctgaaactcaatcgcgagcagaaagagcgcctcgatcgcgaaaatcgagccaatcgggctcagaacgaaaggcgagtatcccgtttggccgaatgcggtgagcgagacacgcccgagaaccgtgtgcgccttcgccttttcgaagaacaggcccgagccaacgacggtgtcgcgcaatgcccttacacgggtcgcaccatagggatctccgaactcttcacggcagacatcgagatcgatcacattctccccgtctcgctcacgctcgacgacagtctggcgaatcgagtgctctgccgcagagaggcgaaccgcctgaagcgacggcagacgcccttccaagcgttcggtgcgaagccggagtggccggacgtcctggcgcgggtcggacgttatccgccgaacaaacggtggcggttcaaacccgacgctctggaacgctacggcaaggacggcggctttctcgctcggcagctcaacgagacgaagcacctgtcacgcctcgccaagatctacctcggcaagatctgcgaccctgatcgcatctgggtgacgcccggaacgctcacaggcctcttgcgcggcaaatggggattgaactcggttctttccgacgacaacttcaagaatcgctccgatcatcggcatcacgcgatcgacgcggtggtcatcggggcgctgacgcgtggcgtcgtccaacggatcgcccacgaagccggacgtgccgaggatcgcgacctggaaaaggtcttcaccgaaatcccgaccccgttcgacgacttccgcgagcacgttcgtgatcgaattcgcgccatcaccgtctcctataagccggagcacggccgcgaaggagcgttgcacgaggacacgtcctatgggctcgtgcccgagaccgatccggatcgcgcactgggcaacgtcgtgcttcgcaagccgctgaagagcctcactccgaacgaggtcgaacgcatccgtgacaggggtatccgcgagaagatcaccctcctcgctgcgccgtttcgcgatgcttcctcgcgcaagatcggagacgctaagggtttcgcccagatgctcgaaaccttcgcccaggagagtggcatccgccgcattcgcatcctgaagccggaggcgagcatcgaagtgatctcggatcgggagaccggacggccttatcgtgcggtcgcgccgggcgagaaccatcacgtcgacatcgtgcagatgcgagacgggtcttggcgcggattcgcggcgtccgtcttcgaggtcaatcgtcccggctggcgacctcaatgggagcgcgaccggctcggggggaaactcgtgatgcggctacacaagggtgatctcgtggaggtcgacgacaaggacggtgtgcgccggatcaaggtggtccatcaaatcgagatcagctcgaaccgaattcgccttgctccgcacaacgaagggggcaaattgcaggaacgccatgcagatcccgaagatctgtttcgttgggacttggcgaccattcctttgctgaggggtaggcggtgccgcgccgtcaaagtccacccaactggacgcatccagccgacgaagaccaacgtgtaatcaggggtaagcatcgggaacaattcttgcgagaacaccaacgatcgtcgccaatttgcctctctctacggcgaagcggaccgattctcgcgggagatgtgccatgttgggacgtatcgtcgaaatcgaaggggaaggccgccgtctcagtctcgaacgcggtttcttggcggtatgtggcccggaaggcgaattgggcagggttccgctcgacgacatcgaagcggtcatcgtcgccaatccggccgcgagcatgaccacgcaagtcgtggcggccctcgcccgaagaggagccccgctcgtcatcagcggtcccgacttccgtccgaccgctttcgtccttcccgtcgatggtcaccacgaccagggcagccgcatggaagcccaggccgaagcgacgcttcccctccgcaagcggctctgggcgggcatcgtcaaagccaagatcaccgcgcaagcggaagcactcgaacatgtcggagcagaagccggtgcgatccgtgcgctcgtgccgaaggtgcgctcgggggacccggacaatttcgaagcgctggcctcgcagcgttactttccggcgttcttcggcagacgctttaggcgcatccgcgacggcggttcgacgaacgacctcctgaactacggctacaccatcctcagagccgccacggcgcgagccatcgtcgcggccggtctccacccttcactcgcgctgcatcatcgcagcaagggcgattccatgcgtcttgccgacgacctcatggaaccttttcgtccttcggtcgacctgatcgttcgcggcctgaccgaagggggcatcgatcggctcgacccgagcgtcaagaagcgcctcgcgcgtgtgctccatgcggacttctccacgtcggacggacgggcgccgctctcgaacgtcctcgggcgtttggccgtgacattggcccaggtctatacgagtgaacgcaagacgctggcgttgccgaagccgctcatccctctccctctccgaccggacgagggagctgaaccatgcgagccgtgagttctctttcggggtatcgtgtcttgtgggtgatggccttgttcgaccttccggtcatgacgaagcccgagcgcaagcgggcgacgaaatttcgtcagttcctcttggatgaaggtttcctgatgatgcagttctcgtgctacctgcgtttcactgcgggcaaggagcaggccgaagcgatgacacggcgaatcggccgtcacgtcccgaaggacggaaaggtcgacgtgatctggttcaccgatcgccagtatgcggacatccgcagctatcgcggcaagtccgacgacccgcgaccggggcgccccgaccagctgacgctcttctgattcgtcttcgagcgagcggggcgagcgcgagacgagcggaattcgacgtgtcgaaaggcgaaaaaccccctggcgacaggggattctccggaggcggttctagcaaggaacgcggtgcggcccaaccgcagccggccaagcgcgggtcaactcgacgccgaggttctagcaaggaacgcggtgcggcccaaccgcagccagtggagcgaagaggcgatcgagcggctcgttctagcaaggaacgcggtgcggcccaaccgcagctcgtgcgttcgcttcaacgcaaggaacggtgttctagcaaggaatgcggtgcggcccaaccgcagcccgacgaagtcgctcgccgcgacgggctcagttctagcaaggaacgcggtgcggcccaaccgcagcaccctttcaattcgtgcgaaccccatggtagttctagcaaggaacgcggtgcggcccaaccgcagctgtatcggcgcgcgctcgtcggctgaaaagttctagcaaggaacgcggtgcggcccaaccgcagcttgcccgcttgaaggccgcattcccgaagcgttctagcaaggaacgcggtgcggcccaaccgcagcatgtcgggcgagcgcccgagagccatctcggttctagcaaggaacgcggtgcggcccaaccgcagcttgtacgataggatggtgaaacggcgttgagttctagcaaggaacgcggtgcggcccaaccgcagcgccgggttcaaggggggcgaacaccgtcaccgttctagcaaggaacgcggtgcggcccattggaccgccaaacactggctcgcttggcaaagcccatccccgccgatagactcgccaccggaacgttacgcggcgttctggggcgtggaaaccccttaccaagtggttgggtgccgaccggaacggcaccgatcctcgacctatggtcggggagcctgtggcgtatgtccaggttctccgaactaaaggtcacagggaccggcttggtacggttttccaactccccgatcgccagggtcaaggaggcagcttgcgggggcgcaccgcaggcaacggcctcaggggagaaccgcgacgatgtccaatcggtccgcgcccttcgatgtcgtcgctctcgatcacgtcatctccgcgagagctgaagagaacaagcgagccgacaacctcttcgcgatcatcgcgtggatcggctgctcggtctggtggatcgctacgacacccgaggcgcatttgttctcttggcaggccgtggtgatgatcatccccggcatgcttgcggcctccctcatcctcggtggcggctcgttcctcgtgaagtcggggcttcaagccctgatcgtgcggcttccatcggcctatcgagccctgccggccgcgctcgggggactcctcgtgttcctcgccgagatcgtcatcgcgtatcgctcatccggacttgccctcgcgtttctcttgggcctcgggcaaccgagcaccgctctcggcggggaggcgaaggtcgacgagagccatgccctacccatcacctcccaaatgtcggcgcaactacgggatctgtatctgtctcggctcgacgcatgggtttccggtggaggcaagccggcggacgttcagagtggcgtcgtcgagacctgcggacgcctcctcatggtgacggcgaccgccacggaagcggtggcgttcatgaaagagaggcgcgaagatctcgactttcgggtcgacgtctgcacgaagctcacgatcactcgcgctcatccccagcccgaattctcaaagcccgagatccggaagatcgtctgcgaggacatgcccgagacacagtcgatcttcgaagtgctctgcaagcgggccggattgcgctgatacgacggggtgaaacagccctttgcaatggacccctcttcatcgcctcgatcgatgacgcaggaagccggccacccagattgcttcgaggcggacctggagccccgaacgtattgaccgacatcgagcctctcttgtgctcggccatcacgccgatcatcccgcccggctccgagacgatgatggtggaggttcgatctcaccaccatcaatcctcgggacggcaagaagagatctcaaagttccagcgcgaggtggtgcagatgagaggatatccatccaccctcaccctctccccgatcacttcgaggcagacttgaagtccggaactgtgtgcccggaaccaaatgaccggcttcgagcccgacatcgagttccccttgcggtgacgatgagggaggatgaacctctccctcacccacccttcggacgagcatcgagatgggcttcgagttcgacctagagggagaggaggcggggaaggagacctgaccaccatcttctctccggcgagggctggaggtggtctttcagttcacccagagagatacccttaagcgaggcgcataagccgccccgctcgtcacttcaccgtcaacggcaacacgaagcccaccacctccaccgacgccgcatcgatcaatcgcttcgcctcgtccgctcgcgacttcgggaccatcatcccgtcatggatcggcagcgccgtgatgcccttctcgttcaatcggagcagcgccgcgacgaggatctgggattcgatgaaggtgagttcgaaccccttcctcgtcccgaagacggacgcgagggccggaaaggccgacttgatggcttcgctcacggctcgcgccgaccggaggctttccggaagcaacggcttcgtgccgcgcggaaggcgttcgagagcgtccttgcggaacagcatcgcgttcagaaccttcttgatcccgtctcggtgctcttccgtctcaatgcccgcgatcgtccgatagagatccccggcggcgggctccacgcccaccgagagcagcgccagtcgcaggtacatgctggcgaagtcgagataggcggtctcctcgccatcgatccggacgtgttggcggagatccctgccgagctgctgccagaagatccctcggtggtagagccgcccgccccgatcgaagcgtttctccgcgtcggggaccggcggcagttgcgctttccccttctgcctccgtgcggggatgttgaaggtccgatgcaggaaccgcattcgtggcgaggggtccaagagacgcccgttctcatcgcgcggcgggccgacgtaggcgacatcggcatgggcgagatggtcgttgatccggcgcatctccgcgcggaaacgccgtgtctcgggcgtgtcggcgtagtcgatcagctcgctttcccgatcttgcgtgaagagatcgacggtggtgcgggcgaggatgatggtttcttctccctccacccggccgaaggaagccggtgagaggtcgtcgaacgcgaggattttggcgacgaggtccggcaccggctcgatggtgctcgccttgcccctcttcttggacttgacgaggtccaccacgcccgcctcggcgagcaacaggacgccggccgccaactgacggaaccccgagggctcgtatcgggatcgcttcccttcgggcttgcgcaacggcacggcgaccagcggcggcgaatggcccatcaccacggagagcgcgaggttggccgcaagcgcggcgacgagggccacatggttcgcggcgtccacgcctcggcgggctctcttccggggcggagcggccagttcgatcgccctggcgagatgcgcctcgatggtcgccacgcccggatggtggcaggtgaggaagggatcgaaatagagatctcgcgccgagcgaatgcctccgattccggcctcgtcctcgccctgcgcaccccgatcggcctcgacctcatccgacgcgaaatcgctctccaccaccatcgctcagaacccacctttgaaggcctcgaagccccgctcggcgaagtcgcggcggatctcctcggcgatccgttcggcttcctcagaggtctcgggccgctcgatcgacggcggcgacgagacgggaagcggcggcggtggcggcaccagctcgttgccgtgacgagacttcgcgacgatcgccctctcggcgggcttcaggtctccgtagcggtccttcttgaggtccagcacgacggcgacgtggcgatcgatggcgaactcgcaagccgcctccaccaccgctccgagatgctccaggacacgccccgagcttcgcgggtaacggtcccagcggatgccggttccttcgtagacgacgtgcgttccgctcgcccggcgacgtagggccttggcgatctgaacccggcggaagagcacgcggtcgccaccggggccgaacgggtcttccgcgatcgcggcgaggacggcgagcgtcaccgcaaggatgcgctcgggcgggacgttgcgctctcggagcattgcgagcgcggccttcgccttggtctccggcgagagcctaccgagatccgcaacgcggcgcacggggcctgcggaggccagcagagaggagatggaggcgagcgaccacccaatgtactgctcggccgcgttggccttcacgacgctctcggcggccctcagataggggcgaagctcggcggccgtgtaggaccgcttcagcgggctgccgtgccgactgcggtgctcgcggtggtaacggcagaggaagggcgagaatccattcccctgccgcgcctcggtcgggcggccacagccggaaaccgtgcagaccggcattgcatcggccttcggacgcgacacttcggaagcggccctcggtcgagggcgggtttcatcgggcatcggcgcctcgtgtttgaacctccgaaagatcaggcgtcgaaccctgggtttcaagggcgcgataaacgctcgccctgccgatccccaaggacttggcgacctccgagacggtcttgccctcggcatgaaggcgccgcgcttcatccgccttggctcgggcggtcggtttccggccccggtacttgccctcgcctttcgccttggcgatgccttcgcgctgacgttcgagcatcatctcgcgttcgaactgtgcgaaccctgcgaagacggtgaggatcagcttgcccgtggcgctgcgcgtatcgacggtgtcgccaccgagggagaggatgcggagaccggcacccttcgcctccaacgcctccaccacctcccacgccttgccgaccgagcgggcgaggcgatcgagcttggtgaccaccagcgtgtcgcctcggcgggcgaacttcagggcggcttcgagttcggcgcgaggggcgacggaggagacctgctcggagaacacctgctcgcagcccgcgagcgtcaggtctcggagttgggcttcgagcccggcctcctgttcggtggtggaggtgcgggcatatccgatcagcatggtggacctcatgatgtccaataggatccggatatgagaatcccgaacgcccaaaatgtcaatggacttcattggacgcgatcggtgatgaagccggacacgtccgcacgggcgaggtctattggacgcaggcgggcaaaggttcggtcgggatgagcgggagaccgcgcgagatcacgagtgggacggcggcacgggggagaagcgcgatcgccgccgcctcgtgctcacctctcgcgatttcgacccttcgacttcgggccgggattcatgtctgcaaccgcgagcgccaaaactgtgatacaagtcttgaatcaagtggaaaataatatataaaaatcaataaaataggtatcggggaccggaatcctctcctgggcaccatctctccccagagatcgtgtttcgcgtccgactttcagggttttcgacgtcttcttcttcgccgccccggcgtgttcgtccggcggcgtgggagcgcgtcggttccgactgctcttccccgaaaaatctcgtgatcgcccgctctcgccgattcgtgtcggcgggatcgatcggcgtgcgcgggccgcgcgaatcggctcgagggcgtccgtcagagcgtgggcgcgacggcgagcaggccggaaaagatcgccagcgacaccagcgtgtggacggtcaggacgcggtggacgagccggcgttcctcgtcgctctcgcggccctcgggcatgaacagcggcacgatgaagggcggcggcaggatcatcagcgtgaagagggcgacggcgtagcgcggctcgaagccgagggcgagatggacgatcccccaggcggcggcgatcgccagcgggatctgcagcgccagccggagggcgacgatcttcgccacttcgccgaaggcgccgccctcgaaatggaagccgtggccgacgacgatcaggatcagcggcacggtcatcggcgcgagcaggcgcagcgtcgccatcagtgcgtcgatcacggggatgcgctcgagatcggcggcatggatgccgaaggcgtcgaggacgaggccggcgacgatcgccacgatcaccggattggtcaggaagcgcttcagcagcgtggcgaagctcgggcggccgtcgcgggcggcgatcagcagcgcgaagaagacgaaccagatgaagatctcgtggccgagcgcgacgacggcgatggtcggcacggcgccgaggccataggcgccggcgaagaggccgatgccgagcatgccgtattcgtagccggtcatcaggaacttcgcccagggccggtcgatgccggcgacgcgcaggaggcggggtccgacgacgaggccgatcaggcagacggcgaagaccagtgcgatcaaggccccgtagtccggacgcaggtcgaggtcgacgaaggagaggaacaggaccgagggcagcaccacccgcacgaccaggagcttcagcgcgttgccggtcgcctcgtcgacccaccgcgacacccggaggccccagccgagcccgagcagcaggaagatcggcaagatgcgcaggaggagcatggacatgggggaaactcgattcgagggcggcggcattctcgcaccccgccaccggcgggcaagcgcgcgcgggtgtgacatcgcggcgccggccgtctcccggcgtgcgctcttccccctcgcttcgggtgtagcccctcgtgcgccggtgcgcctccactcccgtcgtgccttccggcatctcccgctcctctcggggagagacgactggtttcatgttcgtatgtcgaactatcatgcgagatacgaacatcgcgattgcgagcgcggcgtgtgcgtggaacgatttgcctgcgttccccggccgccggccggtggggcgggtgtcggcgcgatcccgtgagatcggggccggcgcgaggaaaacgcgaaggatcgagacccgtctcgatcgatcgaggcaggttcgatggcccagatcacgacgctcgcgagcgccgtgcgggatctcgtgcacgacggcgacacggtcgccttcgagggattcacgcatctcattccgcatgccgccgcccacgaggtgatccggcagggcaagaaggatctgacgctgatccgcatgacgcccgacgtgatctacgatcagatgatcggcatggggctggcgcggaaggcgatcttctcctacgccggcaatcccggcgtcgggctcctgaagcggatgcgcgacgcgctcgagaacggttggccgcgcgcgatcgagaccgaggaacattcccacgccggcatggccaacgcctacgaggcgggcgcggcggggcttccctgcgcgatcttccggggctatcgcggcgccgggctgaaggcggtcaatccgaacatccgttcggtcgtctgccccttcaccggcgaggagctcgcggcgatcccggcgaaccgtccggacgtgacgatcatccacgcccagaaggcgaaccggaagggcgacgtgctgatcgagggcatcatcggcgtccagaaggaggcggtgctcgcggcgaaacgctcgatcgtcacggtcgaggaggtggtcgaccatttcgacgacgctcaccccaatctctgcatcctgccgcattggacggtgacggcggtggtggcggtgcccggcggcgcccatccctcctatacccacggctattacgcccgcgacaatgccgcctatctcgcctggaacgagatctcgggcgatcgcgatgcgttcctcgcctggatgaaggccaatgtcctcgacgtcgggcccgacgtcttcgccgcccgtgtggagggcctgcgcaaatgaccgcgacctcggacctcggcttcacgcccgacgagatgatgaccatcgccgccgctcgggcgttgtcgaacgacgacgtctgtttcgtcggcatcggcgcgccgtcggccgcctgcaacgtggcgcggctgacgcatgcgccggacatcacgctgatctacgagagcggcaccatcggcaccgcgccggaggtgttgccgctctcgatcggcgacggcgaactctgcgacaccgcgctgaccacggtctcggtgccggagatgttccgctattggctccagggcgggcggatcaagaccggcttcctcggcgccgcccagctcgatcgcttcggcaacatcaacaccacggtgatcggcgactatgcccatcccaaggtgcggctgcccggcggcggcggggcgccggagatcgccacctcgtgcgggcggatcttcatcaccatgaagcagtcgaagcggggcatggtcga

SEQ ID NO: 3253 - DNA, 23180 bp, synthetic construct
  source 1..23180: mol_type = other DNA
  misc_feature 1..23180: note = Synthetic
cgccgctcggcgcggcgctcggcaggcgcttgtcggccggctggttcgccgccgcattggtggtcgtgctgctcgcccggcacgtgatcccggggcccaacacggcgctcctggcgctgcagctcggcgccggcctcatggtctgcgccctccatcacggccatgccggcgggttcggcacgctgctcgggcgcccgacggcgtgcttcgtcggccgcatcagctacagcctctatctgttcaacgtgccgctgctgatcgccgtcgatccgctgttgcgcggcagtgatccgctgttggtcggggtgccgctcggactgctgatcgtcgcgctgacggtgccgatcgcggcgctcgccgagcgctggatcgagcggcccggcatccggctcggcagccgcgtggcggcgatccgtttcggcggcacgccggccgaccgcgctcgccccgtgcccgaggcgtcgaacgggctttagggccgtcccgaggcggcgcgctcggcgagcggccgcgccggctcctcctcctcgtcgtcgggctcgggcggcgtcaccagcgtgcgccacaagccgcgcaggccgatccagatcaggccgatgacggagagaaagccgatcagcacgaggccgccggcgagcgcggcgatcaccccgccgagcactcggtcgtcgagataggcgagcagtcccgcacccacggcgaatacgagaaacacgagcacgcgtacgatattcgccagcatggaggtcctgctgtagggcggggcggtcatgacgggtcccgcgggtcgcagcgacgtccgccgggcggtgtcgtcgtatcgtcatgacggccgccgggcaacccgggcggcgcctcaccatgcggggtggtcgacggattcttgcggtcggcgagaacggtctgcgcacctcggcgcgcaaaaaaactcacagccagccgagcaggcgccaccacacgatgtcgagcggccagatcagcaccaccgtgagcacggcgagcacgaagcagtagagcgcgccctcgcggcccgggatcacgccggcctgcacggcgaccgcgagcggcggcgcctgatagggcagcagcacggtggagaagccgatcacctggctcatcaccaccgcctcgaccggcaggccggtggccgcggccagcatcggggcgatcggcgtgagaattgccggcacgccgaccgcggtgacgaacgggccgatcgcgaaggcgacgccggcgagcaccagcaccgccatcagcgggctcgcgccggccggccccaccaccgcggggatcgcctgggcgagcatcgcgccgatgccggtgtggtcgacgatggcgccgagcccgaccacgccggcgacatagacgatggtctcgaagccgaccgccttgagcggctgctgcggcatcaggccggagcccggccacaggcagacgatcgcccccagcatgccgacccaggcggccgggatgccgtgccagccgtcggtgagccacaggccgatggtgccgatcagcagcgcgacgagccgcttctcgaccgccgacagcggcggcagcgcggtcctctcgccccccggcaaaggcgcgacgtcacggaagccgatcgagaggagggcgacgatcagcgcgagcttgccgagcccgagcaccggaaagtgcagcaggagatagcgcgagaacgacggcaccccgatcccggtggtctcgagcaggccggccagcacgttgttcggcacgttggcgggcaaaatcgccatcgccgggaagaaggtgccgaaaatgcccgccagcatgatgccggcgcgggcgcgcgagcccggcgcgaggccggcccgcaccgcgagcgagtcgagcagcggcgccagcaggaagatgcggcccatgccggacggcatcacgaaggcgagcccggtgccgaacgccgcgactcttgccagcaccagcggataggagcccttcaccagcccggcgagcatcgcgccgagccggtcggacaggccggtgtggcgcagcgcgacgccgatcaccgcaccggagacgacgagccacaccgcggggccggtgaagccggagagaaacacgctgggtggcgcgatcgtcccgagcgcgcacagcacgaagaaaatgaaggcgacgagatattcgggcaggacgcgggtcgcccacagcgcgatggtgacgacgaccaccaccagcggcagcaccatgtcgtggccaccgaggagatggcgcgccagcgcccagccggcgagcagggcgacgagggcgaccgtgatccacggcttcagcgcggcggtggtcatggtcgatgtcttggaaacgatgtctcggaaacgacgggcaccccgttttgtcgcatcgcggcgcaacggtcgcaattgcgaacttttggcaatccgccccgtccggcgcgcaaagctcgggcatcggcggcacgaagaccaccgggtccggccggagccgaacccggtggcgggtgcgtgggaatggggccggcccggcggagacgtcgacgacgggcgaaaagtggggggacgagtcccggggacgagtcccgggggctagccccctcggcgctcgctgtcgagctgggcgagctgtgcccccgcataacggtcgccggccgccgatcctttcggcaccgcccgctcgatcgcggcgagatcctgcggcctgagcgtcacgtcgagtgcgccgagcgcctcggtcagccggtcgcggcggcgggcgccgaccagcggcacgatgtcggccccctgcgccgccacccaggcgatcgccacctgcgcgacgctcgcgccgaggtccttcgccaccgcccgcaacgcctcgaccagcgcgaggttgcggtcgatattgtcgccctggaagcgcgggctgtgggtgcggaagtcggtcgcgtcctggccctgttccttgctccagtggccgctgatcagcccgcgcgacagcacgccataggcggtgacgccgatgccgagttttcgcaccgtcggcaggatggtctcctcgatgccgcgcgagatcagcgagtactcgatctgcaaatccgagatcggatgtactttcgccgcccgctcgatggtcgccgcccccacctccgacaggccgatgtggcgcacccagcccgccttcacgagatcggcgatcgcgcccaccgtgtcctcgatcggcacgttcggatcgagccgggccgggcggtagacgtcgacatgatcggtgccgagccgctgcagcgtgtaggcgaggaagttcttcaccgcggcggggcgggcgtcgttgccgaaccagccgccggccggatcgcgcaacgcgccgaacttcacgctgatcaccaccttttcacgaggcacttcgcgaagggcttccgcgatcagcatctcgttgtggcccatgccgtaaaaatcgccggtgtcgaagagcgtgatgccggcatcgagcgccgcgtggatggtggcgatgctctcgctgcggtcggccgtcccgtagaacgccgacatccccatgcagccgaggccgagggcggacacggcgggtccggtctttccgagggtcgtttggtccattggtcgtctccgtcgaaaggggcgcccggcgccacgacgagaaacacgtggccgggccgatgcggagagaatggcggtttgcacggcgttcgataatccgtcacgattgaaacaggtcgtacggaaagacgaacagtggccgatatcgatctcgcaaatctcgccgccttctcggcggtcgcccgccagcgcagctttcgcggggcggcggcggtgcgcggggtctcggcctcgaccctgagcgaggcggtgcggcggctcgaggcgcagctcggcgtgcggctcctcaaccgcaccacccgcagcgtcaccccgaccgaggcgggcgcgcgcctgctcgagcggctcgccccggcgctcgccgaggtcgcctcggcgctcgatgcggtcaacggcttccgcgacagcccgaccggcacgctgcggctcaacgtgccgaccatcgtcgcccgtgagattctgccgaagctcgtgcccggatttctcgccgcgcatcccggcatcacgctcgagattttggcggaggacggttttgtcgacgtcctggcggaagggttcgacgccggcgtgcgctacgacgagcggctcgcccaggacatgatcgcggtgccgatcggcccgcgtcgccagcgcttcgtcgccgccgccgccccctcctatctctccgtgcgcgcaaaaccggaaaggccggaggatttgctcggccacgcctgcatccgccatcgcttcaccagcggtgtggcgcttccctgggagttcgaacgggacggcgccgtggtgcggatcgcgcccgcagggccgctggtcgcctcgaacctggagctcgaggtttctgcggcgctcgccgggctcggggtggtctacaccttcgaggagacgctcgccccgcacctcgcatcgggcgccctggtaccgctgctcgagccgtggtggcagagcttttccgggccgttcctctattacgccagccgccaccacgtcccggcgccgctgcgggcgttcgtcgactggctgaagggctcggcgaaggcgatggagtgaatttttgttcggctgtcactccggcacggcggcggtgcgcgccgcggcgggcgtttcggcaggcacgcgcgtgacgttgtcggggccggtcgtgaccggctcgggggcactcgccagccacaggtcgaggaaatcggcgagccaggcgcgcaccgccccgtcatagaccggccggtcggcgaaatgcgcgagccgcggccgcgcgcccggcagcgacaaacgctcgtcgccgcgcgtggtccagcggcacatcatcgcgtgggtgacctcggggtggaactgcaccccgaacgccgccggcccgtaacggaacgcctgcacccgaaaggtgtcgccggccgccagaagctcggcgccggcgggcagctcgagcccctcgcggtgccactgatagacgtggtcgggccaggacggcacgacgctgcggccgctctcggtcgcgcgcagggggtagtagccgatctcgaccctgccgtccggccgcggtccgaccgccgcgccgagatgcttcgccagcatttgcgcacccaggcagatgcccaggaacggctttctctcgcgcagcggcaccttcagccactcgatctcggtcctgacgtagtcgtcggggtcgttggcgctcatcggcccgccgaacaccaccgcaccggcgtgctcgtcgagcgtttccggcaagcgctcgccgaagcgcgggcggcgcacgtcgagcggcaggccgcgcacctgcaggtaatggccgatccggccgggagtcgattgctcctgatggagaacgatcaggacgggtttcagcatgcggccgttcgcactccggcgtcgctccttcgggttgctcggcccgtcaggctaacgggtcttcggcgccggccgcaagcgcgagcggcgagccgtcaggccacgctgctgctgcggttgcggaactggccggtctttcgatagcgccagagataggacggaaggatggcggcgggcggtcgcggatcgatgccgagatcggccagcgtgcggtgctcggcgacggcggcgtcggagaccacgttgtcgactttgagaagctcgacctggtccggcgtgaggggcggcgtgggcaggatcttcagcatcgctcccagcagcttggcggcccagaacggcaccggcaagaggagccggcggcgctcggtcacctggagcacgaggcgcaggatctccttgaaggtcatcacgtccggcccgccgagttcgtagatggtgccgggcctcgcctcgccggcggccgccttgcgcaccgcctcgccgacgtcgccgccaaaaaccggctggaacttcgtgcggccgccgccgatcagcggcaggaccggcgcgaaccgcgccatcgacccgaacttgttgaagaagtcgtcgtccggcccaaagatcaccgagggacgcaggatcaccgcgtcgggcgcggcggcgagcacggcctgctcggcgcggcctttcgtgcgggcatagagggcgcgcccgttcgggtcggcgccgatcgccgagacgtgcaccagccgcgcgccctgcgccgccgccgccttcgccaccgcctccgcgccggcgagatgcactgcctcgaaattctgcttgcccttctcgaacaggatgccgaccaggttgatcaccaccgcgctgccttcgacggcgcgggcgatcgaatcggcattgcggagattcgcctgcacggggtggatctgcccgacccggccgagcggctgcaggtggccggcgagatcggggcggcgcaccgcgattcgcaggcgccacagatcgggggcgagcgcccgcacgacgtggcggccgagaaagcccgagccgccgaacaccgtgacgaggtcgtcgccgcgcagcggatcggtgagaggggtgtcgaggccggtggcgatcatgacgtgtctcccgcatcgagacggtgccgccgcatcgaggcggtgccgcggcggagcggcgaacggcgcagcaaaaccgttgccgcaccggcaccgcgggccgtttcgggcaatacaggatcgcccccggcctgtacagggcggctgcggccgcaggccgcgatcgggtgtttcgcccgccgcgccttggtggtgccgggcggcttcgggctggcgtccggggcgacctcggggcggtttccgggcggcctcggaggcggcctgcggactgacctcgggacggcttcggaaccacactgcacagattctcgcccgccctgcatgacgcgccgttgacaaggacgaatccgcccctctatgagtgcgcccgtgcccaggtggcggaattggtagacgcgctggcttcaggtgccagtggcttcacggccgtgaaggttcgagtcctttcctgggcaccaagccatcccaaaagctttcccaaaaaagctcgatgtcgaacgacctccgagcatcgaaggcgttttgaccgcccgccgggtcacacgcgggtggtccacatggtgctcgcaatggcccggccgtcccggcgctccgaaagctccaacttcctcttctgcaagcgcgtccccgccgacacccgagccaagcaggccggcggcaaggtcgtgttctcgttcccgcccgagatggggtccggcgagccgatccgggtgacgggggcgatcggcgccgagatcaaggtgtcggtcaggactcgcgacccggaggtggcgtgcgccaaaataagaaggccggggaacggatgcagccctacgacgacgccgaggtcggccgcatcctcgcgctggccgacaaggagaccaatccggccaagcggtggctgccctggctgctcgcgctcagtggggcgcgggtgggcgaggtcgcccagctctgggggctgcggatcaccgaggtcgacggtgtcccggtgatgaagatcgcgccggccgaggacggcggctcgctgaagaacgaaggctccgagcgcacggtgccgatccacccggcgctcatcgagcgcggcttcctcgacttcgtgcagaagcggggcgacggaccgttgttctactgcgacaggcggatgcgaaccgacgcgaagcccggcgatgcccgccgacacgcctcgaagggcgtcgccaatcacctcgcggcgtgggtccgggagaacgggttcaccaacccgagaaaagccccgagccacgccttccggcactggctcgagacccgctgccagcggctcggtatcctcgacagcgtcgccgacgcgatccagggccacgccagcggtcaggaagcggacgggtaccggcatggaccgatcgcgaccctcgccgaagcggtttgccgcatcccggtccccgaggagccgacgcccaaccggcgttgacgctcagggcgatggctggccaaggcccggccgcgggcggctcgaacacccccgccgtccgccggctcccgcgcctcgggcacccgaaccgttcggcgaggcgggcgagcgggaaggcccggccgcgggtgcagacgagtgtctgcatgtccagctcggcaccgaaggggcactctcggacggacttcatggcctcccgcatcccccaggcgcaccgcatgtggactcgccagctcgcgtccagggcctcgaccaaggtcgcgatcatgtgaacaaagtgagaacttttccgtggtcgtcagtccgaaagggcgctaacgtggtgtcctccggcctcgaccagccgcccgcgaccctgtgcgatcggcagcggtctcggccgcggcttcgtgtcggtgaggtcggccatgatctactacgtggcgttgccgttcgtgcggctcgacgagggcctcgttccaggcgaggcagtcgagtgcccccatgccgctgcagcgatccggcgggcggctgcgttggcgtccgcatccacgaacgcgggagccgtcgccttctcccggtccggtgaccccgacaccggcgacttcgacgaggcggtcgtcctgcggatttttggcgaggtcccggacgagatcgcagggcagcccgacgatgaccggaccggctcgtccggcttcccctgagcggatgtgcaatctctacgcgatcacgaaggggcaggcggcgatccgggcgctgttccgcatcgcgcgggacaacaccggcaacctgccgcccatgcccggcgtcttcccggactacgcggcgccgatcgtcctggtcggccccgacggtcgggagctggcgctggcgcggtggggcatgccatccccggtgttcgccctgaagggccggaccaccgaccccggcgtgaccaacgtgcggaacgtgaagtccccgcattggcgccgctggctcggcgagggctgccggagcgtcgtgccgttcacgtcgttctcggagtacgagaccacggccgaggggaagaaggtcccggcgtggttcgccctcgacccgagccgacccctcgccgcgttcgccggcatctggacgagctggatgtccgtgcggaaggcgaaggagggcgaggtgaccaccgacgtgttcgccttcctcaccacggacgcaaacgcgatcgtggcgccgatccacccgaaggcgatgccggtgatcctgcggaccgaggacgaggtcgagacgtggctccgggcgccggctgccgaggcgctcgcactgcagaggccgttgcccgacgacgcgctccggatcgtcgcccgcggggagcggaaggacgaggcgccgggcctctgatcggcgtcgctcgagaggttagaggagaagggcacgggcctgcgcatcctcagcctcgccggcgatacgatcgacacgcgcagcgccaccggcaagctgatcctgaccatcttcgccggctttgcgcagttcgcgcgcgagatgatgctggagcgtcagcacgagggcatcgccaaggccaaggccaaggccaaggccaaggccaaggccaaggccaaggccaaagccaaggccaaggccgagggcttgtaccgcggccgcaagcccacggctcgcgccaaggcggaggaggctcgccggctccacgccgccggcaagaccgtcaccgaggtcgccagggcgctcggcatcggccgggcgagcgtgtaccgggcgctgggaggggcggagggctgaacgcgacggcagcgcgtcccggatcgctggacccaggcccgccggccgcattttttctgcgaccgcccgagagcatctgttttttgcgaactcggtacggccgcttacagccaagcccgcggacgagccaaagacgcggccctgcgccgcaaaagcaaagaggcggaccggagcccgcctcgatctggtggcatgtgccttgttaacggagaggccacgccgcgttccttgctagacgatggcaacataccatatcgcgccttcttttcaaggtgcgcccgagcgttgtaccgttcgagctggacggggaggcgggaatggggatccggttcgcattcgacctcggaaccaattcgatcggctgggcggtttggcggaccggtcccggtgtgttcggggaggacacggccgcctcgctcgacggctccggcgtcctgatcttcaaggacgggcgcaatccgaaggacggccaatcgctggcgacgatgcggcgggtgccgcgacagagccgaaagcgacgagaccgcttcgtccttcgacggcgcgacctgctcgcggcgctgcgaaaggcggggctctttccggtcgacgtggaggaggggcgacgcctcgcggcgacggacccctaccatctgcgagccaaggcgctcgacgagtcgttgacgccgcacgagatgggccgagtgatttttcatctcaaccagcgtcgcggctttcgctccaaccgcaaggccgatcggcaggatcgcgagaagggcaagatcgcggaagggtccaaacggctcgccgagacgctcgcggccacgaactgccgcaccctgggcgagttcctctggtcacggcaccgcggcaccccgcgaacacggtcgccgacccgcatccgaatggagggcgaaggcgcgaaggcgctctacgccttctatccgacccgcgagatggtgcgggcggagttcgagcggctgtggacggcgcaatcgcgcttcgcccccgatctactcacccccgaacgacacgaggagatcgccggcatccttttccgccagcgtgacctcgcgccgccgaagatcggctgctgcaccttcgagccgagcgaacggcggcttccgcgggccctgccttcggtcgaagcccgtggcatttacgagcgcctcgcgcatctgcgcatcaccaccggcccggtatcggaccgagggctgacgcgacccgagcgggacgtgctcgcgtccgcgcttctcgccggcaagtcgctcaccttcaaggcggtgcgcaagacgctgaaaatcctgcctcacgcgctcgtcaacttcgaggaggccggcgagaaaggcctcgacggcgctctcacggcgaagctcctctcgaagcccgaccattatggcgccgcatggcacggcctgtcgttcgccgagaaggacacattcgtcggcaagctgctcgacgaggcggacgaggagcgtctgatcaggaggctcgtcaccgagaaccgcctctcggaagacgcggcacgacgctgtgcctccattccgctcgccgacgggtacggtcggctcgggcggaccgcgaacacggagatcctcgcggcgctcgtcgaggagacggacgagaccggcaccgtcgtgacctacgcggaagccgtgagacgggccggggaaaggaccggccgaaactggcaccactccgacgaacgcgacggcgtgatcctcgaccggctgccctattacggagaaatcctgcaacggcacgtcgtgccgggtagcggcgagccggaggagaagaacgaagccgcgcggtggggccggctcgccaatccgaccgttcacatcggactcaatcagctccggaaggtcgtcaaccggttgatcgccgcccatggtcggccggatcagatcgtcgtcgagctggctcgcgagctgaagctcaatcgcgagcagaaggagcggctcgaccgcgagaaccgcaagaaccgcgaagagaacgagcggcgcacggcaatcctcgccgagcacggccagcgcgacaccgcggagaacaagatccggctccgcctgttcgaggagcaggcacgggcgaatgcaggcatcgcgctctgcccttacacgggccgcgcgatcgggatcgccgagctgttcacgtcggaggtcgagatcgaccacatcctgccggtctcgctgacgctggacgacagcttggcgaaccgcgtcctgtgccgtcgtgaggcgaaccgggagaagcggcggcagactcccttccaggcgttcggtgcgacacccgcatggaacgacatcgtcgcccgcgccgccaagctgccgcccaacaagcggtggcggttcgatccggccgccctggagcggttcgagcgcgagggcggcttcctcggccgccagctcaacgagacgaagtacctgtctcgcctcgccaagatctacctcggaaagatctgcgatcccgatcgggtctacgtcacgcccggcacgctcaccggcctccttcgggcacggtgggggctcaactcgatcctctccgacagcaacttcaagaaccgcagcgaccaccgccatcatgcggtcgacgccgtggtgatcggcgtcctcacacgcggcatgatccagcggatcgcgcacgatgccgcccgcgccgaggaccaggatctcgaccgcgtgttccgcgacgtgcccgtgcccttcgaggattttcgtgatcacgtgcgcgagcgggtttcgaccatcacggtcgcagtgaagcccgagcacggcaagggcggggcgctgcacgaggacacctcgtacggcctcgtgcccgacaccgatccgaatgccgcactcggcaatctggtggtgcgcaagccgatccggagcctcacggcgggagaggtggacagggtgcgggatcgcgctctgcgggcccggctcggcgccctcgcggctccgttccgcgacgagagcggcagagtgcgcgatgcgaaagggctcgcgcaggcgctggaagcattcggggccgagaacggcatccggcgcgttcgcatcctcaagccggatgccagcgtcgtgacgatcgccgaccgccggaccggcgttccgtatcgcgccgtcgcccccggcgagaaccatcacgtcgacatcgtgcagatgcgggacgggtcctggcgcggcttcgccgcctcggtcttcgaggtgaaccgacccggctggcgacccgaatgggaggtgaagaagctcggcggcaagctggtcatgcgactgcacaagggcgacatggtggagctgtccgacaaggacggacaacgacgggtcaaggtcgtccagcagatcgagatcagcgccaaccgcgttcgcctgtcgccgcacaacgacggtggcaagctgcaggaccgccatgcggatgccgacgatccgttccgctgggacctcgcgacgattcctctcctgaaggaccgcggatgtgtcgccgtgcgggtcgatccgatcggtgtcgtcacgcttcgacgatcgaacgtctgagacgcgcgtcacacctccctcatctcctttccggcgctcgttcatctcggcacggatcgtgcgagagccatctcgctcacgttgtttggtctcgtttcagaacatcaccgcgtgtcactcgtgccatggaaaggcgggtgtgccgtgctgggacgtatcatcgaggtggagggtgagggccggcgtctctgtctggagcgaggcttcctccggatcacgggtccggcgggtcttctgggcaaaattccgctcgacgacatcgaagccgtcatcctgacgcatccggccgcgagcctgacgacgcaggccgtcgccgccctggccgcgcgaggcacaccactcgtcgtcagtggtcccgacttccgaccggtcgcctttctgctcccgatcgacggtcaccacggccaaggacaccggctcgaggcccaggccgaggcgagccgtccgacccgcaagcgagtttgggccgagatcgtccgcgccaaggtcaccgcgcaggcggacatggtcgagcacgtcggaggggcttcgggcgccattcgcgctctcctcccgcgggtgcgatcgggtgatcccgacaatgtcgaagccctggcctcgcagcgctacttcccggccttcttcgggactggctttcgacgcgaccgaaatgccgccggagccaatgcgctgctgaactacggctacaccgttcttcgcgccgcgaccgctcgcgcgatcgtcgccgcagggctccatccctcgctcgcgcttcatcatcgcagccgaggcgacgcgcttcgcctcgcggacgacgtgatggagccgttccggccgaccgtcgacctcgccgtcaagatgctgctcgacgaaggccgcgaggacctcgaccaaggtgcgaagcgacgattggccggtgtgcttcacgccgacttcgcgacgtcggacggccggacgccgctttcgaacgtgctcgctcggctcgcggtgtcgctggcgcaggtgttcacccgcgaacggcgggggctcgcattccccgagacgctcgttccgcttccgaccgccgaagacgacgggtcggcgaatgaaaccgccgagcatgctgtcggggtatcggatcttgtggatcatggcgctgttcgacctgcccgtactgacgaaggcggaacgcaagcgggccaccaagtttcggcaattcctgctcgacgagggcttcatgatgatgcagctctcctgctatcttcggttcaccgctggcaaggagcaggcggagacgatcaccggcaggatagggcgccacgttccggctcacggaaaggtggatgtggtgtggttcaccgaccgccaatacgccaatatccgcagcttcagggggcgtcacgacggccctcgtccggcccggccggatcagctttcactcttctgagcgatgaaaagcgatgcgacccgcccctgaaagaccagccggtgccggttctggcgcggtgcaaatgcaaaaatccccctgttttcagggggatcttcgcaggcaggtctagcagggaacgcggcgcggcccaaccgcaacggtactgtctccaaagtgatttgcgaccccggtctagcagggaacgcggcgcggcccaaccgcaacaagcgcaccaaggtgcaggcgccggcactggtctagcagggaacgcggcgcggcccaaccgcaacagcgagaaacttgtggatgtgcccgagcatggtctagcagggaacgcggcgcggcccaaccgcaaccggcaccagatgcgtccacctgacggtcgcggtctagcagggaacgcggcgcggcccaaccgcaactgtcgtcgagatgacgcgcaccaagcatgtggtctagcagggaacgcggcgcggcccaaccgcaaccggaccgcataaagcgcaacccgggatgggggtctagcagggaacgcggcgcggcccaaccgcaactcaatccaggtctcgccgaggtggcggaaggtctagcagggaacgcggcgcggcccaaccgcaacctgccgacgaaattccaggaggtcgagctcggtctagcagggaacgcggcgcggcccaaccgcaacgacaaagccaggcagaagcgtcgcgcagtcggtctagcagggaacgcggcgcggcccaaccgcaacggcggcggaagctttgcgatccgcggcccgggtctagcagggaacgcggcgcggcccaaccgcaacctgccgacgatcgttatcacgcgggccggcggtctagcagggaacgcggcgcggcccaaccgcaacgtgccagcgtaaccccggcatgccgatgtcgctgcttgtccggcggccacagaactggtacacaacgcgtcatccgcggtcgaaattccttcgtaagttcaagaaataacaagcaaaatcggcctttcctttcctaggcaccacgtcatcccaaaagctttccaaaaaagctcgatgccgaacgacttccgagcatcgaaggcgttttggccgcccgacgggtgacacgcgggtggtgcacatggtgctcgcagcgggccgtccgtcccggcgctccgaaagctccgatttcctcttcgccaagcgcgcgatcgagcgtgcgatcgagcggatcccgattcccgcgggtccgacagccgaacacccgagacggtgatcggcgggtggtgaacggcggggggtgatcggcgggggtgatcagcggcgacgctcgaccgcgcccggcgggtcggacagcgccgtcactcgccaatacgcacatcgagggcaacggtgtcgctcggcgagccggccaggcgggaacggctggcgccgcgtgatcgcctgctcgcgagtgaaggccggcgtctgcatgcccgaccgggcggcggagctgcagtcccggacggaggtcggccctttcgcgttcccgatgctctgcgcatggggatccgccggcccgcgtccggagccaccccctggcagtcccatcccgtcgaccacggtcgtcctgccgcccagaatcgcatcggtctgggccatcagtgtccgggattgcgcgatcagcttgctggtgtggtcgcgcgtggtgcgcatctcaccgcacgccgcagcgacgcgttgcttgaaatccgtctgaattgcgatcgattcggtcacgagcgcggagaacggtcgtcccatgggtcgctcccgttgtgcaggcgggagcgcaaccggtctctcggccaccggcgcccacatgtggatcgctgccggcgatatgaaacaacctccagcgagcgcgattgttccgcgcgggaacggagtcccggaagatccgccccggaaaacccgccccgagggacgccgggtgtgcgttggcgcggtgacctcacggtctcacggcgaccgcgtcacccggtcgggctgccgtcagggccgagggcggcaggagcgcggtcgccgtggcatgagcccacaccagcagaacgaggccggtgatgatccagagtagcaacgtcctgtcgaacatgacggccccgtgcgttccgaagacgacagaggagaacgccggacggagggtaaaggctccgcctgggatcgtccgatggagctcgccggaccgcgaccgcgcgccggtgtcggcgcctcccccgtccgtgcgccgacaccgccggctggacatccgcatcgcaggccggcatgaacgggccgagccgccgcctgcggccgagcgagacgtcatgccctccgatccgattctcgtcaccggtgctgccggcttcatcggcttccatctgacgcgccggctgctcgccgccggccgtaccgtggtgggggtcgacgacctcaacacctattacgaccccgcgctcaagcgcgaccggttggcggcgctcggcggcggcgcggatttccgcttcgaagcgctcgatctcgccgatcgccctgcggtcgctgccctcttcgctcgcgaaaaatttccggtcgtggtgcatctcgcggcacaagcgggggtgcgccactcgctcgatgcgccgttcgcctatctcgactccaacctcaccggttttctcaccgtgctcgaaggctgccgccacaacggctgcggccatctcctctacgcctcgtcgtcctcggtctatggcgccgacaccgcggtgccgttttcgaccgcgcagcacgtcgaccacccgctcagcctctacggcgcgaccaagaaggcgaacgagctgatggcgcacgcctacgcccatctgttcggcctgccgaccacgggcttgcgcttcttcacggtgtacgggccgtggggccggcccgacatggcgatgtggctgttcacccgggcgatcgcggaaggccggccggtgcggctgttcaacggcggcgacatgcggcgcgacttcacctatgtcgacgacgtggtcgaggcgatggtccggctgatcgaccgggtgccggcgggcgaccccacatggtcgggcgaggcaccggacccggcctccagccgggcgccgttccgggtctacaatatcggcaattccgcgccggtcgcggtgccctacgtggtcgatctgatcgagcgcgcgctcggccgcgaggcgatccgcgagatgctgccgatgcagccgggcgacgtgcacgagacgttcgccgacgtctccgcgctgaccgcggcggtcggcttccggccgaaaacgccgatcgaggagggcgtcgcccgcttcgtcggctggtatcgcgagcgctacggcgtctgacgccggccgcgtcgcggtcgacgtctagcgggacggcgcgtggctcatcccggctcgccggatctttctccggatttttcgcccggctgctcgccgggcttcgaggccgccaccagccatgcggtgaccgcggcgagcccgcgctcgggatcgtcgtcgccgtcggcctcggcaaagacgccgagctggcggtcggccgaggtgccggtcgcgcagatcgtgcggcacgccgcgacctccgccgcgcagccgagcgcgtcggcgtcctccgccaccagctccagcacccggtcgagcagcgccggcaccggcaccagcgcgtcgtcggtctcggtgaccagcgccgccgagaccccccagcgctgggcccgccacttgttctcgagcgccagcgcccggccgaccgccgagatgtcggcattgaccgacgggtcgcgcaccagccggcgcaccagcgcccggtagagcgcggtgagcgcgatcgcgtggtcgagcgaggtgcacacgtcgggcgcccgcagctcgagtgtcggcagcttcgccgagggccgcatcatccaccacacgaagctgccgtcgcggatcacgccggtgcgggtcagcgccgcgacataggcctcgtactcctcggtgcggcgaaacagatgcggcaggccggtgcgcggcatctcgtcgtagagcgcgagccgatagcagcgcagcccggtgcggtggccctgccagaacggcgaggaggtggcgagcgcgacgaacagcggcagatagggcaggagccgcgccatcacctcgacccggcggtcgggatttggcagctcgacatgcacgtgcatgccgcacacgagatcgcgccggccgacgatctgcagctcgcgaatgatggtgtcgtagcgctcgctcggcgtctggcgggcgtcggtccagatcgcggtcgggtgggtgccggcggcgaccggcgcacagccgtgcgcggcggcgatcttcgccaccgtgcggcgcagcccggcgagctcgcggcgggcttccgcgatgtcggtgtgcggccgcgtctgcacctcgatctgcgcctgcagcagctcgtggtcgaccgaatcgccgagcgccgcggtcgccgcctcgtgcaagccctccggcgccttctcgatcaaggcccgcgtctcggcatcgacgagaaagtactcctcctcgatcccgaacctgtaatcgtccgccatgcgctcgcccccactcgcctcgcggatcacgcgttccacgcgcgtctcgcgctcgccgtgccggcggcgccgccggccgcccgaacaacagctcgaacggccggagcatcttccgtgttcctcaatgcgacatcagcaccggcacggtcatcgccgcgagcatgccacgggtggcgccgccgagcacgaactcgcgcaaccgcgaatggccgtagccgcccatcacgatcatgtcggcggagacgtcggcggcataggacagaagggtgctcggcacgtcgacgtcgtcggcgacgatccgcttcacctccaccttgatgccgtggcgggcgagatggcggccgagatcggcgcccggcacctcgtcgctgcgggtgcggccggtggcgaccatcaccacgtcgaccttgcgggcgagccgcaggaacggcagggcgtcggcgaccgcgcgcgccgcgggcttgctgccgtcccagcagaccatcacgtggtcgagcgtcaggccctgcttctggatgtagggcacgatcacgatcggtcggccggactcgaacagcgccgcctcggtgaacatgtcgatcggcgacacccggtcgggctcgcgctggccgaccaccgcgaggtcgaaccgccgggcgagccggccgaacatttccgtcgcgccgccgagcgtcgcctcgacgatgcggtgctcgcagccgaccccggccgcggtcgccgcctgctcgaaccgctccgccgcgcttttggcgagcgcctggctctcgcggcgctgcgcgtcgatccagtcggtcgagacgccgtccatcacgctcggcgcgaccaccggatcgtagacgaacacgacgccggtgagatgcgcctcgaaccgctgggcgatcgaggccgcgaacggaaccgcgggatcgtgatcgggaacgagcgccagattgacgatgatgtccttgatcatggtggaactcccgtagggcgcggtccccgcgggagggaccgcctccgacttgcgagggtaggggcgggaccgggtcgcgtcttgaccggcgtcaaagcctcgcacgacggccggttccggcgccagtggcctcgcgcgggggcgcatggaatccgtcttatcgggaccgatccggcgcgctaccatgacgtcacgagagcccggcagaaggctccgtggaaacgacaggaggaagcccatgagcgtggccatgccgccgctcgacgcgggcgtgctcgcccgtcgcgacgagatcgtcgccgcactgcgcgcgatcgtgccgggcgagggcgtgatcgccacctcgcgcgagatgcgcccctacgagtccgacgggctgaccgcctatcgccagctcccgctggtcgtcgtgctgccctcgaccaccgagcaggtgtcgcgggtcttgcgctattgccaccaggccggcgtcaaggtggtgccgcgcggggcgggcacgtcgctgtcgggcggcgcgctgccggtcggcgacggcgtgctgctcggcatgggcaagttcaaccgcatccgcgcgatcgactacgagaaccgcctcgcggtggtcgagccgggggtcaccaatctggcgatcacccgcgcagtggaaaaatccggcttctattatgcccccgacccctcctcgcagatcgcctgcaccatcggcggcaacatcgccgagaacgccggcggcgtgcactgcctgaaatacggcctcaccaccaacaacgtgctcggctgtgagatggtgctgccggacggcgacgtgatccggctcggcggcggccatctcgatgccggcggctacgaccttctcggcgtcgtcaccggctccgaggggcttttgggggtcgtcaccgaggtgacggtgcgcatcctgccgaagcccgagaccgcccgcgcgctgctgatcggcttcgacaccgcggaggccgccggcgactgcgtggcgaagatcatcggcgccggcatcatccccggcggcatggagatgatggaccgcatgaccaccgccgcggtcgaggatttcgtccatgccggctatccgctcgacgtcgaggcgatcctgatcgtcgagctcgacgggccgtcggccgaggtcgaccatctgatcgagcgggtgtcggagatcgcgcgcgggtgcggggcgcgaaatttgcgggcctcgacctcggaggccgagcggctgctgttctgggccggccgcaaggcggcgttctcggcggtcggccgcatctcgcccgactattactgcatggacggcaccatcccgcgggcgaagctcgccactgtgctgcaccgcacccgcgagctgtcggaacactacgggctgcgctgcggcaatgtgtttcacgccggtgacggcaatctgcacccgctgattctctacgacgccaacgaccccgaccagctcgcccgtgccgaggcgttcggcgccgatattctgagactgtgcgtggaggtcggcggcgtgctgaccggcgagcacggggtcggcgtcgagaagcgcgacctgatgccgtcgatgttctccgagctcgatctcgagcagcagcgtcgcctcaagcgcgccttcgacggcaaggagcttctgaaccccggaaaggtgttcccgctgctctccagctgcgccgagcagggccgcatgcacgtctccggcggccagaccgcctttcccgacatcccgcggttctgaatgggccacaccccgatcgagcgtgccccgatctccgctcgttcccgcgaaggcgggaacccagaggatctcgccgcggggctcctgggtccccgctttcgcggggacgagcggagtgtggtgcgatgcgctcccgtttcgacgacccgccgagcaaatccgattccgacgatcgatcgggcaagggatccgtccacatgacgcacacgctcgcgccgaaaaatgccggagaggtcgaggaggccgtgcgctgggcgcacggcgagaagaagacgctcgcggtgatcgggacgggctccaagcgcgcactcggccggccgtcgcaggtcgacgccacgctcgatctctcggggctttgcggcgtcaccctctacgagccgaacgagctggtgctgtcggccagatccggcacgccgatcgccgagatcgcgcggctcgtcgccgacaacggccagcagctcgccttcgagcccgcggacctctcggcgctgctcggtggcgcgccgggcaccgggacattgggcggcgtgctggcggtcaatctctccgggtcccgccggatcgtgtcgggcgccgcgcgcgaccattttctcggcttctccgcggtgtcggggcgcggcgagaccttcaagtcgggcggccgggtggtgaagaacgtcaccggctacgacctctccaagctgatggccggctcgttcggcacgctcgcggtgacgaccgacgtcaccatcaaggtgttgccgcgtcccgagaccgaggcgaccatcctggtgctcgggctcgatccggcgagcgcggtggcggcgatagcggcagcgttgggctcgcccttcgaggtgtcgggtgccgcgcatttgccgggaccggtggcggcgcgcaccgacggcgtgctgccggccggacactcggtcaccgcgctgcggctcgaaggcgtggcgccctcggtcgcgcatcgcaaggcgatgctgctgcggctcctggacagccgcggctcgctcggcgagctcgacgcggcggcctccgcgacgctgtggcggacggtgcgcgacgtgacgccgttcgccgccccgcccggcggggccgacgccgcgcggccggtgtggcgcatctccaccgtgccctcgcgtggcccggagattgccgacatcgtcgccgcgcgcaccgacgcggactttctgttcgactgggcgggcggcctcgtctgggcctcgctcgcgcccgccgacgacgccggcgcggcgatcgtgcgggcggcgaccgcgagctgcaccggccacgcgaccctgatccgggcaccggcggcggtgcgtgcggcggtttcggtgttcgagccgcagccggccccgctcgccgcgctgacgaagcgggtgaaggagagcttcgacccggcccgc

SEQ ID NO: 3254 - DNA, 9963 bp, synthetic construct
  source 1..9963: mol_type = other DNA
  misc_feature 1..9963: note = Synthetic
gtaagctcggaaaaggctctagtcatcattggacacgggagcgagacagaggcgctcacgagattggctatcgcgtttggcgctgttgtcgaagtgctcacacccgatcgcgtgatcgcggcggcatgcattcggcaaggcgcacgggccaggcatctccacagcccatccggttcatccgatctgacgggtgatcgtcataccgctatcgtcatgttgttccacgaccatgactgggagcccgagctgctcgttcaggcactgaactctcgcgcgttttacatcggcgccattggtagccgacagactcacaagcgccgtctggcgtcgctgcgcgaatatggcgttgccgacgagttgagcagccgcatcgttggacccatcggtctcctgccttccacgcgcgatccggagacgcttgcgctgtcgatcctgagcgagatcgtgagcatttacaggttatctctcgacgaagccgccgaggcgacgtcaggagaaggcgagcacgcatcgcagctagccccccaacaatcgccaatgaaccgaggatcagcgcaggcgcattgcataactgaaatccaccgtgaggtggcacgcgcaccgcgatacttcgtacaggttattttcaatgagctggagccttcagcacgcaccaccgtgcatgaccagatcgcgacatcaggtacattacgtattctcgattctgccaggtatcttctccgttctgttggatcgcgccggccacttcgcgagcgtctgttaactcggggttcaatgcggacaagtattcttccagccgtccgcgctcactttctgtcaggcacggtagggaaactttcgcgacccttgccaacgacaaccaatggacgcctgcccagcctgcctcgccaagatccgagaaactcaacagagcgattaaatcagatgcgagcgcaccgcgcgcttgccgcgatagtctccaagtgtaagtgccggaagaaaacatgaagcgaagggtcaaacgtttttagtatggtacgggctgtctccggctcactcgcggccaacgcacacagcgattttcggtgcagcgccagaagcgcatcggcgccgtagacttcacctgctcgtggatggcgatcgaacgtatagtcccgctccccctcggcttcctttgcgacaataatggaaaaaagaggccaccaacgcgcggccagatctctcaagaaaggcctttggcgaggctttagccagattgctgagccaatgattggctatgtccggaacgacatctcgttcaaacggatgccgaccaggattggacttaaactaggcatcaaataacgtgcgcaggatcgagccgctgacctcacgacgctcaccgacttggataggaacatgctgttcctgcccaacgggttccagctgggctctaaggggtctcgcgaactacctgttcgaacaacttctcgatcgccccatcccccggtgatttggagacgaacctaaaccactggaggagtgcgtggcccttagtagcgtcacctgcccaccaccgcctaaggagcaccgcgatctcgtttggtcgcacggccaccgatcgatcgagccaccggagcaccgcttcgcggcgttgttccatcgcacattcgagctcgcgatctatccatccggacgcagcaaggtatatcgaaccagcccgacgaacccaacagggcatcgcgcacgacgagcggaaattcctcgctgagatcgtcaagaccatcgagaatgcgaagctcgtcaggtgtaggatcgctaagggtcccaagccagagcgccacgacgttcttgatgtgaaagcggatcgtgccactttccatcacgtcggccagctccgttaggtaccgcggccagtcggcttgccgcatcgcctcgaggatctgtcgggtctgtgttctgcggaagaggtgctgctcggtcgacatcaacagttcatgcaacgattgctgctgatggacgaacgggcgaaaagaaaatcgaagaagctctcgtggaaaaggttcagcttgtctcgcacattgacgatgaggtgttcagataccaatacgtcggtcgctccacgatatccatcgagtacgcttgcgggggcatcaagccgctatcggtcgctcatccatcgagccagctccacaagcgcggccgaaactgtccaccctaaggtccgttcttgagcgactgatttttctttcttccttagaagacgctgcaataggtcggtgcggcttctgaacgactggtcgccatcttcactctctaaaaagagtgcgagattgaggggcaagcacagcagttccttctgtcctgtcgttaagagcgtagttgtcactccgcggcatgtaagaaacggctcgacctcactcgcccaatcgagcagaggtatgttgacctctcttacctgcgccgcctgcttccaagtcttgagccgggcatcattatcgagatcaaggtccggcaaacgaggagtactcggacgatctttagattatgggcctcatcgagaagacgcagcacactctcccgcacggcaccattccggcccgacacctcgctgattgcgtcgacctgatcaataaccagaacgctcatcctaccgggtgccagccgagccagcgtccatgccgggctctcggctcgcccgatgagagcaatccccagctccttagaggtgcgacacgcaagatgctggtctacacggagcgccagcgcgggaatgccgcgctgctcaagcttgtcaatgaccccgcgcaccacaccggacttgccgctccccgcaacgccggtcagcagcacaatcgttgggccttccaattccgataacatctcgtgaacgacagtcgtctgcgttctgccgatcgtgcaaccgccggcgccgaacgggatgtacgtctttagataatcaatcgtctccttcttgatgcgctccaggatagtcggatccatcacctccggcttcaccttgagatcggtacgttcgccacccaagcagatgagaacaaggaccggctcagccggatgccccaagcccacaaggacgccgatgcggccattgtccggctcctcggccttgtggaaaagggcctgatggaggccgaggatccgaacctcaaggaacgtcttgtcggcctcaaggtgcaacgcgatgagctggcccaggacattgccgacctgcagaaacagatcaccagcggcgagccggccatcactcccgacaagatcgagaggtttgccgccctcctcctccgggatcacctccacaatggatcgccagagctacggcaggattgtgctcggttggaggcgtcgcgccctcggctactgacggtgcatcaacggcagcataggtggcagccctactgtctccgtcggttggcgagcgcggcgaaatcgctgtcggcccggctgttcgcggcgcggctcgacttggctcgcgcgctggacgggaaaataggcggcgcaagcggtttctccgtcggcgagcaggaaggatatgacagcggaagctcggacaacgagccgccgaccgaggacgacgttcgcgcggacgcgctgaagacccttcaggatatcgtcggcggcatgagcctggacaatttcatcgtgcgtcggcgtcgtcgcgtcgtagagaaatacggcaagccggaggcctgggcgaagctcgacgacgaggcccgtgaagagttggtcgaggaggtcgctccgctgtcggcgacgggactggggacggaagaggccaaacgcttcgacctcttgatgctgtcgctcgaattggcgcttctgaaaggatccaagcggttcgacaagctcaagaagcaactgatcgagattgcatcggcggcattccggcaatcgcccatcaggccgcgccaaccgaagacattcagaccgagccgtggtggcaaggcgtaaccgtatcgatccctgaattttatccgccgccgactgcgcaacctcgtccagcacatcgagaagacgaagaagagcattgtctattcgaacttcgccgacgagattggagagggtgttgctcacgaactgccgcaagtcggcgaagcagatttcgccagattcaaagcaaaggcccgccatttcctgaaggtgcacgatgaccatatcgtgcttcataagctgcggcaggcaaagcccttgacgccgagcgacctgaacgagctggaaaaaatgctgctcgacgctggcatcggctgcccagcagacatcgtgcgggcgggcgctgcccgtcaaggatttggacgctttgtgcggtccctcgttggcctcgatcgcgcgactgcccaggaagttttcggcgagtttttgacgtccggaaccgcatcggttgcgcaaatcgagttcgtcaacatggtggtcgaacacctcacggaccaggggatgctcgcgcccgacctactttacgagccgccgtttaccgacatgccccgatcgggccagaacagatgttcggcgagctgcatacagagcgtcttttcaggctgattcatgatctgaacgaaagcgcagccgcgtaggatttcggacgtgatctatgaaacttgattcgaaaccgagtgtcccagtcggcccgcgcggcgcagcgaatatcacaggccaatgctggtccagaaaggcgaggcatgacttaattaaaaaggcggaccggagcccgcctttgatttcgtgggatgaacccttgttaccggagggaccacgccgcgatctctgctagaatgccccatggttagcacgcatactgagcccgggcaagagaccgcgctccgcgatggggggaatgattttatgacaagttgcattccgctccgattcgccttcgatctcgggacgaactcgatcggctgggccgtctatcgcatcacccattttcctgatccgaatttggcgccgcccaccgttgccgaactcatcgcgtgcggcgtgcgcatcttcaatgacggccgcaatcccaaggacggcaagtcgctggccgagatgcggcgcgtgccgcgcgcggcgcggcggcggcgcgatcgctatctccagcgccggaccgatctgattgcactccttgtcgaccttgggctcttgccggtggacgagaaggagcgccgcgcacttgtcacactcgatccctatcggctccgcgccctggggctggatcagccgttgacgccgttcgaactgggacgtgcgctattccatttgaaccagcgccgcggcttcaaatctaaccggcgcgtggaccgcagatccgacgaaaagggcaagatcgaaaccgcagccggcctgctccgtggcgcactgaaatcggagaacgcgcgcacgttcggcgaattcctgtggcggcgccatggcggccccgacggcaaggccacgcctggcacccgcaaagccgtccgtatccgcctcgagggcgaaggcgccaaggcgctttatcattactaccctctgcgtgagatgctggagcacgagttcgacacgctcatgggcaggcagcgtgcgcaccatcccggcatcctgaccgacgacgcgatttcccggatcaggcacacgatcttctggcaacggccgttgaggccggtcgagcgcgggcgctgcacgctcgtgccggaggaggagcgcctgccaaaggccttgccgtcggtcgaggagcgcacgatctacgagacgctcaatcatctccgttacggcgaaggtctcctacgcgacaaagccttgaccaaggctgaacgcgatctcgtcgcccaaccgctgctgcaaggcaaaagcaagcgccacgtcaccttcgacacgatccgcgctgcgctcaagcttaactccgacgtccggttcaatcgcgaggacagcggccgcagcgacctctacgactgccgctcccagtcggccgagaagcttgccgccaaggatcgcttcgggccgcgctggtatgtgctgcccctcgccgagcgggacgccatcgtcacgcgcctgatcgacgaggacgacgaggagcaggtggcgtcatggctcatggcggaccatgggctcgacgaggacgccgcgcggcgcgtggcaaactggtcgccgcgcgagggcgtgtcccgcctcggtcggacggcaaacgccgcggttctcgaagagctgaaaaaggatgtcatcgcatatagcgacgcggtgcaatttgctggcaaagctcttggcgtgacttggcaccactccgacttccgcgatggcgttatcgagatcccccttccctactacgggcagattctcgaacgccaggtctcgttcggtagcggcaagccggaggacaacgccgaaaagcgttacggccgcgtcgccaatccgacggcgcacatcggtctcgggcagctccggcgcgtcaccaacaagctgatcaaggcgtacggcccgccggcgcagattgtggtcgagttggcgcgcgcgctgaagctaacaaaagagcagaaggacaaggagcagcgcgagaacgccagaaacaagacggagaacgatcgccgccgcgctatcctggaagagcaaggacaagcggatacgggtgagaaccgcctgcgcttgcggctattcgaggagcagcagcgcgcgaacggcggcgtggccctctgtccgtactcactgaagccgatcggcatcgaggcgctgttctcggctgagatcgagatcgatcacatcctgccttactcgcgcacactcgacgacacgaaggccaaccgcatcctctgctaccgcgccgctaaccgacacaagcgccgcgaaacaccatacgaagcgttcggcggcgcgcacaaagcctttcccgaacagccagactggaccgacattgccaccgcagccgcaggtctccccgcaaacaagcgctggcgcttcgcaccggacgcgatggagcgctaccagaacaaggagcgcgacttcctcgcacgccagatcaacgagacacgccatctctcgaggcttgcgcgattctatctcggcgcggcgaccggcagcacagatcacgtctacgtcacgacggggcagctcacggccatgctgcgcgcccgctgggggctgaacgccatcctcggcgacgagaaccgcaagatgcgggccgatcatcgacaccatgccatcgacgccatcaccatcggggccatcgaccgctcgctgctacaggatattgcccggcgcgccggcgcgcgcgaggagcaggatcttgcgcgcacgacagcagacgttccggatccattccaaaatttccgggagatcgcgcgcgagaaggtccgcgcggtggtcgtctccgtgaaggccgaccacggcaagggcggcgccttgcacgaggatacggcttatggcctcgtgaccaatcctgccgaagcggccgaaatcggcaatctcgtattccgcaagccgctcgtcgcgctcaacgcaaacgagatcgacagcgtacgcgatcctcatctccgcagcgagcttcaggctctcgcggcaccttaccgtagcgacaagggtaagctcacggacgagaagggtctcaaggcggcgctcgccgccttccgcgtgaaaacatcccacaacggcaacgaagtcgagcgacaggttcggcgcgtgcgcatcggtaagacgaaggccggcgaggttcatatccgcgaccggtgcacgggcgcggtctacaaggcgctgctccctggcgacaaccaccacatcgacatcgtgcagatgcgcgacggcacgtggcgggggtttgcggcgaccgtgttcgacgtcaatcagccgggctggcggccgctgtgggagcgcgagcggctcggcggcaagctcgtcatgcgcgtgcacaaaggcgacatgatcgaggtcgacgacgcggacggccagcgcagcatcaagaccgtgcaccgcctgtcgccaagcaacaatgtgctctatctcgcgtcccacaatgaaggcggcgaactcggcaagcgccacgacgacaaggaggatctcttccgctgggacttcgcgaacatcggcgggctgaagaagcgcaatgcccgcaaggtgcacgtagacgagatcggcattcgtagcctcacacgctccaacgccgattgaccgaaggccgaatcggcacgagcttagtcgaaattccctacccaatggtctggaaaatgatcctgtatccaattggaacgatgtgtcggactggcgaccgctgtccgcgcgatggtcactggcaagccgttggccatggtaattcgcttatgctcattttttgcggcgacaggtttcctctctttgccggaagctttgtggattgggaacttgtcgccacatagtaacaattcgagcggccaacctattggtgttctttttctcaagccgtgcaagagaataccgttgggtgttccggtcggactgcagcgatcgctgctagaaccggggagcggatccccgaccgcggccggggtcccatcgctccggccgcattcccttgtgccgattaaccccgcttcccacgagatgtagcgctttcgccggaagatcgctttcctctgcgctcggacatcggatgcaggggatctgtcatgcttgggcgcatcgtcgagatttctggtgagggccggcgcctgacgctcgaacgcggcttcctcaacatctccggcccggacggcctgctcggtcagattccacttgacgacatcgaggccgtgatcgctgcgagccccgccgtcacctacacgaaccaggccctggccgcgctggcggctcgcaacgcgcccgtggtcatttgcggaacgaacttcacgcccgcggcctgcctcgtccccgtcaacgggcaccatgcccagggcgaccgcatcgaagcccaggccgaggcgacgaagcccagcaagaagcggctgtggtctgagatcgttcgcgcgaagctgcgtgcgcaggcggcggcgctggagcgcgcgggcggaaacccgctgatcgtccgctcgctcgtggcgcgcgtgcgctccggcgatcccgacaacatcgaggctcaagccgcgcaacgctacctgccggctctcttcggcaaagggttcattcgcgagcgggatgcggccggtctgaatgccttcctcaactacggctacaccgtcgtccgcgctgcgaccgcccggtccatcgtcgcgagcgggcttcatccctcgcttggcctgcatcacaagagcaagggcgacgggctgaagctggccgatgacctcatggagccattccgtccagccgtcgatctcattgctctggatctggccagcgagggtgtcgtcactctcgagaccgccgcgaagcgccggctcgccgccgtcctgcatgcggactatgaaaccgacgaaggcgttacgacgctgtcgaatgcgctgagccgtctcacgcaatctctcgcgcagatctatctgggacagcgtcgccgcctgcggctcccgcgctccgatattcctctgcctccaagtgaggggcctcgtatgtcgggagacgaggcggccgaatgacattccgtagtttgtctgggtatcgcatcgtgtgggtcatggccctgttcgatttgccggttttgacgccggaggagcgcaaacgcgcgacaaaattccgagaaagcctgctcgaccaagggttctgcatgatgcagttttcctgctatctaaagtttacggcgggtaaagagcaggccgaggcattggcgagcaaaatcggcgccactgtcccctctggaggcaaggttgatgtgttgttcttcacagatcgccaatatgaggccatcagatcgtttcgaggcacgggtcaacgcggccgccccgaaaagcccaaccagcttcagctcttttgaagcgattcgagcgcctgaaatgagcgaagctcgacacatccaggcgtgtcggctgccgttttcttcaatgcgaaacgtgaaaaaggcctctggctcccaatgggttgccagaggcccgttctagcagagatcgccac

SEQ ID NO: 3255 - DNA, 8664 bp, synthetic construct
  source 1..8664: mol_type = other DNA
  misc_feature 1..8664: note = Synthetic
agccctcaagggtaatctcatcaggggagattgtctcaagttcattggcacggagggaaattcgttgcgatcatgcgggacgaatttccctgaaccggccgggaggaacatcgcatgcgcgctctggcgtggaccaccgtcgccctgatcgcgctcgtcgtgcccgcccgtgccgacccgcgcctcgaaatcgagaaccgcgcggcgtgcatcatccacgaaggtgcggaccttcccgtcggcgtcaagctgcagccggccgtgccaggcgagccgaactgcgacccgcgcgtgctcgatggcaatccctgtcctgcactcgaccccggtacggcggacgaagcactgtgcctgaagaccgagctcggctattgggagggcgtgctcgaccgcgtcacggacaagcgcctcggcgcggaacggcgccccggccaaagggcggccatcgcctcggtcgtcaaatcgttccgcgcctatcgccagacctattgtgcgagcctcaagctgatcacggtgaacccgcccgacagtcgcaattttccgcttgagtgcgccctgcgcgagacgatccgcttcgccagggatgatctctatcccgcgatctattcgccctgactttgagcgcgtcgtccgggtcacgactttcgtcgcgccgtgctgacattcgcccgcagaggccctatttcatgtgcaagcaaaatcagatggcggccgcacatccatgaccgacgacaccgcttccgagccgactcctgcgcgtccgcgcttcgaggacctgccgcccgccgcccagcgcgccttgaaggaagccgaggagcgccgcaagcaggcggtcgaggcgacgcgcccgcgggaactccaggggcgcggcggtccggagccggtgcgctacggcgactgggagatcaagggcatcgccagcgatttctgatcgccggcttgcccgtcccgcttcggcctcaggcggtcttcatcagcgccgcgcaggcctcggcgaaatcggtcggttccggcaggccgcggcggcgcgcggcggcggtcagcgtattggccaagagcgatgcgatcgtcatcggcccgacgccgcccggtaccggcgtgacatgcgcggcgaccgccatcgcctcgtcgaaccgcacatcgccgaccagcttggtcttgccctcgcccttttccggcgcctgcacgcgattgatgccgacgtcgatcaccgtggcaccgggcttgatccagtcgccgcggatcatttccggccgccccaccgcggcgatcaggatatcggcgcggcggcagacgccagcgaggtcgcgagtgcgcgaatgggcgatggtgacggtgcagtcggcggcgagcagcaattgcgcgatcggcttgccgacgatgttcgatcggccgaccaccaccgcttcaagccccgcgagcgatccgagcgtcgccttcagcagcagcatcgagccccagggcgtgcaggggaccaggctcgactgtcccgtcgccagccggccggcattgacgacatggaagccgtcgacgtccttgtccggcgagatcgcgtcgagcaccttgttggtatcgatgtgcttcggcagcggcaattgcaccagaatgccgtcgacggcatcgtcctcgttcaactgccggacgatcgccagcaattcggtttccgacgcatctgctggcagcctgtgctcgaaggagttcatgccggccgccaccgtttcgcggcccttggaggcgacatagacgcgggaggcgggatcgtcgccgaccaggacgaccgcgaggccgggtgtgaacccgtgcgccgccttgaggctggccgtcgactgcgccaccgctttgccgagcgccgcggcgaaggccttcccatcgatgatgctggcgatcatggcggtctccttgcggtggtgtggtgcggatcgggccgggcccgaggcatccgtttagagggccgcgccaggctggggaagcgcgcgcattgtctcaggggcgatcggcagcgctcacccccgccggcctgcacctcaaacagccccgggcgctgcgggcaggcggcgggcgatctcggctgcgtcaccctttatttcgatgatcttcagcctggacgtcgctcccgcaacgacgctgacgcgcgagcgcgcgacatctgcagcggtggcgatcagcgcttccagcgccgcattggccttgccgtcctcgggaaccgcgcgcacccgcgccgcgagcaccacgcttccgtcagccagacgctcctgcgcatcaagcgcgtcgcgcgacgatttcggcgtcagccggacgcggaggcgaaccccgcccggcaccactgtgagcgcattcgccggcgcttcgagcttggttccgggcgtcggccgccggctcacgggacatagcgccagacgtaatcgccgaggtagcgttgcagcagatagatgatcagcaacaggatgaagggtgaaaaatcgatgccgccgagcgctggcaccacttgccggatccgccggtagaccggctctgtcaagtcataggtgacgcgccagatcatgcggaccagatcattgcgggtattgatgacgttgaagttgatcagccaggacaggacgacgctggccatcaccacgaaccagtagaaattcaggatgatctgcaggacttcgatgatcggtcgcatggggagaacccttttcgagccaggccggcacgtagcgccaacatgtatatagcgatgaacggcttgccaagggcatgattgcggcggctgcctcgcgcaacgggcgccggataggggccgcgcgagccgcccagaggcggcggcaggccgatcggtttcaccggttgccggggagcgtggacggcccgatcgccgcatccgggaagatcgccaggcacagccggctggaacgagacgcgatgagcggccgagcctcgaaacccggcttgacaggcatggcccgcacctcgtaaatggcggctctcggctcgggcgccaccatcggccccaggcatttcggcggttggaaacgactgccgcggggctgtagctcagatgggagagcgctgcaatcgcactgcagaggtcaggggttcgattcccctcagctccaccaattcttttcagaagacgaaaattgattacttatcagtaccttagttttggggcgagctgtgcttcgtacctaaattcgtacccataactcgtacccagctttgaacgctcgacatcaccaatttgcgtgaaggccaaccagttgccgccacgttcgggtgaccacgcagcccccctcaaaggcattgagagaatcaaaaagggcagaccggagcctgccctcatctggtggtgtgaaaccttgttaacggagaggccacaccgctttctctgctagaacaacgcaatcagatacccgggcttgtgcaaagtcaattcgatatttagggttgggatagatcaactagacgaccaatgcggagcggaaatgggcacccgattttccttcgacatcggcaccaactccatcggctgggcagtttggcagaccggtgacggccaatatggacctgatacctcgctggagctcacggcctcgggtgtctcaatcttcaaggatggccgcaacccgaaggatcagaagtcacttgcggaaatgcgccgtgtgccgcgcggccagagaaagcgtcgtgaccgcttttcgttgcgccgggcagatcttgtcaaagcacttcgggacacgggactattcccaccgtcagagggtgagacaaaagcgcttgtggcgctcgacccctatgaaattcgaaatcggggcttgtcggagcgcctgacactgtcggaattggggcgggcgatcttccacctcaaccagcgccggggcttcagatcgaaccgcaaggcagaccgcaaagatgcggaaaagggcaagatcgctcaggcgacaaaggctctagcggcacagtttgcccaatccgacgtcaagacctatggcggcttcctttggactttgcacaagggcccggtgcgaagccgcaaagggacgcgtatccggatggaaggcgaaggcgccaaggcgctctacgtattctatccgacgcgagcgatgatcaggcatgaatttgacgaactctggcaacggcaggcggtgtttgagccggagcgtctgacggacgcggcaaaagtccagattgcaagcatactgtttcggcagcgtgacctgaagccgccgaaagttggcaaatgcacgtttgtgcccgaagagacgcgcatccccaaggccttgccatctgtggaagcacgggagctctacgagagattgaaccatcttcggctcaacgatcggccactgtcgcgacgcgaccgcgatctattggcgaccaaactgctggccggtgacaatttgacattcgctcagctgcgtaaggccctgaagctcggcggcggagtccgcatcaactacgaggagattgaagagaagggcatcaagggggccgacacggcattccgtttgaacagaccggatcattttggtcccaaatggcggtcactctcgtgggacgaaaaggatgccttcgtccgccatcttctcgatgagccggatgaagacagattggtgggccagttgcaggcagactatggcctgtccgaggctgcagcacgcaactgcgccaacatcggcctcccagatggctattcccgtcttgggccgactgccaatcgcgccatcttggaaaaccttatcgatgaagaggacaaggacggtcacgtcattccctattcggaggctgtgaaacgggcgggatggcaccattcggacgaacgcgacggggtcatcttcgaccaattgccctattacgccagagtcttggagcgacatgtcatgccgggctccaacgaccccgatgaaccagacgaggccaagcgctgggggcgcattaccaacccgactgtccacatcgggctaaatcagctgcggcggatcgtgaatgccctggtgacccagttcggccatcccgaccagatcatcgtggagctggcccgcgaactgaaactgaatgccaaggaacaggacaagcaggagaaagaaaaccggcagaacagggagaagaacgacaagcgggcgatattgctcggagagcagggtttggccgtcaatcgtgaaaatctcatgcggctcagactcttcgaggaacagcagcaggccaataacggtgttgcgcaatgtccctattccgggcgatcgatcaatgtcgaggcgctgttctccgatgcggtagaaatcgatcacatcctgccgatatcccgcacactcgatgacggcatgggcaacaagatactctgctttcgagaggcaaaccgggcaaagcgccagcagactccattcgaggccttcagcgatacgccgcaatggcccgatattctcgcccgtggccagtccttgcggcgaaaaggttggcgtttccgtgccgatgcgatggaaacattttccggcgaaaaagattttctccaacggcagctgaacgaaaccaagtacctctcgcgcattgcgaaaatctatctcggcaagatctgccatcccgatcaggtctatgtgacgccaggccggcttgtcggccttctgcgcggcaagtgggggctgcacagcattctcggcgatgacaaccgcaagaaccgggatgaccaccgtcatcatgccatcgacgcaatcgtcatcggatcgctgacgcgcggcctcatcaattatatttcgcacgaggccgggcgaatggaagcggaggacctcgaccgcgtcttcggaaccatcccctacccggttgcagacttccgcgaccaggtccggcattccgtcgaggcgatcaccgtgcggcataagccagagcacggcaagcaaggtgccctacatgaagataccgcctatgggctcatcaccgacgaggccgaagcgcgtatgattggtaatctcgtcatgcgcaagccactgaaggggctgaccgacggggaaatcgaccgtatccgaaatccggatatccgcgcggacctgcagcggctgaaggcgccgcttatggacggtaagggaaaagtgaaggacgccaaggcacttgcggcaatcctcgaagcctacgggcaggaacatggcatccgacgcatccgtatcggcaagttcgacagcagcgttgtgaagatcaacgacaggcagaccggcaaaccttacaaggcagtagcaccgggcgagaaccaccatgtcgacattgtgcagatgcgtgacggtacatggcagggctttgctgcaaccgtgttcgaagtcaaccagaggggctacaggcccgaatgggagcagcagaagcttggcggcaaactcgtcatgcggctgcacaagggcgacatggtggaattgcgggatgaccgcaccggtcggcggatggtgaaggtggtccagcgcatcgagattagcgccaaccgtattcgtcttgctgcccacaacgagggcggcaaattgcaagaccgccatgttgacagcgatgattcgtttcaatgggactttgcaaatatcccgaagctgaaggaacgcggctgcgtggcggtgttttgcgatccttctgggcaggtgagggcgaaaaagagcaatgtcgcgctgtaaaataccgagcgatctgccggcgcagcattgtgcgtcaacgctcaaactgctatctgtttcctcaccgctccacttagtcgcagcggcagaaaggatagcttatgaaacagccaatcggtacgcgctctcgcacgggggacgtgtgcccggagtccgggatttggcgatctgagggacatccgagcacaacggcccccattgcaaagggcaaccgaatgccaccttacggcggcgtagcggtcacttggattttgatccaatacgcttgacgctgcaatagctgcagcaaattcatcggaccacgatttacgcctgcgcgtatcgaatggagcggtgagttgcggtagggccaccgagttccctgctagaacagcgattctccgtccggtttcaaccgggcggaggatttcttcatgaaagtttcacgcttttcctcaatcagaaatttaaaatttcgagttacacattagagagtcatccacttgcgcgggtattccgatgctcggacggatcgttgaaattgaaggcgaaggccgtcgcttgtccctccatcgcggctttctcgaaattgccggaccggacggacggctcgggcaagttccccttgacgacattgaagcggtcatcttgtccaatcccgccgccagtttcacctcccaggttgtagctgcacttgcccagcgtggtgtgccctttgtgatctgtggaccggattttcgccccgtcgcctatctgctgccgatcgacggacatcatgcgcaaggtaaccgcatggaggcgcaggccgaagtcagcttgccgacccgcaaacgtctttgggcagagattgtcaaagtcaagatcgccgcccagggggctgcgcttgaacgctgcggcgtcaatgatggaccagtgtcctgtcttgtgagcagagttcgctctggcgacgccgacaatttggaagcccaggcagctcagcggtattttccactccttttcggcccagacttcaaccgcacgcgcgaagctggcgggatcaatggactgctgaactacggctacacggttctcagggccgcgaccgcgcgggccgtagttgcggctggattgaatccgtctctggccctgttccatcgaagtcgcggcgattcccttcggcttgctgatgatctgatggagcctttccgcccttcagtcgatctgatcgcgttcgaatacgcgcgaagccacggcggagaactcgacaccggtgccaagcgacggctcgcgggtgtccttcacgccgacttcgagacgtcggaaggcgtcacgccactgtcgaatgtattggcacgcttggctacgagtttggcccaaatttttctgaacgaacgcaagtctctcaatctccctatcaagcttgttcccatattggaaaacgactctcatcagatggaaggcaattgaacatagaaggtaaggttatgggacggggaaacagtcagctctcggggtatcgcatcttgtggatcatggctctcttcgacctccccgttatgacgaaacccgagcgcaagcgtgcgactgcattccggagtttcctcctcgacgaaggattttccatgatgcagttttcctgctacgtccgctttaccgcaggcaaggaacaggccgacgctatcacccgccgaataggcaggaccgtgcccaaggatggcaaagttgaggtgctctgcttcaccgacacccaatacggcaacatcaaatcgtttcgcgggaaccgaacggagccgaggccgcaaaagcctgatcaattgaccttgttttgatcgcgcacgaattaacctcccgaaaaccgttcaaaccaacgctcaattgacgcaagccccggatattttctcattcgcaacagcaaaaagccccttgaaaacaataagttctcaaggggcggttctagcagagaaagcggcgtggccctaccgcaacctaccagacactggccctgtcgcgaacctgagttctagcagagaaagcggcgtggccctaccgcaacccgtctgcggtcgtcgaacaccgcgttgaa

SEQ ID NO: 3256 - DNA, 8225 bp, synthetic construct
  source 1..8225: mol_type = other DNA
  misc_feature 1..8225: note = Synthetic
gaaatctcaacggccacaaaccccagcacgtcatccgtggcgcgcgtgtgcacgcggcggccccccgaggcccgcggctattttttccccggtccgcatttaacggcctgcggcggcgccggttcaggacaccgttttcagccacgtgtccgagacggtgtatccttcctggaaggggtcatgcggatcgaggccgtgctgcgagatatgggtcagccaggcacggccggacacttcgggaatgatggctgccgatggtcgaatggcgagccaaggcggcgctcgaagccgccggcgtctcattccccgcccggcatatggtccagcgtgacgaggtttctggcgcaggcgccgcgctcggctttccggtggtgctgaaggcggtttcgccgctcctgctgcacaagaacagaataggcgccgtcgctgtcggcctggcggacgaggcggcgctcgccgccgcactcgaccgcatggaaggcaagctttcttcagcaggcatcacgccggacggtttccttgtcgagaaaatggtttccggtgccgccgcagagatcattgtcgggatcaaggcaagccgcatctatgggcatgccctggtgatcggcgccggcggcatcgatgccgagcatctgaaggattcgaccgttctgctgttgccggcctcgcgcgccatgatcgaggcggccatagccggcttgcgagcggccgccggccctctttcctgcccgccctggcgctgacgctggccatcaccgcgcacatcatgcgcatgacgtgcgccgcgctcatcaatttgttcagcctgccctacatcgaaatggcgcggctgaagggggcctcgcagggtcgcgtcgtcatggtgcatgcgctgcgcaacgcgctcgcgccgatcgtcaatgtcgtcgtgctgaacctcgcctatctcgtcaccggtgtggtgatcgtcgaggtcgtgttcgtctatcccggcttcggcaggcttttggtggattcggtatcgaagcgcgacgtgccggtggtgcaggcgatctgcccgatcatctcgatcacctacatcgtgctcaatctcttcgccgacatcgtgtcgatcgtgtccaacccctcgacgtcaccacccagatcgaggtgctgttggcgatccgcgaggcggtccagtcgctcggcacggcggccatctatgtcagccacgaccttgccgtggtggcgcagatggcggacagagtgatggttctgcgcaacggcgagaccgtcgaggaggcgccaacccgcacgatgctgtccagcccgcagcaagattaccccaaatcgctctgggcggtgcgcacctacagggctccggcgcggcagcccgtggaggccctaccttcactggtgcgaatagagggcgtagacgccgcctacggcgccaaaggcgccaaggaagaaatattccgtccgccgcatcacccttacaccgagctgcttttctcctcggtcccagaaatggacccggactggctatcgcgcctaaagacaagcgcgtgacgcggaaaccaaagaccgccgccgccccggctcttcgctcggcctgcgtgaagccgccgcgcatcttgccgccgtcggaagcgcgattgatctatatcatacaagccgccggccgtttgccgtacccacccatgaacggaggatgaaaagccatgatgcgcctggccatcgctgcgctgctgctgtcttccacgctcccggcgatggctgacgatttggtggaatacggcaggagaatagccgaaaccaattgttcgcgctgccatgcggtcggctcgaccggggaaagccaccatcctgaagcaccgccgtttcgcgacctttcgaaacgctacccgatcgacgccctggaagaagctttcgcagaagggatcgtcgttgcgcattccgatatgccggagttcaggccgaccgacgaacaagggcgggctctgcttgcctatatggcggcaatccaatcgaaataggttcccgcgcccgcgagggtcgttgccctgctcgacacctctttccgggtcggcgatcacacgacggccgcgcgttggcttgcggctgctctgcatcggcgccgaatcccgcgggcgcgatcgatcgccgtagccccggctcgatcagcgatctgcgctgcaatgcgttcctgcgcttccgttcgcgcgggacgagcggcctcgtcggcagcctctggatggtcgccgccatagcgatgttcgcagtcgaggatgccatggcgaaggcagcgtccacgcggctgccggtcggcgaagtgctcgtcctgttcggcctgggcgggacgcatgcgtcgccttcaccagacgggaaccgctgttcggttccggcattgtctcgcgcgccatgcgcatccgggcctgcttcgaggtggctgcacgactgttccatgtgctggcgctcgcgcccaccccgctgtccgcaacgacgctgatccttcaggcaaccccgccctggcgctgatcggcatgttgggtttcgcgggccgtgacctggcgagccgcgccgcgccgcgctccatcacgacgtcggtcctcgggttgtatggcttcgcggcgattgtggttgccggggccgcctacgccttgctctgggagagaaagggcttcatcctgcccgacccctccgcaacggtctttctcctggtagcggtaacttgcgacgccctggcctattcggcgcttatgcgactgcaagagagagcaacttattcgcaatgccgggggctccagttgtacgcctgtgaagtccagcgtcattctctaagcagaatcgaagatctatgttgatggtgggcccggagagacaccaatacttctataaaatcaaatggttgaacttaggttcgcacgtaaggtttcatgaccttttccgtgggttcgcagcgaacgatcattgaaaattatcgccttatagaacagggcgtcacgttgtcctaccgcaacccgccaactcaataagtgtcgggctccgatgcggtgcagacggtcgataacgaaatcacatagagaagcaaaaaggcggaccggagcccgccttcatttggtggcatgaagccttgttaacggagaggccacgccgcgatccttgctagaacatttgcaggatagccaacatgcagtcgcggcgcaacccttgccatgctggagatgatggcgtttattcaagtggggaaaaacaagaacgttggggccggggatgggaattcgctacgcgtttgatattggcaccaattcgatcggctgggcggtatggcggacgggccgcgacccaaaaggtatctttggtgaaaaagacgcgccactcgaattgctcggcgccggcgttcgcctattcaaggacggccgcaaccccaaggacggccagtcgctggcgacgatgcggcgtatcccgagacaggcgcgcaagcgccgcgaccgtttcgtgctgcgccgcgaggcactggtcgcggcgttgatcgcgaccggtctgatgcccgatgagaaaaaagagcgcaaggctctggccgaccttgacccctaccagcttcgtgcgcggggcctcgacgagaaactaacgccgcacgaattcggccgcgcgatcttccatctgcaccagcggcgcggattcaagtcgaatcgaaagacggaccgaaagacgaacgacaaggatcagggcaagatcgcggcggcttccgctgccctcgcaaaaaagctcgaagaccaaaacgcccgcaccttcggcgaattcctgtggcgtcgccatcgcgatccggacctgaaacggcaggccgtgttgaaggcgcacgatccggcaaagggtaagcccgacctgcgcacggcaagcctgcgccagccgacccgcatccgcctcgaaggtcaaggcgcgaccgcgctctacaagttctatcctacacgccagatgttgaaggatgaattcgacgcgctctgggatgcgcaggcccgacatcgccctaccctgctgacgcaggaggtgaaagacaagatcgaagcgatcctgttccgccagcgcgagctaaagccgcccaggatcggcctatgcacctttgaatacgcggccggcgaaaaggaaaaacggcggcccaaagcgctgccttccgtgcaggcgcgcgagatatacgaacggctgaaccatctgcggttgtcgacaggcgcaggcacggatcgaccgctgaaaccatctgaacgcgacgatctggcgaccgcgctgctttattccggcctgaccaagatcaaggtcggcaagacgaccggcctgacctttaccgaaatgcgcaaggcgctccggctcggcggtgaggttcggatcaacttcgaggaaatgggcgaaaagggtcttgccgatcttcgcaccaatcgcctgcttacccaggacgatcactacggcccgcgctggcgtgccttgtcatgggccgggaaggacgcctttgtgcaaaagctgctcgatgcgaccgacgacgagaagttggtcgcccgtctgatggccgaagacgggttgagcgaacagcaggcgcggaacgctgtctctattcccttgcccgacggctattcgcggctcggcccgaccgccaatgccgcgatcctagaggcgctgatcgaggaacacgacgaaaacggcttcgtcgtcacctacgataaggcggtgcgccgcgccggggaaaggctcggcaagaactggcaccattccgacgagcgcgacggtgagcttttcgatgccctgccctattatggcaaggtgctgcaacgccacatcctgccgggcgagatgaagccggaagacaaaaaggacgaggcgaaattctacggccgcatcatgaacccttcggtgcatatcggcctcaaccaactgcgtcgcctcgtcaacgcgctgatcgagcgcttcggcccaccggatcagatcgttgttgaactggcgcgcgaactgaaaatgtcggcgcgtgagaaggaacaggaacagcgccgcaaccgcgaaaaccgcgaggcgaacgaaaagcgcgccaagcgactggccgaacagggccaggacaacaatggcgagaaccgggcacggctgaaactctacgaagagcagcaacgcgccaatggtggcatagccctttgcccgttcacgctgaagccgatcgccatcagccagcttttcaacccaaatggagagatcgagatcgagcacatcctgccgcgttcgcgcacgctggacgatacggcggcaaataaggtgctgtgctttcggagcattaaccggctgaagcgcgggaacacgccttgggaagccttctatcaacaagataactgggccgacatcgccgccaacgcggaaaaactgccgcccaacaagcgctggcgttttcgcgaggacgcgatggatgtcttcgaggcccgcacctccggaaagatgaataagaaaacgctggaggacatgggcttgacgtcgggcttccaggcacgacacttgaacgagaccaagcacatgtcgcggctggccaaggcttatctcggcaagatctgcgacccggacgcgatctacgtgacacccggcgcgctgaccggcctgctgcgcggcaaatggggattgaactcgatcctctccggtgacaaccgtaaggaccgcactgatcatcggcatcacgccatcgatgccatcaccatcggggctatgacgcgcgcgctgctgctggagttgcacacgctggccggcaaggccgagcaaagcgaatatgacgacgtgatcggccgggtgccatggccgttcgacaatttccgtgatgtcgtgcgaatcgcgatggagcggctcatcgtctccaacaagccggagcacggcaagcagggcgcactgcacgaagacaccgcctacggtatcgtcgccgatacggtggaagccaccgaaattggtaatctagtgcgtcgcaagttgctagtcgatttgacccccggcgagatcgaccgcatccgcgactcgacacttcgcaaagaggttcaggtggtggtggcgccttttcgcgacgccaggggcaaattgccgaaggcgaatgaaaaggactatcaagccgcgctcaaggacttcgccgacaaccataagatgcgtcgcacccgtgtcggcaaggacgacatcagcgcggtggcgatccacgatcgtcgctctggcaaagcctataaggcagtcgcgcccggggaaaattactgcgtcgatgtggtccagatgcgcgatggttcatggaagggttttgccgccacggtgttcgatgtgaatcgcaagggctggcggcccgagtgggagcgcgacaaactcggcggcaagctcgtgatgcgcctgcacaaaggcgatgcagtggaactgctggacgatgatggtgttcgcagaatcaagatcgccgtccgacttgaggcaaggcgccttcgcctagtcacgcacaacgaaggtggggactatcagaagcgccatgacgatccagaggacatctttcgctgggatcttgcgagcataagcgggctaaaggagcgccgctgcgtggcggtgaaaattgaccatatcggacgaattctgaaacgctcgtccaacgtagcaacttaacgaaggaagagagatttaactcggttaaagtgatcggcactcgcgtgcccgccggattcacccggcggttttttttgcttggcactttctttgctgattatctcccgagggagctctcctttgcaaaatctgtatcggcatgacgctccctcacggagaactgtgccatgctgggacgcatcgtcgaaatcgaaggtgaaggcagaaggctttcgctcgaccggggtttcctgactgtcgccgggccgaacggacctttgggaaaggttccgctcgacgacatcgaggccgtgatcctgtccaatccggccgccagtttcaccagccaaatcatcgccgccctcgcctcgcgcgggacgccgctggttatgtgcggtaacgatttccgcccttctgcctggctgctgccggtggacggccaccatgcgcagggcgaccgcatggaggcgcaggcgcagtccactctgccgacccgtaagcggctctgggccgaactggtgcgcgccaaggttctcgcccaagctgcggcgctggaacggaccggcgcgaacccggttcccatccgcgcgctagccgtgcgcgttcgctccggcgatccgagcaatatcgaggcccaagctgcgcagcgctattttccggcgatgttcggcaggggattttatcgccaccgcgacggcgacggccccaatggcatgctgaactacggctataccgttctgcgcgcggcgaccgcgcgtgccatcatcgcagccgggctgcatccatcgctctcgctgcagcaccgcagcaggggcgacgcgctgcgcctggccgacgacctcatggagccgttccggcccgccgtcgacctcgtggtcctcgccctcatgcgcgaaggcgtagatcggatcgataccgcagccaagcgccgtctggcggaggtgctgcacgccgattttgtcaccgcggaaggcgccacgccgctctccaacgtgctcgcccgccttgcgatatcgctggcgcaggtcttcaccggcgaacgcaagaaactggtctttccggcctcccccattccgtcgcttacggccgaagccttgccatgaaccggatttctctgctgtcggggtatcgcatcttgtggatcatggcgcttttcgatcttcccgtgctgaccaaagccgaacgcaaacgtgcgaacaagtttcgtcttttcctgctcgacgagggtttctcgatgatgcagctttcctgctatatccgattcaccgcaggcaaggagcaggccgaagcgttgaccaaacgcataggccgcgccgtgcccgaccctggcaccgtcgaggtgatctggttcacggacaagcaatatgaaggcatccagagttttcgcggccgcgcctcaccggccaggcccggcaagccgggtcaactgaccctattttgacattgattcttcggaaaaactgaacgacaggaccgcagagctcaactttaataggcattttttcgtgcactaacgccctaaaacccccggaaaacaacgggtttcccaggggaggttctagcagggatcacggcgcggcccaaccgcaacaagaaccggctgtgcgacttctgcacagacgttctagcagggatcacggcgcggc

SEQ ID NO: 3257 - DNA, 6505 bp, synthetic construct
  variation 2418..2419: note = note, n is a, c, g, or t
  variation 430..465: note = note, n is a, c, g, or t
  variation 5562..5691: note = note, n is a, c, g, or t
  source 1..6505: mol_type = other DNA
  misc_feature 1..6505: note = Synthetic
tttgggctcgacatggctccactacgccacgtagctaagatcgttcgtggtgccgatacggctcgccctgatcttgccccggagtccgctgggcttctggcggtttctctcggtctgtcgcgtgcgtacagatcggatctggagcaactcgatgcggccatgggtatctatgacgccctctacagatgggctcgcgatgcgactgacgagacccacaattgggtccctgcgaaacccggccagtgaggcttgtcatgcaaatgaaggctcgttctgcttctgaaggcagcagtgacgataacaccgggccgctgcctgatttcgggcaagcgatcgcaacctgggcacgtatcgggttgctgtcgttcggtggtccgacagcacagatcgcgttgatgcaccgggtcattgttgacgagaagcgctggcnnnnnnnnnnnnnnnnnnnnnnnnnnnnnnnnnnnntgccggctggcgcctgcatggattgaggggagggctcgcagccggtcttctgttcgtgctgccaggcgctgctgtcgtgctggcgctttcgatgatctatgcggccttcggcaacctgccggtggttgaggcgttcttctttggcatcaaggcagcagtgctacttatcgttatcgaagcgctgctcaggatttccagacgagcgttgaaggaaacatcacattgggttctggctgctgtttcgttcgtagcgatattctttctggcgttgccatttccaataatcattgcggccgcagctctgtttgggtttctgcgcactaatgccaacgcgcccgttgctaccgccccggtcttgcaggtctcgtggacggacacggcgcgcaccgttgcggcttggttggcggtctgggccgctccactcctcgtgatcgttgcgattttcggcagcggccacgtgctctcccagctgtcatggttcttttccaagctggcggtcgtgacatttggtggcgcctacgcggtgctcgcctatatgggccaggacgtcgtgatcggtcatggctggctggatgccgagcagatgatggacggactgggccttgcggagacgacgccgggcccgctcatcctcgtaaccgagtttgttggctatctcgccgcgcaccggcacggtggcctgcctgctgttggaatggggttgctcggggcttttgtggccctttgaccgacgttcgcaccgtgttttctttggatcttcgcgggcgccccctacatcgaatggatcatttcccagccccgtctgcgcggggcactggctgcgatcaccgctgtagtggttggtgtcatcttaaacctcgccgtgtggtttgggctgcatgtcttcttcggtcgcgttgagcatgtgcttctgggcccgctttcactttgggtaccagatctggcgacgctcgactggcgtgtcgtcatgctcgccgcgttgagtggctacctgctgttgtggcgccattggacgattttgccggttctcggcatcgcggcctcgctgtcactcgcgatcaggctctccggcatctgatgagcaaggccatcaccctgaatcagtgtcgtgagcagcgattgtttgacgtgctgaaagggccattgctagtgtgcggcacaattcaaaggagaagtggtctgcaggttcgctgccggccgcgcgatccatgatcgaagttctcatcgtcgttggtctcatcgttctcaacggcctcttcgccctgtccgagcttgccatcgtatccgcccgccacccgcgactgaaggcgatggcgggatcggggcgcagcggtgctaacctcgccctgaagctagcgacggacccctaccggtttctttcagcagttcagattggcatcacgcttatcggcatcgtgaacggcgcctactcgggcgaaacgttcggcgtgcatgcaacgaatgcacttgaggcagcgggcatgtcacatgccattgccggtccactcggctatgggatcgtgattgcgatcatcacctatttgtcggtcatcattggcgaattggtgccaaagaacctcgcattgcggaatcctgagagcatcgcttgcacggtcgcacctgcgatggttgtgttctcgaaagttgcggcccctgcggtatggctgttggatgcctcaacgcgcatggtgttccaccttttcggactgacaggtgagaaccgttcgagtgtgacggatgaggaaattcgcaccatcattgccgaggccgagacggccggtgtgatcgagtcgggtgagcgcgttatgatctccggggttatgcgtctcgcagaccgcgcagtcgtcggattgatgacaccgcggaccgatgtcgactggatcaatcttgacgcgacgtcggaagagatcaaagcgcggcttgttacgacagcacattcacgattgccggttnntttcacgattgccggttggagagaactctgtcgacacgtttatcggcgttgttcaaacaagagaactcctggcggcaattttgacgggcaaagcgttggatgtccgcactcatgtgcgtaaggcgccaatcgttcctgaaacgatggacgctctcgatgtgctcagtgttctgcgcgacgctgaggtgccagtcgcgctcatccatgacgaatacggccatttcgaagggttggtcacgccagcggatattctggaagctatcgcaggcgtattcaaatcggatgcagacggcgttgagccctatgcagtggaacgcgctgatggctcgtggctgctatcaggcgcaatgccggtcgatgaaatggccgatcagattggcattcaacttccagcccagcggaatttcacgacggtcgctggttttgtactcggccatatccaacacattcccaagaccggcgaacgcttcgagacaaacggttggacctttgaggtcgtcgatctcgatgggcgccgtatcgacaaagtattggcgagccgcgtgaaaccagcccgacgattggtgacgtgagagcggttttaggtgggcgtgggccctacgtgctcgattggtacgtgttcatgacgagagcacgtcgcttctttgatcctgatgtggaccggctagcgaacacgctcggcgggagcttgccgacgctgatgtgccggtaaagaccgctatagtcgtcgggccaacaggtgattggcgagcgagtatccaccagcgggcggaatgcgatcacaatggaacataaaaagggcagaccggagcctgccctttgaagctcgtggcatgaagccttgttacctgagggcccacgtcgcgatctctgctatgaagattgataaaacaccaaacctgctgggaattcaagatccatcagttatcgtcagcggatcaacagataacagacgaactggccactcacgatgtgcaccgcttccacttcaaggcttcgatattcgttcgatcttggcactcagtcgatcggttgggcggttttgagcgtcgacgacacaggttccagcgcgcgcgcaaatgggttgctggattgtggtgttcgcatctttgacgatagccggacagccaaggatgagaaaccacttggcgagcagcgacgggggccacgagccgcgcgcaaacggcgagaccgctttttgatgagacgccagcgcctcattcagatgctgattggcttcgagttggtgccgagcgactggtctgccagaaagaagctcgcggatttggatccgtatcgactgcgcgccgaggcactggaccgaaggcttgagccgcatgagcttggccgagtcctgatccacctcaatcaacgccgcgggttcaagtccaatcgcaaatccactagcgcgaaagaaaaagatgacgaaaaaggaatgatcgcttcggcggcggagcgacttgctgccgagatggccggaaaggcgcggacatttggggagttcctgtggcagcgccatcgcggtccggacggcaaatcctccccccgcacccgtcaggcggtgcgcatacgtgttggcggggagggacgtgatactctctacgagttctacccgctgagggatatgctagccgacgagttcgatgcggttgtgcagaagcagcgcacataccacccgcaattgctcagcgaagatcgtgtggagctcctgaagcgagagattttctttcagcgcgacttgaagacgccaaaacgtggaaaatgcacattcgttccttctgaggagcgtttgccaaaagcactgcccagcgtagaggcgcgcgttatctacgaggccgtcaacaatctgcgctatggtgttggcatacgggtcgacacaaagttgaccgctaaacagcgggacgagattgtccaacggctcttgcgaggccgcaatgtcaccgcgtcccaactgcgcaagatcaccggcgcgcccggagattcgcgcttccagattgcaaccggagaggccaatggtctgaaggacgatttcgttgcgaagtctgccaagctgctttcagtcgatgatgcattcggtgctgcctggcatgagctgccgatggagcaaaaagacgcaatcgtttggaagctgatcggcgacgacgatgatgaagtagtgcgtcagtggctcatcgctacgcaagggttaccggaagaagccgctcgtaaagtagcgagtctgtcgttccgcattggcacggcccgcctgggtgcaaccgccaatgcggccgtgttggggcagttgatgtctggcgatgtgccgacctatagcgacgctgtcataagagcgggcaaagctcttggcgagaactggcaccattccgatcttgataatccggagcttcaagaattcctgccgtattatgcgcaggtgcttgagcggcaagtcatgccgggcaccggtgcagcaggcgataatgaggctgaagccacgttcgggaagattgcgaacccgtccgtgcatcgctgcctgagacagctccaaaagcttgttaatgccttgatcaggaagcacgggcggccggttcagatcgtcatagaagttgctcgcgatctcaaacttggcgagcagcagaagaaggaacaccacgcgacaaataagaagaaccgcgaagccaacgacgcccgccggactgaactcgaagcggtcggtgcgagggtctccgcagattctttgctacgtctgcggctttacgatgaacaacgccgcgcgggcgatggcgtggctatctgcccctatagcctcggtacaatcgaacgtgaggacgttctgtcggataagatcgaggtggatcacatccttccgtactcgcggacgttcgacgacagcgctgccaaccaggtgctgtgctttcgatcatcaaatcgggacaaactgaggctggcaccccacgaggcatttggtgaccaccccgactgggcggagatcgaatctcgcgcccgcctgctgccagccaacaaacgctggcgcttcgccgaagatgccatggagcgtttcgaaaatgaggagcgggatttcgctgcccgccaactcaacgagacccgctatatttccaagctcgcacgcgcctacctgactgtcgtggccggtaaggggaatgtcnnnnnnnnnnnnnnnnnnnnnnnnnnnnnnnnnnnnnnnnnnnnnnnnnnnnnnnnnnnnnnnnnnnnnnnnnnnnnnnnnnnnnnnnnnnnnnnnnnnnnnnnnnnnnnnnnnnnnnnnnnnnnnnnnnattgaccggccgctcctgaacgagatggcgcggcgcgcgggcgagtatgagggagaggggcgcgattggcgcatcaccgatgccgctccagaggagccgttccctggctatgcggaaatagctaaggggctcgtgagcgacgtcatcgtatcgcgcaagccagatcacgggaagggtggcgccctccacgaagagacggcctacggcattgtgcgcgacgaagcagaagccaaagcgatcggcaatctcgtgatgcggaaacctgtgaccgccctcactgctggcgacgtcgacagtatccgcgatcctgttctgcggtgcgcgatacaggcggctgttgctgcgtttcgcggcgacaaaggaaagatcgaagacgagaagtcattcagggctgcgttgaaggcgttcgctgaagagcgtgacatgccgggacggaagcagggtgtccgccgcgtccgaattggcaaggcgcagaaagacttcgtgccaatcaaggaccgcgcttccggtgccgtctataaggcgctcatcgctggcgaaaatcatcacgtcgatatcgtccagatgcgcgatgagcggtgggaggcgttcccagccacgcggttcgatgtgaaccagaaggattggcgaccgctatgggagcgcgacaagcttggcggaaagctcgtcatgcgggtccacaagggcgacgtcatcgcgatcgaggacgacgggcgtcagcgcttgatgacgatccatcgtctcaatccgagcagtaataggctctatttggctgagcatttcgaagctggctcgctgagtaagcgccacgatg

SEQ ID NO: 3258 - DNA, 6135 bp, synthetic construct
  misc_feature 1..6135: note = Synthetic
  source 1..6135: mol_type = other DNA
ttcaggaaggcgcgggtgccgtggctggactgactcgaaaacggcgcgttgacgcccggatcgcgacgactatgatgccgccccacgccccagtggcggaactggtagacgcgccagactcaaaatcctgtgacagatccctgcagcatggcagcttttgcctaaatggcggtagtttcagcgctttttcgctcaaacgcgcccaattgacgataccttccatattgcagaagattttgtgacattgccggtttgtgacacgaatcgcggtcgtttgtgacatggaccttggcgggggctgtcgcgtacccaaccggcgggaagaggggtcgcataaaccgttcgtccgaggttccggtgggggtttcggcggtccggtagggttccggaagagcaattacaggagtacgagcagtcgagcttcgctgatcatcccggtcaatgacctttgccttccctattatggcagccgaacccgattcagcctccccttgaacaataactctcgttgggctcctggtttggaaggcgcttcagctagtctgggaccgctgggtccacacaagcatctgcccgccgaaatcgcgctgatcagccgaggcatttgccttgcgtaaggtggcatccatagtgctccctacaactcaagaactcaattgatcgatccttacgaggggtactgtcagacacggctaggtggtgtcgcccctagaagttcacggcggctacgactgaccgctggtaaacgctcgtcacctccaccaactgatccggaatgacgcagctctgacgcgctgtgacggggcgtccgccaagcaccaacgtgtccgaacggcatgcgggagtcctgcggccacagatcggcagcgacaggtttcaacgtccgcagctaggccaagccctcgctatccagaaagcatggccggttaaaggagcgccttggtcctgatcgcgacccaccgccgctcaggctgatgcagcggtggcggccatcggcgatgctcagggcaacattgtccctgatcgcacatgaggctgaatgcactaacgataacgtcagcctctcaccatttagtccgatccagtgcccggccaattattgggcgtgtgaatcgacttgtgtcgggagggcaaatctcgggcacaaaacgcaaaaggcggaccggagcccgccttcatttcgtggggtgaacccttgttagcggagggcccacgccgcgatctctgctagaacactgaatctttagccgatcgcttgcatcggcgcaagatgtcagtgcacaatccaatatgctgggggcgctgactgcggggggagggaaatgcagcaggccagtccgccacttcggtttgcattcgatctggggaccaactccattggctgggccgtctacgagctggttggcacctcgagcggcactctgactgtatcgaagctcgtagattgcggcgttcggctgttcgaggatggccgtaatcccaaggatggccgatcgctagcagagatgcggcgcatccctcgcagtgcccgacgccgccgagaccggtacgtgctccgtcgggatgagctgatcgctgcgcttgtggaccacggacttctgccatccgatcccaaaatgcgtcgggcactggcggacctcgatccctatcagctgcgggcccgtgctctcgatgagccgctcagggagttcgaaatcggtcgcgtcttactgcacttgaaccgacgcagaggctttaagtccaatcgtaaggcggacagtcgagacaaagagaagggtaaaatcgctgaaggtgtcgcccgactgcgcgaaaggctggcgacagagggtgttcggacgttgggggaatacctttggcggcgacacggtggtccggatggttcagccacaccacgcacccgccttcccgttcggattcgcttggagggtgaaaagtcgcaggcgctctatgacatctatccaacgcgagacatgcttgagcacgagtatgatgagatcatgcgggcccaagctgctcactatcccgacatcctaacgcccactgtaatcgccgaactgaagaagatcatcttccgtcagagggaattacgtccggtccgcgccgggcgttgcacatttgaaccctcggaagagcgtcttccgagagttctccccagcgttgaggcccgggcgatatacgaggtagtgaaccagctccgctatggcgaaggtgtggagctaaaaactccgttagacagagcccaacgcgatctgttggcggcgaagctgctttccggcaaatccatttcattcgaccgtatccgctctgtgctcaagctcccgccgactgtacggttcaatctggaagacgccgggaagaaagatctcaaggactacgcttccaagtccggggccaatgtcggaaagcgatttggccccaaatggcagcagctgccattgagcgaaagggatctgatcgttcgaaagctgttagacgaaagcgacgaggaggcgctcgtttcctggcttcgtacagagtatgggctcgacgaggcgacggcacgggcagttgcatcttggatgcccccacccggtacgtcacgcctaggaccgacggccaatgcggagatcttagcggagctacaggctgatcatctttgcacgtatagcgaggcggtaaggagggcgggagaacgactgggtcgaaattggcatcattccgactttcgcgacgaagagctgtacatccctcttccgtactacggcagaatccttgagcggcatgtagccttcggcacgggtgaccccaacgatccaccagaagagcgatttggtcgtcttcccaatccaacagtgcacatcggcctcggccaactccgccgtgtcgtgaaccgtctcatatccgtctacggcaagcccgctcagatcgttgtcgaactcgcgcgtgagctgaaactttcgaagaagcagcgcgaagaagaacagaaaaagaaccgcgagaatcgccaagcgaatgaccggcgacgacagcagctggagaaactgggtcagcctgatacggcggagaacagattgcggcttcgcctttttgaagagcagcagcgggccaataatggcgttgccctttgcccctacactctgcagccgataagcattgagaagctcttctcatccgaaatcgatatcgaccacatcctgccctactcccgcactttggatgacagcgttgcaaaccgcatcctctgctaccgcacggccaatagggtgaagcgctccaagtcccctgccgaagccttcggtcaagacgcccgatggaaagatattcttgcgtccgccgcgggcctgccagccaataagcgatggcggttcgcatccgatgcgatggagcgcttcgagaagtctgagcgagatttcctcgcccgacaaatgaacgaaacgcgctacctctcaaggcttgctaggctctatctcagcgccgcttgccatccggataacgtctatgtcacgacgggccaactcaccgcgatgcttcgagcgcggtgggggcttaactcactattgggagatgacaacaagaaagagcggacggaccaccgtcatcatgcgatcgatgccatcgtcgtgggtgcaatcgatcggagcctgcttcaggagatgtctcgcagggctgcccaggcggaggccgagggtagacacgacataacacgtgacgtgccagagccgtttgctgggtttcgtgaagcagtggccgagaaagtcggctccattatcgtttcgtttaagccggagcatgggaagaccggagccctccacgaggatacagcttacggtctggtgaagaacgaggcagaggccgccgaaattggcaacctcgttttccgtaagccgctggttgatctcaacccaaacgaaatcgatcgggtgcgagatccagttctacgagctgagctaaaaaagatcgcttctcagttcacgagtgatgatgaaaagttgctagatgccaagggcctaagagccgctcttgaggagtttgcaaaaactcctgctcctggacgtatgcagggaattcgacgtgttcggatcgggaaaaaagaaaaaaacgttatctttatccgtgatcgccgctccgcgaacgtctacaaagccttgatacccggaagcaatcatcacatcgatgttgtgcagatgcgcgacggatcgtggcaggggtttgctgccagcctttttgaggtaaatcagccgggttggcggccggcttgggagcgaaacaaactcggcggcaagctcgtgatgcgccttcacaagggcgatatgatcgaactcgacgatccggatggaaaacggcgcatcaaagtggttcaccggctgcaacccagccagaaccgaatctaccttgcaccgcataacgaggggggagacctgcagaagcggcacgatgacaaggaagatctatttcgttgggacctcgcgaacatcagcaggctgagggagcggagagcccgaaaggtaaaggtagacgaaattgggcgggttaaacttgccaaatccaatgtgtattgagttgcatgtcgctgaacaataagcggtaaccaaactcagcattttctctagcccttcaacctatcaattacacattctcacgagagagggaggggatgatgctgggtcgtattgttgaaattacaatcagcggtgctcgagttgcacttgaacgtggtttcattaaagtctcaacaattgatcggcatctcggtgaagttcctctcgacgaaatagaagcggtcattacttctacacctgccgcaacttatactagtcaggcgttggcggctctcgcggctcgtggggctcccgttgtgatttgcgggaccgatttcgcgccgacagccttcctcctccctatgaggggacattatgcgcagggtgatcggatggaagcacaagctaccgcctctcgcccctgcaagaaacggctttggtcacagattgtaagagccaaactcagggcccaggctgccgctctagaagtcagtgggtgtaatcctcggctggttctcgcgttaatctcgcgtattaggtctggtgacccagacaatatcgaggcgcgagccgcccaacgctatttgcgagaaatgttcggtcggagcttctcgcgaagcactgcggacaataatgtcaataactacttaaactatggatatacggtgctcagagctgcagctgcccgatcgatcgtggcagcaggtctccacccttcgcttagcattcatcacaagagtggtggtgatcctctacggcttgccgatgatctgatggagccatttcgcccagcggtagatctggttgccttggacctacaaagaaaaggagctgggccgcttgatagtgccagcaagagacaactcacagctgttcttcatgcggactatgccacggaaggtggtgttacgacgctgtcgaatgccttgaccaagctctctcaatcgttagctcaggtctatcttggcgagcgacgagatcttagtttccctctctcgccgattccattgcgcagcacaggtgctaactgcggaaattctttctgaaatgccgaactttatcaggctgtcgggatacagagtaatgtgggtaatgacgctattcgacctaccagtggtaacgtcagaagaacgtagacgcgccgcaaagttccgagagttcttgcttgatcagggcttttgcatgatgcagctctcctgttacctgaagtttacagctggcaaggaacaggcagaagctgttgccagccgcatcgctgaaaacatacctctcggtggcaaggtcgatatcattttcttcaccgatcggcagtatgaggccatcaaatcgtttagggccagtggagaaccgactcgtccaaacaggccagaccaactccttcttttctagagcccgcgaatgttttcgtcagctcaaaatccagattattcgacttcgataaagaaaaaaaagtcgccgagtcaaagacttgtcggcgaccagttctagcagagatcgcgacgcgggcctaccggaacggaggcggcgtatcgtcgacccaagccgaagttctagcagagatcgcgacgcgggcctaccggaacgcacctggggcgacaatatcggctggtggggttct

SEQ ID NO: 3259 - DNA, 10823 bp, synthetic construct
  source 1..10823: mol_type = other DNA
  misc_feature 1..10823: note = Synthetic
atcatagagatactgcatttgtctatcctctaaatttggggtttcacacttatcgcctgcatgaaaagttttttcaagtactttcccgtctataaaagatttgatcttaaccctaacaaacgctggacctttaccaggcttgacatgttgataatcaactattttatatggcacaccatccatctctatctttaagcccttttttaaatcgctcatagaataagccatactctctccttaaaatataatgaacttcattatagcgtaaaataatttaaattttatatctttataaacttatatcttagtgctacttttacttctggaaattttaacttttatatattaaatttaaaacgccaaatttggcgacccttggaggatttgaaccgccgtttctacacagagaatgtagcgtcctgggccaactagacgaaagggtcatttatgaaggcagtattttaccctattttgacttaactcttcataaatattatcttaagcttaaagatagttatattaaaactatttaaaaattttattattttatatttagtttaaataaagctttatttatatacaatacgagtttatattttaaaaatatatataatatattataaaatttatacatcccataactcggagaaatgatgcaaaaaactgacaacaacctatttaaacgaactataaattatatagttatatctatgaatggtatggcttatgggcttttttctactcttattatcgcgactattatcgcaactttagctggatttttacctaaaaattcagatatttatacatttctcataaacatatcaactgttttaaaacaactcatgggcgtaggtataggcataggtatagcatgggcttttaaaatagatgggcttaagcttatagcagcaggtgtagcaggtggtatagctagctatatggcaggaactctaggctttaaaataggcgatccgttaactgtatattttgttgttatcatcacaatagaactagttaaatttatacttagaaataaaactccaatcgatataattatcatacctctcttatccatcttaatagcaggcgtcataaccgtacttttgtatgctccagtatcatcccttactactgctgttggtaaatatatagaagttgctactgattatcaaccatttttaatgggtattgttatcgctgttataatgggtatggcactaactgctcctatatcatcggctgctattgctattgctatcggacttgatgggatagcaggcggtgcagctgttgttggatgtagcgtacagattataggttttgccataatgatcagaaaagataacaatataggcacaattatatcagtagctattggaacatctatgttgcagtttaaaaacatagttaaaaaaccaattatatggcttccaacaatcatagtttcagctattcttggaccaatcgcaacaatggtgcttaaaacacaaacttctcctataggtgctggaatgggaacttctgggctcgtaggccaaatagatacatacaacactatgggtaatagctctcaaatgtggctttcaatactagtactacaaattttattacctataattttggtctatgtagtcgacgttttatttaggaaatttaattttataaaagatggtgatcttaaaatttaacaaaatttagtaaaatttataaactttgcttatctttaaaagcttttatctagcaagttacttggtaattttaccatttaacttgcttgaattctttactaaaaagtgaactagacttatctatctttaaactagcttgcagatgaaacattataatttaaagttaaaatttagtattattttttagataagtattttaaagctaaatgaaataataaaaaaggcttttaaaattcgctattatgctttttaaaataatggtgtcctgtgttggattcgaaccaacggccccctccttaaaagggagatgctctaccgactgagctaacaagacaccgtttaaaagatggcgcagcggacgggactcgaacccgcgacctccgccgtgacagggcggcattctaaccagctgaactaccgctgcacctaaaaaatagtggtggtcgctataagactcgaacttatgacatccaccttgtaagggtggcgctctaccaactgagctaagcgaccattttaaaaacgaaatgaaattatacaatgtaaaagattaaatttagcttaatacaactcttttatagataaactcacagattttataaacttagatataataattctaaaactacaaggaattttgtgagaattttgttatttatgctaataaatttcaatattttgtttgctcatagctatcaagatatactctactctatccgtgaagtagcccttaaaaatggagtttctccaaaaattttatatacaatagttaaaatagagagcaactttgatccttacgctatatcttttttaactactaaagaaaacgccttttactataaaagcttagaaaacttaaatatctccataaaagtaagtcagtatagtctaaatcgctcaaaatgggtaatatctatgtcgccaaaaaacgaaacttatgctactgaagtagctaaacagcttatcaaaaatggctttaatatcgatgttggtttaggacagttaaatagtgcaaatttcatgccaaatgagatagaacgtgtatttgaccctacatataacctagacaaatgtgcaaaagtactaagaatatgctttaatgccaaggacaaagagatgcaagaaacgatagagtgttataattacggacttagaaaacgcaagtcaaacccatactacaaaagattttatgaacactatataaaagaatttggtggatagtcattatataaattatacttaagcaataaataagttttcatttttttaagccagccttaaattatattctaatataataattaaactatttttaaaaggatttttatgaaaagacttagtcttatacttgctctagctataagtgctcatgggggagatagcctatcacaagccattatggatggtaaatttaacgctgagataaaagcttggtactgggatatcaccgatgaaacaaaaccacaaaaaaatgaaaatataacaaattttgctatagaacttggttataaaacagagactttttacgacttttattttgggacaacagcacaactagcttttgctcctatcggcgatgatgaagctaaagagctatatataaggcaacaacacactaaaggtctagtcttttctgagttgtatcttggatacaatactaacaaaactgatataaaaatcgggcgccaatacataaatacaccacttgtttcagctaactatacgagaattttaaaagagtcatttcaaggtgttagtatcaaaagcaattattttgatactaacactctatatgctggttatgctgataaatttcaaggtagaacaagttcaacaatgaatgaagagcctggcagtgagccaaaatttaaaaggcgtataacgcttgctggcgctggagatatgagtcatgagtttgacggtttgctttgggctggtatcacaaataaaaacatagaaaacctgactcttagcgctcaatacgcctttttaaaagatgttgagtttagttttatgccacaccaaataggcgatatacacctatactacactgaggcaaattatatagtaccgctagaaaattttgaccttaaatttgatctaaattttagaggtagccaaactgatggtgatataaaaaagagaaattttaacggctggatgttagctataaaagctggagtttataacattaatggctttgactttatagctgcagcaagcacagttagcaaagatgattctgttatcacaagcgcaggacttggtggtagtacatatacttccttacctataagaggagccaatatgttcacccctacagctggtatggatacatataagcttcaagctaactatgacttctcaaacataggcattagcggacttaacagctcatttatctatgttatatcaaagcatagtgcgcctgatgagatagctggtatgaaccctgcgggcgttaaaaaagagtatgaagggtatagttttatacttaactacaaaactccatggctaaaaggtttaaatgcatccttaacctatactatgttagatcaagaaattactccaaaaggtggcaatactgctaaaactgatattgatgaactttgggtaaagttatcttataaattttaaaatagtagaagttacactttaaatttgctctaaattttagataaattttctaatctttagagctttttctaatctcttaaatgcatcttggattacctttgtaggacatgcgatatttatacgctcaaaacctcttccatttttgccaaagatatatccttcatcactaaaaatcaaagcgtccttgaccatgaatttctctaactctttacaacttaaccctaactccctaaagtcaagccacataagataagtcccttccatatcacaaactttaatgacagaaatcctctcttttatgaaattttgaactaaatttctatttgtttctatcacctttaatgcctcatcaagccactcttcgcactcattatagcttattttaacagcctcatatgctaaagtattaagagaacgaataccaactttttctagctcttttttgtataaattccttaaatttttatctttaatgatgatatttgaggcttgaagtcctgcgatgttaaaacttttgcttggtgcagtacaagttatagatctaaatttcttatccaaactcataaaaggagtaaatttatgcttgctcatcaccagatcacagtgaatttcatcacttataactaaaacttgatttttatagcagatttcacctatttttgtaagctcatctttactccaaactctgccaactggattgtgaggattgcaaagtataagaattttagcctcttttgccttcttttctagatctttgaaatttatactatacataccgtctttaaagtttagtctattttctaaaacttttcggcctgttttttgtgttacactaaaaaatggatagtaaactggtggcattatgatgatgctatcgccgacattgctaaaagctcttatggcagtttggagtgcaaaaactacccctggcgttgtgataatagtactttttctaatcttaagattatgacgtcttttaaaccatgaaatcactgcttcataatactcatcatctgctcttgtatagcctaaaaatgagcgttttatacagtccttaagtccactagttaaggcaggtgctagcttaaattccatatctgctactgaaaatggcactatcccttctggaacattagaatttttctctttcatccatagccattttgttgagcttaatcctctcttatctaaaatagtctcaaagtcaaatttcatatcttcaccatttatttaaatttttacttattgtgttatctaaatttagctatttatgagcatattgccttatatttaataactcttaagctctaataccccaataaatttaaatgcctataaacataacagccattattataacctaaatcgcaagcttttttataaagctcttttgcagtataaagctctttttctacaaccttgccatcttcatataaagctccgagataaaaacacccttgtgcattttcgccatcacaagcttttttatagtatttaaaggctttttggctatcttgatcaactccttgagcgtagtaatacatatctcctaaaaaaaagcaactttttgcatttttgctatcgcaagcttgttcatacaacttacttgctttttgataatcccctgcctgataagcctctagcccttcttcaaacttacttgctgccgctaaacttagtagcataaataagcacaaagcaacttttttcactatatctccttaaattcatctattttataataaatggcgattttaacataatttaaaaacgaaatcaaaagtaaatttacaccttattttatatatttatcacttataaatagactttttatttaaatgatgataaaatcaaaacagttaaagaaactaaaaagaggagatattttttatatcaatattatcatataaaataaactatttaggataaatcatgacaaaaatatttgcatttgatttaggtattagctcagttggttgggcttatactataagaaaaaatgacaccgctgaaattgttgattctggctcaagaatatttaataaagcagaacatccaaaaaatggaagctcacttgcactacctaggcgtcaagcaagatctagcagaaaaaataccaacagaaaaagaggtcgaatatataaaataaagttacattttgctaaaacaatgaatcttgatttaaatgatatattgcaagattttggagatatttcaaatttctttaaaaatgataaacatacgctgtctccatggcaactcagaaacgatggattaaatagaaaattaaataaagatgaatggcttagagttcttatccatatagcaaaaaatcgcgcttatagtagcaacaaagtcggcaatgaagaaaacaatggaaaagtcctacgtgcaatagaagaaaacaataatttactaaaaaataaaagctatttaacagttgggcaaatgatgtataatgaattttttgaaaagaaaaatgaagaaaataaatttataaatgtaagaaataaaaaagactcatacagaagaagtatcagcagaaaacagactttagatgaaacaaaaatactttttgaaaaacaaagagaatttaacaatgaatttgcaaatgtagaattagaaaaattctatgtaaagactgctttttatcagagaaaaattaaaagttttgaaaatttaatcggcttttgtaaatatattgaaggtgaaaaaagagcccctaaaaactcgatttcagcacaagagtttattgccctatctaaaactgttaacaccttagcaaacattgaaaactctactggactggtgtttgataaaaaagaaacaattcttacagtatttaaaacactcaaagatacaaaaacaaaaaaaataacatactctaatcttagaaatattttacaacttgatgatatgatcgaattttatggacttgattatcataaaagtaatagcaaaactggagaaataaaaagcaaaaaaaagatagagtcagaaaatatatttatagaactaaaaacattgaagctttttaatgatatatttaaaaatgatttaaataaaataccaatcacaactttagacacaataactactaaaattacgataattaaagatgataaagagctaaaaaaagagcttggaaaattactatctgatataaatttagaaagcaaagaagagataattgataaattatctcaaatttctttttcaggacatattgagctaagtcttaaagctctctatcaaattataccttttatgaaagatggtaaaagatacgatgagtccctaattcttgcaaatttagaagtaataaaaccagatagcaaatacaaactattaccaccctttaatgataccatgtttgcaaacagcttaacaaatcctgttgtcgcaagagctattagtgaatatagaaaagttctaaattctatgattaaaaaatatggatctcctcacaaaattcacatagaactaacgcgtgaagtaggtaaaaattttcaaagaagaaaagaaattgaaaaagagcaaaaagaaaatagagaaagcaacgaaaaagcaaaagaaaaatgtgaagaattagggattactccaaatcataaaaatattttaaaactaaaattatgggtaaaacaaaaagagatatctgtttacagtgggaaaaaaatagaaataaaacacttacaagatgaaaattttctagaaattgaccatatatacccattttcacgcagttatgacgactctcaacacaataaaatacttgcatttagaagtgaaaatcaaaacaaaggaaataaaactccttatgaatggcttgggcaacaagaagataaatgggaagaatttgtttcgcgtgttttttttacagagttgccaaaaaatagtaaaaaaagattgattaataaaaatttcaaagataaaaatataggagaacagaaagaattcttaagcagaaatttaaacgacactagctatatagctaaacttgtgaaagattatacattggattatttggaatttttacctttggataaaaatgaaactcaatacggtaaaggaagcaaacaacatatagtttgcataaatggtagtctaacaactatgttaaggcatttttggggactagatagtaaaaatagagataaccatcttcatcatgcagaagatgctatgattttatcactcattacaaatcaaaatgtaaaagcatatggcgattataaaaccaatcttcttgagtataaaacaaaaaaagcagaaaccatcgccaatgaacttaagcaaaataatgattttagaacaaaagcgctattaaaatgtggggcagatgattttagaaaaatagttaaccaaaaaactaatgaaatttttgtctctcttgcaccaagaagaaaagtaggtggtgcatttcaccaagaaactatatactctaaagaagagatagaaaagtattataaatatgatttacaaaaaataaataattacttagaatgcggtgttattgttaagttaaacagaggatatgcaaaaaatgaaactatgccaagagctgatatttttcaaaaggatggaaaattttatatagttcctgtatatagcatgcattttgcaacaggtacacttcctaataaagcaatttcaggcgctaaagatggctggaaagagatggatgaaacctataaattctgcttttctctatttaaaaacgacctaataaaactgctcgtaggcagtgccaaagagcctatattttgttactatataggtttagatgttagttcatctggacgcttaatatataaaacacacttatcatctaatgaacttagatctagtataggaacaattaaaaatttagaaaaatacgaaatttcacctattggaaatatcaaaaaatttgattttcaagaaaggcaaccagtaaaactcaaaacaactaaaaggaactgatatggcaggctttgatgaagcgtttagaaccgttgttatctctaaaccagcaaaaatcagccttaaaaataataatctttgtatagataatgaagacggagttgcaatgctcctgcttaaagatattttgtgcatagtgcttgaaagccaacaagtaactataacatcagcacttatatcaaaactagctgatgcaaaagtagttcttttaagttgtgatgatagtcataacccaaatggtatctttttctcatatttggggcactatcaaagcagtggagttataagatatcaaatagatcttagcaaacatactaaagcgatcttatggcaaaaaataataaaacaaaaagtacaaaatcaagcaaaacttctagctcaaaaagatatcaacactgcaaaaaaacttatttatctctctaaaactgttaaacttggcgatgctacatatgtagaaagtaatgcagcagctatatatttcccctctcttttctacaaaggttttgtcagagacgatctttgtggcataaactctgctctaaattacggatatagtatagtccgagctactatcacaagagctttagctataagtggtcttaatccaaatttaggtatcaaacacgataatgcttataatccatttaatctagctgatgatatcatagagccttatcgtccatttgtagataaagttgtatataaaatgcataatgaaaacttacttgatgattttttaaataaagaaaataaacatgatctgttatctatactttctcaaaaaacaataatcgacaacaaatcataccctatatcaagagctatttcaaaaactattcaaagtcttactgcttgtataaaaggagaatcaaaagagctaaaattacctatctttggagaagaatatggagaaatatatgagagtgattgtgatgtttgacattccaacgaaaacgaaaaaagagagaaaatccgctagtaaatttagaaattcactcattaaaagaggatttttcatgatgcagtattcggtatatatgagaatttgcaaaggttgtagtagcgcaaatgcttcagttgataaacttgtagatattgccccaccaagaggaaatataagagcacttatcattacagaaaaacaatttgataacatcaaactgatattaggagattgttcttaccaagaaaaggtatcaaaaccaaaacaattaacattattttaattaaaataggcagtttcaaaggatttaccttgcgtgagttgcccagctcacttattttagtctctttttaaatttatatactctttttagtatactatctttaaagatcaatgtcaagatagcaaaacagcctaaaagtgccatttttacggactttaaaatctacatattatagcatatataaatttaaaaagagactaaaacttaaggaggcaagatgagacctagtttagaattatagcatatataaatttaaaaagagactaaaactaaaaagcttttccagttttatagcgttgcattatag

SEQ ID NO: 3260 - DNA, 23369 bp, synthetic construct
  source 1..23369: mol_type = other DNA
  misc_feature 1..23369: note = Synthetic
ccagcttcctcacgttgctggcatcggtgaacctcttcctggctctattcaacttcgtgccgctgccgccgctggatggcggtcacatcgccggcgcgatctatgagtgggttcgtcgccgcttcgcctcgtggttccgccggcccgatcctggctacttcgacacggccaagctgctgcccatcgcctacggagtcggtggcctgctgctgatctccgggctggccctggttctggccgatgtgatcagcccgatccgtctgttctgacctgctcggtaacgctgcctagcggccgcggtacgtcgtccggcgggcgggcggtgcgtgggtaggcttgtctgcgacggtccaaccgccgaaactatctccggacccgatcgaggagcagatgtctgtaagcctgggaatgcctgccgtgccgccgccggtgctggcaccgcgccgcccaacccgtcagatccgtgtcggaaaggtgctcgtcggcgggggagcgccgatctcggtgcagtcgatgacgaccaccaagaccactgacatcaacgcgacgctgcagcagatcgccgagctgaccgccgccggttgtgacatcgttcgggtggccgtgcccagccaggacgacgccgatgtgctgccgatcatcgccaagaagagccagattccggtgatcgccgatatccacttccagccgcgttacgtctttgccgcgatcgaggccggttgtgccgccgtccgggtgaacccgggcaacattcgcgccttcgacgatcaggtcaagcagatcgccaaggcggccagcgacgccggggtctccattcggatcggcgtcaacgccggctcgctggacaagcggctgctgtcgaagtacggcgcgccgacggccgaggcgctggtcgagtcggcgctgtgggaggcgagccttttcgaggagcacgacttccgcgacttcaagatctcggtgaagcaccatgacccggtcgtgatggtgcgggcctacgaactgctcagccaggcttgcgactacccgctgcacctgggcgtgaccgaagccgggccggccttccagggcactatcaagagttcggtcgctttcggagccttgctcagcaagggcatcggcgacaccatccgggtttcgctgtccgcgccgccggtcgaagaagtcaaggtcggggtgaagatcctcgagtcgctgaacctgcgtccgcgcaagttggagatcgtctcctgcccgtcgtgcggacgggcccaggtggacgtctacaccctggccgaacaggtcaccgccggtctggagggcatgaccgtcccgctgcgggtcgcggtcatgggctgcgtcgtcaacggaccgggggaggctcgtgaggctgacctgggggtggcttccggcaacggcaagggccagatcttcgtccgcggagaggtcgtcaagaccgtaccggagtccgaaatcgtcgcgaccttgatcgaggaggcgaaccgcctcgccgaggagatggacgatgtgtccagcggcgcgcccgaggtgacggtcggttagtgcggtgccggcgcggatcctgacaccgacggacgcgcccgccgtgcggcgggtgctggccggcgacccggtcggcaatgttttcgtggcatcgcggatcgatgctggcgtcctggccccgggcgtgcccggaatggtgtacggctggccggcgaatgagccgagcgccctgctgcatgtcggcgccaatctggtgccggtggcggccggaccccaggctctgcccgctttcgtcgaggcggccggcgcgcggaggacctgccagtcgatcgtcggcgaggccggtgtcgctctggcttactgggaggccctgggccagcgctggggacgcacctactcgcaggttcgagaggtgcgccgctgccagccgctgatggcgatcagcggggaggtcgcggtcgaaccggaccagcgattgcggcgcatccgcatggacgacttcgagtcctactacgcggcttcggtggcgatgtacaccgaggaggtcggcgtcgatccgggcagcggtccgcagtcgagctaccgcaactactgtcgctggctcatcgtggaaggccgagccttcggggtggtcgtcgacggcgaggtgatcttcaagtccgacatcggtgccgccagtggtgaggttgcacagatccaaggcgtctggctcacccctcgattacgcggacacggcgtgtcggtcccggcgatggcggctgtcacccaggccgttctggccgactatccggtcgcttgtctgtacgtcaacgacttcaatgtgcccgcgatccgcacctaccaaagggtgggtttcacccaggtcggcgaactcgccaccgttttgtactgacgtgttcgctcagggcgctcgtgcggatgtggctggattgctcacaacctttaggatggaccgggtgcgcggcgttcggctgcgtgcacagtcacaagggaagcacggtctgtcgtgggtctaatggacaagatgctgcacatcggcgaaggccggcagctgaagaagttgaaggctgtcgccgatgcggtcaaccacatcgaacccgacttcgaggccatgtccgacgacgagttgcgtagccagaccgaagagttccgcaagcgcatcgccgatggcgaagacctcgattccatcatgccggaggctttcgccacggtccgtgaggcctccaagcgggtattgggcaagcgtcacttcgacgttcagcttcaaggtgccgcggctctgcactggggcaacatcgccgagatgaagaccggtgaaggcaagaccctggtcgccgtgctcgcctcctacctcaacgccctgccgggcaagggcgtccacgtggtgacggtgaacgactacctggccaagtatcaatcggagcagatgggtcgtattcatcacttccttgggctgaaggtcggcgcgatcctttccgatatgacgccggcgcagcgtcgtgaagcgtacgcatgcgatatcacctatggcaccaacaatgagttcggcttcgattacttgcgtgacaacatggcgctcagtctggatgactgcgtgcagcgcggccacttctacgccatcgtcgacgaggttgactcgatcctggtcgacgaggccaggacgccgctgatcatctccggtccggctgaggacaactcctcctggtacccggagttcgctcgtctggtcacctcgctcaagcgggacgttcactacgaagtggacgagaagaagcgcaccgtggccgtgctcgaagagggcatcaccgcggtcgagaatcggctgggcatcgagaacctctacgagtcggcgaataccccgctgatctcgtacctgaacaacgccatcaaggccaaggagttgttcaagcgcgacaaggactacgtgatcatggacggcgaagtcctgatcgtcgatgagcacaccggccgtaccctgatcggtcggcgctacaacgagggtctgcaccaggcgctggaagccaaagaaggcgtcgagatcaaggacgagtatcagacgctcgccacgatcacgctgcagaactacttccgcatgtacaacaagctggccggcatgaccggcacggccaagaccgaagagtctgagttccagaagatctacggcctgggcgtgctgccgatcgagaccaacaagccgatgatccgcatcgatcaggcggatctgatctaccgcaccgaagaggcgaagttcgacgccatcgtcgccgacgtggtggcccgctacgagaagggccagccgatgctgctcggcacggccagcgtcgccaagtccgaggttctcagccgcttgttgaagaaggctggcgtgcggcacgaagtgctgaacgcgaagaaccacgctcgtgaggcggcgatcgtggcccaggccggacgcaagggtgcggtgaccgtggccaccaacatggccggtcgtggtaccgacatcattctgggcggcaacgcggagttcctggctgcggaggcgctcgaggccaagggtctggatccgatcgagaacgccgaagagtacgaggccgcctggccggagatgctggccgcgctcgagcagcaggtcgccgacgagcacgaagaggtcgtcggcatcggcggtctgtacgtcatcggctccgagcgtcacgagtcccgccgcatcgacaaccagctgcgtggtcgatccggtcgtcagggcgacccgggcgagagccggttctacctgagcctcgaagatgacttgatgcgcctgttcaagtcggacgtgatcgcctgggtgctgcagacgctgaagatccccgatgatgttccgatcgagaacagccgggtgaccaagagtgtccagcaggcccaggagcaggttgagagccagaacttcgagatgcgcaagaacgtcttgaagtacgacgacgtgatgaaccgtcagcgccacgcgatctacggcgaccggcgtcgggtgctggaaggcgccgacgtcgaggcgcagttgcgccgcaccgtcgacaccgtggtggagcagtatgtacgcagcctgaccgctgaggacttcgtcgaggactgggatctggagtcgatctggacccagctgcgcacgctctatccggtcacgttgccgctggccgactacgccgaccggagtgatctgaccgtcgaagagttggtcgaagcgttccaggccgacgcccaggccgcctacgacgctcgtaccaccgaactcggcgaggagttgatgcgtgagttcgagcggcaggtgctgcttacggtgctcgaccgcaagtggcgcgagcatctctacgagatggactacctgcgcgagggcatcggcctgcgggccatggcgcaacgcgatccgctggtggagtaccagcgcgagggcggcgacatgttcaactccatgatggaggccttcatggaggaggtcgtcggctatctgttcaaccttgaggtcaaggtcgaatcggcagagccggcgccggaggtcggtctggtcaccgcggccgatggagccgcggtcaccgctgacgacctcatcgccgcagctgcggccgaagccgtgatcgctgagccggccgtgacccagcgcccgagcctgaaggcgaagggactggagaagccgaagccggccacggcgctggcctataccgcgcccgacgagagtggcgaagccaccagcaggggtgttgcggccagcgatgatccgtatgccggggtcgggcggaacgcgccgtgcccctgcgggtcaggcaagaagttcaaggtctgccacgggcgcaacgcctgagccgtgttcggctcaggccgcccgtcgcggcttgagccgtggccgatccaaggcgatctgaaggtcgctgattcgccactggcccagctcgcgggtcaggcgcagcgccgcggcctttgagcgtccgtcctgcacgaggtggacgctgacctccatcgcgtcggcactggggctttgcactcgcaacgagcgcacccggacctggctgccgcggtggtgcacggccagccgtgcgatggcggccagcaccgaggggtgggcgagatcctggagttgatggagcgggcgccgaccgcagatggcctcgatcactgacgcggtcatcgcactcacggcggcaggcagcggctcgtgagagtgctgaacggccgcgaccgtcggcggctcctgcagtggcaactcgggttgaaggcgatgctcaacgctgagcagtgggaacaccggctgggacgccactgccgagcggcggcagggaaccacccgagccaggtcggggccagcggggagcggtgtttcggctgctgtcaccggtcaactatgcgactgctgaacctgcccgccgcggtgtcgagaaacacattgtggataacttcctgacctgttgggcggtactcgccaggcgtcgcaggcgggcatctgcaccgcaatggtgctgtcaatggccgctggttctacgctaggggcagcgtctctggggggagggggaagcgcatggggtttttctccaagcggcgcgaaagcagagcagcgcgggtgattgagccggcgtcgggaatcgaggatctcctcgatcttcaggcgccgcccttcgcggtcggcttcaatcggacggcgaccaatctgttggtcggcatgacaccggggggacggcgctatcgctggatgcgctactcctacggcggtgggctttttcgattcgaaggccgcgtcttagtggtcgacctgccattcgctcttcccgacgtcttctggacgaccggaagtcgtacccggatcggcatggaggccggcgggcatctgggctgcttgcagtatcagaacctgcgggtcttcgcgggcgacgatgccttcgccaagttggtgttcgacgccattgtcggccccacgcaggagttgtcgaggatcgttcacgaacccatcgacctttcggtggaccgcgaccatctggtggcggtcgatccgccgttcgacgagacactgccgccctacctggccgcgctcgacaccatgatcgaagaactcgccgaagtggtgccgcgacgcctgcaactgcccccgcacgagaaggtcttctccttctatgggcacccggagtggcagttcgccgcggaaggcgatcggtccgtgttgaaggacttcggcctgccgttacgcctgcagggtcgggtggaggatcagctcagcgccgacatcgacggcgtccgcatggtcgcctttcgttacagctggctcagcgaggctgcggcacgagccgagatcagtcgtggcatggtgctggacaccgatcgcgattccgagccggtctgcgccttcatactggacgcccggcttccgggaatctcggtcaacggcgaggaactcggtgatccggtgaacctcggcaacccacgattcgccgaaaccttcgcgctgcgttccaccgacccgcagttggcttatcagctgttcaatgagcgtgttcaggagtggatgctggccacgcatccgtacggctggacggtgaacggcggcacggtgcggttccatgtgccgacccatgatgcgctgctggtgggggagtgcgaggctgcgctgcacgggtggctggatcgcatcccgcgcgaccttcgggactacttgaagctgccgaccttggcggcgccggcccacctgtagtgcgcccacttcgcccgacgacggtggcggctgagtagggtggttcgggtgagtgatccggttaccgtggcggaagcctcgctattggcccgcgaccaggaacaggcgccgtggcagcaggcgctggtgctcgtcatttccggcgggctgacccgggcagaactggccaccagagtcagcgagcggatcggctacactccgcgcttccgtcggatcgtgacggggtggccgacaccggtgtggtccgacgatgccgacatgaacctggccggacacatccgtgaagtgacgctggccgaaggccagcgcctcgagacctggctgcaggagaagctggctatctggttgccccgcgcgcatccgctgtgggagatcacgctggtcaacggcgtggcaccgggccggcaggccgttgtcgttcgggcgcatccggcgctggtcgacggctatgaccatgtacacctagttcaggagctcctcgacgaccagcctgaggacatcggcgagggcctggtcgatgactgggaaccggcgccggcagcatccccggacgtgagcgccgtgctggccgggctgggtgatcccctggccgcggttcaacgcgtcgccgccggtgtggtcggcctcgtggaaggcgggctgcgcacggtcaccacggctccgcagcggcactacgtcggtggcgctgagatcgagctgaacctggtcgacgcgattcggcgcagcttcgagtgcaccacccacgatgtcttgctgagccttgccaccgccggggtgcgcgcctggctcgccgagaaccgacgaccgcttgatgatccggttgcgctgattccgctggcgatcaccgagccggcggtgttggagacggcgatcggatgccggttggcgccggctttcgatcagctccccgccgccgaggatcacgccggggcgcggctgacggcggtggccacactggggcgggccagacgtgacaccggactgagcgttccggcgcgcgacctcatcgacctggccggctttgcgccggcgaccctgcatgcggtggccgctgggacggtcggggcgggtcgggcgcacaccgtgatggtgagtaatgtgcccgggccgacacaatcgcgctatctcggtcgggcgcgcgtgcggcaggtgtacgcggtcaccgggctcaccgacgccgaagtgatgaacgtctcgatcaccagctaccgcggacgggcgagtttcgcggtctgtgccgcggctccggtggacagctgggctgccgcgatcaccgctgagttggctgcactgagagcggaggcctgatgagcctgttgtttgtaccggtcacccaggaggggctgcgttcgtgggtgagcgagggccgttggccggccggggaggcggccttcaccgtcaccgccggcttggaagatgccttcggcgtttccgatccggaggaggccgagcggatcgctgtgctggtcgcttcggtcgccgctttgatccgcggtggacgacgactcgtcgtcgtcgctgaggccgttccggtgccgcggccgtccgcggatccagacttcggtgaagtcagcacgcccgagttgccctacgccgcggtcagcgcgatcttcgccgacgaggcgagacaacctctggtggcacccgcagcagcggccgtggccggccaggcactggcgcaggcgtgggacgagccggccgtcaccgcgttattgagcggggcggacctgctatggcatgggcccggggaatgggaatcggtgctggccggttgatgctggaaatggccgaaaggagcgcgcatgcccagatcgatctggaagggtgccgtgtcgttcggcctggtgacgattccggtgaaggtctacggagctaccgaagagaaggacatcagcttccgccaggtgcacgtcgctgacggtggccggatccgctacaagcgggtctgcgaggtgtgctcacaggagatcccattctccgatatagccaaaggctatgaggcccccgacggccgtctggcgatcctggacagtgatgacttctccggtctgccctccgctgatggcaagaccgtcgaggtgacgcgctttgtcgaactcgagcaggtcgatcccacctatttcagtcgcacctacctgctggaggccgacggcgtcgggaccaagccatatgtgctgctccgcgatgcgctggcaaaggccggaaaggctgctgtggtgaaggtggccttgcgttcgcgcgagacgctggcgctgattcgtccggtcggggaagtgctgcgattgcacacgatgctctggcccgatgaagtgcgcgacgatagcttcgtccgtccccccaccgacatcgcggtcagcgaaccggagttggcgatggccgagatgttgatcgaccagctctccggcgacttcgatcccgacgcctacaccgacacctatcgcgaggcgctggagcaggtgatcgaggccaagctggacggcgtcgcgttacccgaggaggccgaggaggggccgcgcgcggaggtcgtcgatctggtggcggcgctgcgggcctccgtcgaagcggcgaaagcgcggcgggctgccggctgaattgccttctgtgaccagatcgacgggcgctcgtacttccgttgagccagattcgcgccaactgtgtggacggaccaacgaagtgccggtagcctttctggtgctgattcccagtaaggtgccccccgtttgggtgccagaatgctccgcggtccaccgcaagggacgccgctccagaaggcccggtttgcgccgggccttctctctttttgcagtctgtgtcggactgtcagcgacgtgaggcatgattctcaacatgacacatcacgtggctgcaacgaaccgggtccgatatcgaatcggtgtcgacgtgggctcctactcggtggggctttgtgcgattcaatttggcgacacgggagcgccggagaggattcttgccgcgacaagctggctgcatgattcaggggttctcgataacaagactgcgaccactcgccttgccgcggctggtgttgcgcggcgtgcgagaaggctgcggcgacgccgtgttcgacggttgcgcgagctggatcgccggctcgtcggatggggctggccggaacctgcggaatcttccgatccctacgctgcgtggagggcgcgtgcgcgactggcttcggagttcgttaccgacgaggtcgaacggcaggagttgctggtgcgggcattgcgccacatggcgcgtcaccgcggttggcgcaaccccttcacgcgcgtggccgcgttgcaggcggtgacgcagccaagtgaactccttgaggcgttccgggaccgagtctcggcggaatgtgggtccgcggttccagcggacgcttgcgtcgcagagcttgcggtggcggcgttggaccatgggaaggggcagccactcaggatggggcggtcaggcgcctcgcggcctgggaaggatcgcggggaaaaggctttcagcttcctcgggggcaagctgatgcagtccgacaatgccaatgagatccacgcttacggcagggtgcaaggactcagtgccgatcttgtacacgagctcatctcgctggtattcgctgcggagtctccaaaggggtcgcacgtccgcaagattgggaaggacccgctgaacgactctccgagagccgcgaaagcgacggattcgttccaacgattccggatcgcatcggtcattgcgaacattcgggtgggtgccgctgacggtggtcgctgcttgacggtcgatgagcggcacgctgtcttcgactacctgatgaacatcaagctcggcgaacagcccacctgggctgaggtcggcaaggttattggcttgtcgcggggttcgctgagtggcactgcggcgctagaccaggactccgaggagcgcttgcctttgcgtccgccaatctatgtcaccgaccagaacgtgcgcatggccaagaacaccctggccactgtgcagaactggtggatgtcggttgatggtgaacgacgcgatgctcttgtcagtctgttgatcgacggcgtccacgacgaggagacggcggccggaacggaggcatgggagcttctcaacgacctggacgagagcgaacttgccgaactggacaaactggcgctgcccgcgggtagagcggcctactcgctggatacgcttcgtgcgctcacccagcggattcttggctccgaggacgacctacacggggcccgtaagcatgtgttcggtgtctccgacagttggcgtccgcccgcggagccgattggcgagcctatcgggaatccgtcggtagatcgggtaaccaagatcgttgcgcgttgggtggaagcggcggagcgcgagtggggtgctcccgaacgcatcacgatcgagcatgtccgagaggcgttcgtgtctgcaaggtcgcagcaggatcgcgaccgcgagatgaaccgccgtttcgccgagaacgagcgcaagagacagctgatcaagaccgacgagaagatcgaggcacgagttcgctccgccgacctgcgtcgatttgaggcgatcacgcggcagaagggacaatgcgcctactgcggagtcaccatcacgtacgcaacttcagagatggatcacatcgtcccccgcaaaggagtgggatcgaccaacacccgcaccaatcttgtggctgtgtgtcttccctgcaaccgttccaaaggtagccagcctttcgccgcctgggctgatgggtccaaccgagacggggtgtcggtggatgaggcggtcacccgaacccatcactggactcccgaccgggggataagcaggaagggctggaacctgtttctcaaggaactccgtgagcggttgacccgaaccgacgaagaccctgagattgacggtcgttcgatggagtcggtcgcgtggatggccaatgagcttcacgagcgggtggcggctcatttcgccgaagcgggcacaaaggtctccgtctatcagggtgcagtcaccgccggggctcgggaggcggctgggattgctgacaggatcccgttcatcgggggtggcggcaagacccggcttgatcgtaggcatcacgccgtagacgcggcagtggttacgttgttggacgagtccgtcgctcgcaccctggctgagcgcaacaacctacgtgtcagccaggactacgatcctgatccagccaacgactggaggtcgtactgcggcagcgggccgaccgctcagaggaggtttgccgattggcgatccgacatgaacaggctcgcggagatccttaccgacgccttcacaaatgatcgagtagtggtccgggagaatgttcggctccggctggctaacggcaaggtgcacgacgacaccatccgcccgtttgaggtacggcttccggttggcggcgcattcacgcgtgaccaaatcgatgcggcgtcgacaccggcactgtggacagcactcacgcgcgatcctgacttcgacgaggtcagtgggctgcctgccagcccgtctcggagattgagggttcacggcacccactacggtcccgatgatgttgttgcgctgttcgacaagccacgtgcagccatcgccgttcgtgacgggtgggccgagttgggtgattcgatccaccacgcacggatctaccgctgggaagaacggggcagggccaagtatgggatgctccgagtattcgcggccgatctatatcggcatcgcgacgaggacctgttctcggtggagcccgagccatcttgggtttcgatgagggttgcgcacgcatcgattggacgttcggacctcagccagaaggagtacctcggctggttggtcccaggtgatgagctgctgatcgacatgtcgaacttgctggacgggcacgtgggtcgggcgagcgaagcgcttgggctgggaacactgcagcggtggaagctcactggaacgagcgatcctgccaagttgtcgctagttcccttgtttgtcgccactgagggcgtcgacaagttcctcggggtgtacccggaacttgaggatgcaagggcgtcgatcgctgcgatccttacccgctggcgtccctcggtggacgtcctattccgcaatgggtttcctcaggtcattcgtcgcgacgccctagggcgcccgcggctggagtcgcgagccaaccttccgactggttggcgtgtcgggtagtcgacgatggcgcgtggctggagggtgctagatgcgaccggtttcgaagggacggtcggcggtgcacgtggccgagtgacatttgccgaactgggagggtcaagccgggccgtcgcggcggaggatgttgcggtcatactccttggaagccgagcgtcgctggatgcgacggcgctccactacgccgcgaaacacgacatcgccgtcctgttcgcagactggaaatcggtgccgttcggcgggttctatccctgggctgagcacactcgcgtcggtgctcggcatcttgcccaagcgcaactctcgcttccccgtaggaagaatgcctggcagcagttgatcagggcgaaggtcgctggtcaggcgtcgaacttgtcagcgataaacccccgcgcttacgcacgaatgatggcgatggccgcgcaggtgaagtcgggagaccccacgaatattgagggcgctgcggctcgctactactggtcgcggctctttggtggtgaagcattcgcgcgtgatgccgatgggattgacggcttgaactccatgctgaactacggatacacggttctccgtggttttggcattcgagcagtgttgggggcggggctctcaccaagtctgggcctgttccatcgtggacgatctaactacttcaacttggttgacgacctcatcgagccgttccgcccggccatcgacaacgtggttgcccgcttcgaccaagacgcatcgctcgatgagactcagacgaagcgtgccgtcgtcgctgctgcatcccagcgattcggcgcggacggtacccggataccggctgtgctggacgatctggctcaacaactcggtcgctacgtggaggggggcgtcgctcgcctaagcgttccacggtggtgtggcccgccagcgattgaccaggtagccgacgatggcgaagagtgacgagaacggcatgtggaacctggtcctgtttgacctccccgtgaagaccaaggagcagcgtcgagtggcgacccagttccggcaccttctccttgacctgggctggtctatggagcaatacagtgtgtacgtgcgctacgtgcccaccggaatgagtgtcgtgccagagattcaggagatgcgtaagcacgtgcctgcgcaaggcaaggtggagattgtcggcatcaccgaccgtcagtggtcgaaggcggtcagattcttcaacgcagcgcctgaggaaccaccggaggcgccggctcaactgacgattttctgagtccccttcgccccgagagcccttgccagagccacattgcgggccctggggaagtctatcggggggaaggggagctgattcccagcagcaggacgagctcaccgtcggccaggggaagtctatcggggggaaggggagctgattcccagctcaacatcgccacattcgaggcctttttgaagtctatcggggggaaggggagctgattcccagcagtaagggcagttggtgatgcctgctgcgaagtctatcggggggaaggggagctgattcccagctgtccttgtccgtcagtgagttccggacgaagtctatcggggggaaggggagctgattcccagcgaggaccgaacatggcagaggacgtgctgaagtctatcggggggaaggggagctgattcccagcaagtgctcgtgctcgctgcggaggtcgggaagtctatcggggggaaggggagctgattcccagcgggattgcggactcattcgagttgatgcgaagtctatcggggggaaggggagctgattcccagcgaatttgttgacgatgcgccggcgctgcgaagtctatcggggggaaggggagctgattcccagcgtgcccggttcgtggtgatcgaggtggggaagtctatcggggggaaggggagctgattcccagccgtgacgccgtcgcgtcacggatcgcctgaagtctatcggggggaaggggagctgattcccagcacctcgtgctgctgtgcggcacctgccagaagtctatcggggggaaggggagctgattcccagccccagcgccaggtgacgccatccaaggtgaagtctatcggggggaaggggagctgattcccagcgcgtggcggcgatctgcacctccgagacgaagtctatcggggggaaggggagctgattcccagcctcagcgacgagtacggcgaagcgcccagaagtctatcggggggaaggggagctgattcccagccgacagtggtgcgtccggtgggtcgtgagaagtctatcggggggaaggggagctgattcccagcgcgttgaggcggtactggatcgatcggagaagtctatcggggggaaggggagctgattcccagcctgcggctgacatcccttgggtgcccccgaagtctatcggggggaaggggagctgattcccagcgtggtgcgcaccgcggacaccgcgctgtgaagtctatcggggggaaggggagctgattcccagcgtcggtttcgggttcctcgggtggttggggaagtctatcggggggaaggggagctgattcccagcaatcctgcgcggttccaagcacggtcgggaagtctatcggggggaaggggagctgattcccagcttccgtcgcagctgtcgtattgcaagatgaagtctatcgggggggaaggggagctgattcccagccaagtggcgacggatggcctctgtgagggaagtctatcggggggaaggggagctgattcccagcctttcgtgtcgatgggcgtcgtggtagggaagtctatcggggggaaggggagctgattcccagcttggtctcccagacggcaacgccgacaggaagtctatcggggggaaggtgagctgattcccagcccacggaaccgatgcagctaacgcagcagaagtctatcggggggaaggggagctgattcccagcacgtccatgaggtgggagatgacttgccgaagtctatcggggggaaggggagctgattcccagccctgcttggtgtagctggtgccgatcgtgaagtctatcggggggaaggggagctgattcccagctacaggtcgggagggatgatgctcaagcgaagtctatcggggggaaggggagctgattcccggccgaggaactggcgccaccgcggcgcggggaagtctatcggcgggaaggggagctgattcccagccgcggccgacgtagcacggcagcgaggagaagtctatcggggggaaggggagctgattcccagcgcgtcgagcccgctaccacctccgcagggaagtctatcgggggaaggggagctgattcccagcgtgctgctgacaaggcgaggtcgggtctcgcagctacgagccgtgctctgaccggcgagatgactttcccatctgaggcaatggggtgggcggcattcgccactaggctgagcgccgtgatcagggagcggcgatgagtgacgggccggtgcgtccggctgcgggtgagcatgctgccgcagcagttcaccaacgcgtgcgcgacgggatcctcagcggtgagttccgtccgaaccggcggctggtggaagaagagctggccgcagaactcaaggtgagccggacccccgtccgagaggcattgctgcggctgcgccaagaagggctcgtgctgcagaaccgtggctggttggtgcgcgaccacgcccccgaggagatcctggagtatctcgaggcgcgcgccgaggtcgaggccgtctcggctcgcttggcggcgacgcggatcaccgtcgaacagttggccgagttggaggcgttgatcgggcagatggagggcgagcccaatcggcggctgttcaacgagatcaacggcgagttccacgacctggtgaccgaggccggcggcaaccgtgttctggccggtttcgcacgcagttccaagatcaactactggacgttcagtaccccggtgttgttcacgcccgaccaggacgccgtggtcgatcgcgagcatcgagaactcgtgacggcgctgcgaggcggtgatgcggcggcggccgagaggatcgcccgggaccatgtgcagcacaccgcggagattattgccggctccctggggctgcagcgccactcctgatcctgggggcggtgtcgcctgccggcgcgccctgtatacaatgctgtatacagaaggtttccggtgtgccggtccggtctcgcgcgagactgagagtgcggcagcaacccgaggaggaagacgtggaagcgatcacccaggtgccaaccccggtcaacgagccggtgcgcagctatgcccccggcacgagcgaacgggccagcctgaagagtgaactcgacggcctgctgtccgccggcccgatcgaggtcgcccccgtcgtcaacggcgccgtccgggcggcgcaatcctctgaccgctatcaggtgcggatgccgtccgatcacggcacgctgctcgcgcgtgtcagccaggccactgccgatgatgccgtcgcggctgtcgaagccgccggacgcgccaagcaggactgggctgcgatgagcttcgacgatcgcgctgcgatcttcctgcgagcggccgagctgctcgccggcccctggcgggaccgactcaacgcctcgaccatgctcggtcaaggaaagacgccgcagcaggccgagatcgacgccgcctgtgagttgatcgacttcttgcgcttcaatgtggccttcgcccgtgagctgcacacccaccagccgatcaacgcccccggtgtctggaaccggctcgactaccgtccgctggacggcttcgtctacgccattaccccgttcaacttcacctcgatcgcaggcaatctaccgaccgcgcccgcgctgatgggcaacaccgtcatctggaagccggcgctcacgcagaccttcgctgcgcagttctggatggatctgctcactgaagccgggctgcctgccggcgtgatcaacatgctgcctgggcacggctcggccgtctccgatgttgcgctggcgcacccggacctgggcgggatccacttcactggctcgacccgggtctttcaagggctgtggtcgcaggtgggcgccaatatcgccggttaccgcgcctatccgcgcctggtcggcgagaccggtggcaaggacttcatcgtcgctcatccgtcggctgatgccgaagccgttaccgcagcgctgatccggggagcgttcgagtactccggccagaagtgctcggccgcctcgcgggcctacctgccgcgcagcctgtggaaccggatccgtgacgacctggtcgcgcgcactgaagcgctggctgtgggcgacgtccgagacttcaccaacttcacttccgcggtcatcgacgagcgcgccttcgtcaagctcagtggcgcgatcgatgcggctcgggcctctggtgacgccgagatcgtcgccggtggcagctatgaccgcactgaaggctggtatgtccgccccacggtgatcgcctccgacaacccggtcaacgacatcttcgtcaccgagtacttcggaccgatcctgggtgtgttcgtctacgacgatgccgactacgcagacgtgctggctctggtcgacaagaccagcggctatggcctgaccggggccgtcttctccaatgatcgagccgcagcgatccaagcctccgaggtgctgcgtcacgccgccggaaacttctacatcaacgacaagcccaccggcgcggtcgtgggccagcagcctttcggcggctcgcgagcctccggtaccaacgacaaggccggctcgctgtggaacctgatgcgctgggtgagcccgcgggcgatcaaggagaatctgctgccgccaacgggcatcgattacccgcatatgctgccggagtgatcgacgaagtgagtgtccggttggccacgccggccgaccgggatctgctggtgcgctgtcgagaggacttcttcgctgccgaaggctgggagctggacgccgccgagctggagggcttccgctcccaatggcggacctacatcgacgctcacctggaccgcgatttcctggccgcgctggtggtggggccgcagggcgacgtccgctcgctggccttcctcgtggtcaccgagcgtccggcgacgccgcgggcgccgtccggccggcaggggacggtgctgaacgtgctcagctacgcccagcaccgccgccgcggctatgcccgacgtgcggtggagacattgatcgagcaggcgcgcttgcgcggtgtctcccggttggagctgtcggcctcggctgacggcgagcagctctaccgcgggctgggcttcaccgaagccgcgaccgacgggttctttccgatggcgctacggctcgtcgactgaagccgaggtcaccggctgacgcaggatcgtgcgcagcttggccggcgcagttcgggtgaagtcggagaggtagacctcgtggtgtgctccggtcatcgtcaggccatgctcggggatgaactgtgtgtgcaggcggtgcagggtctcggcctcgtcgtcgaagggcccgcggtgcagcgtctggacgcagcgtccttcggccagaggctccattcggagctgctcgacccccgggccgcccttggcgcgcgccgcagcgcgcgcggacgagaacaactcggcgtcgatccaatccggcaccagcatgagcagggtccaatcccaggccgccttgtcgagggccgtggtgaaggcggacggatcaggggaggtccacaggccctccagcggcatcaccgtgtagtcgcgacccagttcgttcttgctggtgaacttgagtttgtagccgacgctgaacagcgcggtcacggcctcgctgaacggtccacccgcattcggatcaccgtgcccgtcgatcatcaggtacgtcagcgggggaaggtcgatgatgtcgaagacgccggcccgggcctgatagcagggcaggctggatttgaggtcgagtttcggcatggcgttcacgcctcgatcggcaggcagacgtcggtgatccatgcccgcgggttcggatcttgcgctgggcccacccggtagatgttgaacatcggaccgacgcgcaggcctcgggccgccacctgcgcgcccagggctgcggtcaccgcggacatgccgtcgtagctcccttccagggtggccatcaggacctgctgttcgtcgatccggcgacaggccagcggagcgtcgacggccacggggcgggggagttggacccagacttcgacatccacgtcggtgtcttggtagtcctcgtcgtagaaggtcgccccggccagcccgaactgctggtggcctgcggagaccagcgggggcatcaggcgctgccacagaaggtgctcctcggcataggagccgatcacgtcgcgcacggacgcgaccgtcatggcgggcagggtggtcaggcggacgtcgatggtcatgggggtctcctggagctcgtcgatgagccggtcgagcaccgccaggcgtgcggtgagcagcccctgctgatgcaggagctgacctcggtgtctggtgagcgcggctgacatggtggacggatcgttgaagccggacagcagggcggtcatgtcggcgacggtgaagccggcatcgcgcagccggacgatctgctcagcggtctccaactgggccgggcggtagtagcggtagccggaagcggggtcgatttcggccggggtgagcaggccgtgttcgtcgtagtgccgcagcatccgcacgctgaggcgggccagtcgtgaaaacaccccgatctgcaacagggcttcatgatccatggggccaggggacaccctcacatcgtggcagagtcaagccggcggcgagggaatgccggcgggggatccggggttgggcagatgagcgattagtgagggtctggctatggattttgcggttaccgccttttggctgcttcatctgctcgctgcggcgagcatcgtcggcgggtgggcggtcagcctggcgcgcccgaagatcggcttgacggtgatggcctgggctgcgcgggcgcagctgttgatcgggctggtgctggtcaatctgaccttcgccgaggggctgaactgggccaagctgatcgtcaagctcgcactcgccctggtcgtggtggcgctggcggagatcgccaactcccggttcaagaaggggacgcccgcccctgctttggcggccgtctcggctgcggtcaccgtggtgatcagcgtgatctccttcctgtggcactgagccggggtgcgacggcgtttcgttgccgcagtggggtctgatcggttgacgtaatcgaacgtctgttcgatcatggaggagtgaaaaatgccctccagctgccggcgtccgcctcttcggcggaactgctggagcagctgcgggcacaagtcatcggcgccgaggcccgggtgcgacagcagcctttcggtgttgatccagccctggccccggtgctcggtgagcccgggttgaagccgggcgcggcatattgcctggattcgtccggagcgctgctgcatgccttgttggccggtccatcgcgcgaaggccactggtgtggcgtggtcgggctaccgaccttcgctgcagaagccgccgcagctgccggggtgaatctggaacgcctggtgctggtccccgagccaggtgagcagtggttggcggcgacagcagcacttgccgatgtgctgccggtcttggtcgtccggccggcgggtcgggtgcgcgagggtgacgcgacccggctgctctcgcgactgcgggatcgcggcggcgtcttgttggtggtcggcgagtggccgcgggccgaagcccggctggtcgtgcgcgaacgtcgctggttcgggttgggcgatggcttcggccaccttgccggacggcaggtgcaggtcgtcgccgtctcctggcgctatccggccggacgttcggccagcctcctgctgccggccgctgatgggcgagtgcacccggttcccgagccggtggtgccactgcgagcggtcggttgagatgggtgcgcggactgtcgggcaacggtgtctggctttgtggttcccctcctggtcggtgctggcctgggcgctggccgaaggtcgtagcgtcgagtcgccggtggctgtggttgcggccaatcgcgtcattgcttgttctgctgtcgccgttgctgacggcgtccgcgccgggcagcggcggcgcgaggcacagtcgcgttgcccggagctggaggtcgtcccggccgacgaggcccgcgacgctcgtgaatatgcgccggtgatcgactgtgtggagcggctggcgccgggggttcagatcattcgtccagggctttgcgtgttgcaggctcggggcctggcgagctatctcggcggcgaagaactggcggccgaaaccctgctggaagcggtgatctccgagctgggcatcgccaccgggcgggtcggggtggccgacggtgtcttcgctgccgtccacgctgctcggcaggccgacccggtactggtggtcgatccgggccgctcagcggcctttctggccgagctgccgatctcgcgattgggcgacccggcggtgactgaactgttgccgcgcctgggggtgcgcacgctgggggagttcgccgctctcgaagtcgagcgggtgcgtgagcggttcggcacggccggagttcggttgcatgccctggctgccggtgcggactcttcgacggtgacgccgcgtcgtccaccgccggagctggctgcccgtctcgacttcgagccgccgctcaccctggtcgaccaggtggcttttgcctcacgagcgaccgtggctggctttgtcgacgggctgaccgctgccggcctggtgtgcaccgaggtgcggctggagttcagcggtgagttggacgagttcagcgctcgcacctggctgacgccgggggttttcgatgcggcggcgatcactgatcggatccgctggcagctgcaggccgctgccgggacgcagatcctg

SEQ ID NO: 3261 - DNA, 16933 bp, synthetic construct
  source 1..16933: mol_type = other DNA
  variation 15515..15761: note = note, n is a, c, g, or t
  misc_feature 1..16933: note = Synthetic
gtcaggcacgccgaacagtgcgatgccgccaaggcctgcgtccaccacccgagctgcttcggcgcggaccgactccatggtgtgctgcacgacgcctggcagggagctaatcggtcgcggctcgtccagaccgtcggccacgaataccggcagaatcagttgggacgggtgaactcgggtttcggccaccaaccgccttacggcgggtgtgacgcgcaatcgtcgtggtctgcggacgatctctgacatgcgaaatatgctcctcagctgggtataccagccattgtggaccatcactgcgtcagtggccgaacagtttggcgttcatgatctggataccggcgagtgcaacactggtttcatgactcgaagtgtgcgcgacatcgaatgctggctcaccgacatggacggagtgctggttcacgaggaacgaccggtgcctggtgcagtcgaactgctgaaccgctgggtggatacctcccggcgatttctggtgctgaccaacaactcgatctataccccacgagacctgtcagcgcgcctggcgctgtctggactgaatgtgcccgaggagaatctttggacctcagccttggccaccgccgccttcttggcgggccaaccaggcgaaaagaccgccttcgtgattggtgaggctggactgactaccgcgctgcacgaagctggcttcgtgatgaccgaaaccgaccccgcctatgtggtgatgggggagacccgcaactattccttcgaagccctcaccaaggcgattcgcctgatcaattcaggtgcccggttcatcgtcaccaatcccgataccaccggaccctcgccgtctgggccgttgcccgcgaccggtgcagtggcagcgatggtgacctcagcgactaaccgccagccctatgtggtcggcaaacccaacccgatgatgtttcgttcagccatgaaccggatcgaagcccactccgaaaccactgccatgatcggagaccgaatggacaccgacatcgtggcgggcatggaggcaggcctgctgaccgccttggtgttgtcgggggttaccaccgaagaagagatcgagaccttcccctaccggccctcgctggtgttcaactcggtggctgacttggtgccgctgatctgatcgaggcgctgggtcggggcaccgctgatctcggcgatcagttcgaagtccttgtcgaggtggagcacgcttcgccccgtcagttctgcggtggccgcaatgagtaagtctgggattgatggtgcccggtgctgtccgcgttgagccagcagacgctgtagctcgatagctcgttcctcgatcgctggcgtgaggtattccaccggcatcgcggccagcggattggcgccgaaagcacgaaccagttcgctggcggagcgtgctgaatagccgacctcaagtcgagtgagtgttgagatcgcgatcagcccacgctcaatccggttagcccattcgagtgccgtcggactggcaggcagccggaccagggcggatttgtcgatcagccaggttgtgtttacgaccatgctgatgtcatcaccgagtcatcgtcgagatcggtcaccaactccgcaagattgaccaaatctgcgaccgtaaccgggttgttgagctgacgggcgctttggtgcaactggcgtcgcaaatactctgctctggatagtccgagccggcgagcttgctggtcgagcagctccagatcctcgggtggaaagtcgcgaatcaacaaatcgggcatggtcatcacctccgtgatatctgatgatatcaggggttgtttggtaagggagctaccagcgtgttcagccatacccgtgaggctagacgccacggctgacattcctcagatggtgccaagggtgcacataacggcagcgaacaagcccgcggcatctggagtctcggcgattgcggccacttccagaccggccgcattggctgccgccgctgagggctgaccgatggccaccacctttggcccaggtaggccgctggcgctgagtgcggcttgaacgatagagccggcggtcaccacaaaagcatcgaaactgccggcctgccaagcagcaacaacctcggcgggtacttgtccgaagacagtgcggtagatcggcagttgcacagtggtccagccgcgttcctggagtccgacgatgggctgatcggaggggtgttcagccccgggcagcaggattcgcccggtaccgcttggaaaggccgacgccagtgccgaaccgccgccaccctcgggaaccaggcttactttgaccccggcggcagtgagggccgcagcagtgccgctgcctaccgtcgcaaccttggccgaggccaaggcggtgcccaagtcgatgcccagatcaaggcaggtgcgcacggcggctggtgagctaaacaccacccaatcccactgctgggtgaaagccgctgccaaaccagaattgggcagtggcagttgttcggtgaaggtggcggtggtcacttccgcgccagcttcgcgcaatgcctccagcagtcccgacggagtgcgggtcggcagcaaaatgcggcgtcccgccaacgatttgggcttgctggcgcccagatcgaccagggtcgccgcaccttggctgagtaagtcagccactaccgcagcgccggcttcggcagctcccgccgcgtcgccgctagcggtggcctgggcacgaacgctgcggctgccatcgacggccaccacgatcgcgtctaagtgaagctggtcgtcgatgagttgggcataggccccaaccggtgctgcgcaccctgcctgcaacccagccaataccgcccgctcggcgactgccgacaggtgcgagggccggtgatcgatcgcagccagcgcggcgatcacggacgcggcgtcgctgcggcattcgatggccaaagctccttgtgaaggagcgggaaggtaagtggccaggtcgaaacgctgggtgatgtgttcggccagtccaatacggatcaggccagctgcggctagcacgaccgcgtccagatcggcaccagctcgggccagccgggtttccacattgccgcgaatctcgacgatttccagatcgggacgcagcagccgcagttgagcggcacgccgtggcgaaccagtgcccaccttcgaaccaggagccaactggctcagggtcttcccgttggcgctgcacagcgcgtcggcagcctcttcacgcttcggcactgcggccaaggtgaggccagcttcagcggcagtgggcagatccttgaacgaatggacggcgaagtctgcggacccatccagcaccgcagcccgcaccgcgccgacgaagaccccagctccgcccatgctggtcaacggggcggtggagatatcgccatgggtggtgatcttcaccaattcgacttcatggccaagggtgcgcagtgcgtcggccacctgaccggattgtccccacgccagtttcgagccgcgggtggctagtcgtagcttcatcgcaactcctgattgggtcgggctggtcggtggtggcctagttggtcagctggggctgagtgcaggctagtcgccggaggtgcgctggctggcagcgcgttggtcggcagtgcattagccgatagcgcacagccaggcacagtcggcgcctggagacgcggattcgaacagcaaccgccatggcaatactggctttcatcggcttggctgataccagtggaaagcgcctcgccgatccgtccggccaggtcagttacgaatgcctcatgcaggcctgcggttggggtgcggatcaatcgcagccccagctcggcggcggtctgggcggcctgggtgtccagatcccaaatcacttccaggtggtcgctgaggaagccgatcggcaccagcaccaccgcatcggttccggctacggcaaagctggccagggcatcgttcacatcgggttccagccagggcatctggggtgggccggagcgggactgaaagaccaggtcccagtctttggtgacgccagtggctgtcttgatgcccgcagctacctggctggcgacccagcggtgctgctgcaggtaggcgtcaccatcgggtccggacgttgcggccatcgagttaggaatcgaatgggcgctgaacactagccgggtggtggctgcgtccagttctaaatcggtgggcagcgcggccaacagttgctcggtgatcgcggtggcaaaaccgggcaggtcaaaaaagggtggcagcttgcggatctccaactccaagccggtctgggctaaggccaagcccagatcttcgcgatattgccgacaagaggagtagcccgaataggccgaagcagcaaccgccaagatgcgccgatgcccgctattggctaagtcggtgagcacatcggcaacgaatggtgctgagttgcgattggccagggcgcaatcgatctcgatcccagttacggccaaagcttgctgcaaggacgccagtagggcccggttttgggcgttcactgggctcactccgcctagggcgtagtagtgcttgcccacctcgattaggcgctcgtcgggaatgccgcgtccagccgtgactcgttgcagaaagctgagcacctcagattcatgttcaggcccgccgaagcccagcagcaagaccgcgtcgtagctggacgattcgggcctggctgcctggcgcgcaccttcgcgcactgcagtctgatcggctggcgtttgcccggacgagggcggctgggttgccttgttcactgctggctcctggccccggccaaagccaactcggcttggcggcggccgtcggccacacaatcgggcacgcccaccccgcgaagtggtgagccagcgacccgccaagcaggcaactcggccaaagccgattcgacggtcgccacccgttcgagttggcccacggtgtatttgggcatcaccgagtcccagcgcgaaatcttcacctgatcagggcctttactggccttcaacacactggtgacatgttcgctgaccgctttgatcagttcgtcatctggggcagcggcgatggcgccaagtcgaccaggcacaaacgctcgaatcaacaccttgccgcccggagctcggccggcccatttggctgacgaaacggtgacgccgctgatcggggcgccatcggcctccagccaaccgtgcgtggtgagtggttcagcgaaggcgtcttcggcatagatcaggctgagcacattcgaggaggccagtggaatctcgctcaacgccgacgctgccgccggtgctgccgaagcaagcagcttggctgagccgtcaaccccgcaggccagcaccaccgcatcaaagatctgggtggctaccccttcgccgctgccgagtttggcgctaactccgccagtggcagttggggttagtgacaacacctcggtgccggtgaaaatctgggcgccgccggccgtgagctgatcggccagggcggtgatcaagctgccgaggccgtcgcgcagggttcgaaatggggagttggcgcccctgggcccggccgcgcgggctttgcgtccagcggctaaggaggccagcatcaggctgcggtgggcgtcctcgtcggcgcgcaggctgggcagcaccgcgtccaggctgagttcgttgacgctggccccatagatgccgccaaccattggatcggcgaagcgctgcacgatgccattgcccaatctggagcgcagaaagccgccgatggtcacgtcttggccagcgcgcagtttgcggggcagcgctagatccagcccggcgcggagcttgtcgaggggggaaagaatgccggtggttacgaacggccaaagcttggttggtagcaccatgcccatcccggcgggcaatggacgcagccgtccgcgggagcgcaggtagacggttcgggtgcctgagattgagatcacctgatcggtcaggccgagttcgtcgatcagtttcagggctgccggacggtaggccacgaacgaatctgggccatgctcaatgagtagcccgttgctgatttcggtgcggagtttgccgcccaggtgatcggcggcttccaccacgaccacctcgacgctgacctgttcgagactggcctgtttcgcgttggcctgtttcgcgttggcctggtcgacgccggcctgttcaagctcagcgcgcccacccgcaggcgcagcagttccccgctgagcctgccaggcggcggccaggccggtgattccgccaccaactaccagcagcctcatctagccctcggttttgggctgataggggcacagcggatccgattcgagcggatcggaagtccaggcataagcccgggctcgggagccgccgcaccactggcggaactcgcacaccccgcagcgtcccttgaactggtcggggtcgcgcagcgagcgcatcagctcggtgttgcggtagagctccaccagtgaggtgtctttgacgttgccaacctcgattggcaggaagcccgacgggcaaacattgcccaggtttgagatgaacacgatgccgttgccgtcgcgaatgccaaagccgcgcgacattgggcccgcctcgattgcggcggtggtcttgcccgcgcgcagcatcggggcggtcattaggcggcgaaagtgcatggcttcggtggtcttgacccgaaactcggtttcccggttgaccttggccgcccacatcagccacttttcggcctcacctgggtcgagttcagtcagctcggtgccgcggccgattgagatcaggaagaacaagctccactgcatcaaggtgtgctcgctgagtaccttggccactgcgggcaggtcttcggcggtcttggccgtgactagggtgttcacctgcactggcaggccagcttcggcagcctgatccaaagcggtcaaggtggcatcgaaagtgccaggcaccattcgaatgccgtcgtgatactcggccgtggaggcgtccagcgaaagcgagatcgcctgaatgccgatctctttcatccagaagatcttttcgcgggtgagcaggggagtgaccgctggggccagcgatacgccgatcccgcgatcgttggcagccgcgaccaattcggccaagtcggcacgcttgagcgggtcgccgccggtcatcaccaggtggggcaacgcctcgccatcggtggcgaaacccagaatgtcgtccagtactgcgatcgcctcagcagtgctgagttcgccaggtgctgcatcgggcagggcggtggctcggcagtggcgacaggccagcccgcaggcgttggtcagctcccagtagatgatcatcggggcgcgttcgtaggcccaaagttcgttgggcttgaccgagccgatgccgttggcgtgcgccattttttactccttgactgctttcggggggatcgagtgcaccagctcaacaacgcgagtcagcacttcggggtcggtgtcgggtggtacgccatgacccaggttgaacacatgtccgggtgcggcctcgccttgggcgcagacctgacgcacttcgcaggctagttcgctccacttggcgctgagcatggccggatcgaggttgccttgcagcacgacgttaccgccgagcagtgcggacgcctggctcagcgtgatgtcggtggctaccccaactacatcagcaccagcggccagcagattcggcagcaggtctttggtggcagtgccgaaatgcacccggggcacgcccaggtcggcgataccggcgaatactgcggtcgaatgcggctgcacggcagtctcgtattcggccactgacagccgtcccacccaggagtcgaacagctgcagtgcgctagccccggcctcggcctgagcgcgcaggaaggtggtggtgagtctggccacccaagccagcaattgattgaaagtgtgcgggtcggcggccagcatcgcccgggtggcaggcagttcccggttgggtcgaccctcaaccaaataggacgccaaggtgaacggtgcgcccgcgaagccgatcaggggagtgtcgcccaactcggccaccacgatgccaaccgcttcgcgaatcggggccagcgcagctggatcaagctcaggtagggcggccacatcagcagcggtacgaatcgctttgcccattaccgggccaacgccgggcacgatctccacctcaatgccagccagcttcagcggcaccacgatgtcggagaagaagatgccagcgtccacgtcatggcggcggaccggctggcaggtgatctcggcagccagttctggcttgaggcacgaatcgagcatcgagatgccttcgcgcactttccggtactcgggaagggagcggcctgcctggcgcatgaaccaaaccgggcgccgggtgaccgggcgtccggtgtaggcccggatcagggcagagtcagcagtgtttccggcaaccagcggatggttgtcgggcaattgaaaggtcacgagtgggcctccacctcgatgccgaaaagggtttgaagggcgcgctggtagtcagccaggtcgccagcacgggccaattcggccgcgcgcaaggacggtgtgtggagcagggcattcgaaacgcggcgcagcgaacgagctacggccgcggcggtgtcggcgtcgtagcggcgggcggccgattcgatttcgcgctcaatgaactggctcacgtgcgagcgcatcgcggtcaccgctggggtggcttcgcgcccggattcgaggtgctggtaggtgtcaacgccgcgggtcaccaggtctcgggcggcgatcacggccgcgctttgttcggccggggcgtgggcgccgatttcgtcgaggtcgatcaggtcgacgccaaccagttcggcggcatcggcggccacgtcgccgctgagcgagagatcgagcactggcagcagggcgctttcgccgcctcgggcgctggccagcagggctgtggtcaagattggcgtggtgtggtcttggcctgaacaggtcaccactagatcggcttcggccagggctggcagcagggcatcggagctgatcggctccactgggtgggtggccgcgaagcgttcggcgcgaccgctgcgcgaatacaccgcgaggtcttcacagccgaggcggcgaaggttggcggttaccacccgggcataggagccggtgcccatcagcagcactcggcgtccggctagcgggaagtggcgttgttcaactagggccaggccaactgcggcgattgagcgtccggtggcgcccagatcggtttggctgctgacggctttgccggtggtgagcgcggcgtgaaaaagcctgcgcaaggctggggtgttgtgggtttcggcgctggcgagggcatcgcgcacctggccgagaatctcggcctcgcccaccaccatcgcgtctagtccggcggcgacttcgagtaggtgttggacggccatttggccggcgtgcacttcaaactggtcgagtagttcgctgcgtccggctggcagggattcgccgatgatccgcagtacggcttcaactgaggggtgaaacagtggggcgtcgaagtaaatctcaaagcgattgcaggtgctcaacaacacgtagccgccaacttcaggggctgcttcgagagcctgacccacggattgcgtggcgccggtgagggcggacagttcatccagggttaccaggtggtgactaagacctaacgcggcgatcggcacgcccagcatggtaaccccaagtcaggggctgactacacatcgggggcgagcttcttgcggttggcttgcttgagttcggtggggactcgaggaacggccccgggtgtgccgccgagtaatcgacaagttgcgaatcgggtctaggtgctttgaattctggagtctggaagcgccctagacggatgctgagttcgggagataagcttgagtcagttgattcccagtaaggcaccccttgattgggtgccagaatgctccacggttcgccgtcttaggcgccgtctttgaaggcccggcgaatgccgggccttctttttgtccaacactgtcgaactgtcagtgtggtgcgcaatgattcggtcatgagtgaggtgcgtgagccgaaaggcccgaaaaactatcgaatcggtattgacgtagggctgtactcagttggtttgtgcgccatcgagtatgactccattggctgcccggtgaagattctcgcctcggcaagccacatccatgactcgggggtcttggaagagaagaccggcaccacgagattggcggcggcaggagtatcgaggcggacgcgcaggctaattcgccggcgagtgaagcggctgaaagcattggatttgaggtttagggaactgggttggccagaacctgaagatgatctcgatcccgccgcgccctggcgggcacgggcgagactggcctccgaagtggttctgaatgaacgcgagctgaaaacactgttatggcgcgcgctgcggcacatggcccgacatcgcggctggcgaaacccctacacgccagttgctgcactaaagaggcctggcgcttcgagcgaactgtttgatgagttcagggcgcgagtagagagccgtaccggaattgtcacggctggcgatgtcaccgtggcggaactcgccgtggcagcactggataatgaccccgcatcgccgctacgcatgggtaagactggcaagtcaaggccagtcaaagagcggggggagaagcaattcagttaccttggcggaaagctaatgcaaagcgacaatgcgaatgagattcacacgtatgcagaggtgcagtcactcagtgccgagcttgttgacaaccttgtcgagttggtattcgctgcagagtcgccgcgtggctctcactacgagcggattggaaaggacccacttgatcagcagcctcgcgcgccaaaagccagtgacgcgtttcagcggttccgaattatttcggtactcggaaacgttcgggtcaattccggtggtgtgcagcgcaggctgagcttgggggagcgtcgtgcatcttatgactttctcctcaactacaaggcaggtgaacagccgacctggtccgaagtggcccaggtcctggggtatgcccggggggagtttggaggcgtcgcggcccttgacgaaaacttcgacgagcggctgccgctgcgtccgccggtccacgttactgaccacaacattcgccaggcacctaagggccttgccccgatcagggattggtggggttctgcgagcagcgcgagcagagatgcactggtgtcgttgttgatcgatgggcacaggaatgagggcagcgctgctggcgtggaagcatgggaactcatgcactccttcgctgaagatgggttgcttgagttggacaagctggcccttcctgctgggcgtgctgcatattctctgggctctttgcggaagctgaccgacaggatgctcgctagtgaagacgatttacatgacgcccgcaaggctgtgtttggtgtggatgacgactggcacccgccagccgagccgatcggtgcgccgatcggaaacccctctgtggatcgggtcacgaagatcgtggcgcggtggattgaggcatctgagagtgagtggggtgccccggcacaggtaacgatcgagcacgtgcgtgacgcgtttgtgtcggtcaaaagccaacgtgagcgtgataacgagatgcgcaagcgttttgatgccaatgagatgcaacggctggccatcaagaacaacgaaaagatcgtgtcgcgagttcgtattgcagatgttcgtcggctcgacgctgttcaacggcaaaatagtggatgtgcctattgtggggagacgatcaccttcgggacgtgcgagatggatcacatcgtgccgcgaaaaggtgtgggttcgacgaatactcgcgaaaacttggtagctgtgtgcgtgccgtgcaatcgttcgaagggtagcttgccgttcgcggtctgggcggcaacgacagatcggcgcgaagtctttgtcgctgaagcagtcgctcgcactaggcattggaaccgggacaagggaatatccccaaaggggtggcgtcgctatctgaccggcattcgcgcacggcttgaacgaaccgatgctgaccctgagattgatgggcgatcgatggaatcggtggcgtggatggccaatgaactgcgtgaccgcattgctgccaagttccacgaggcacacaccaaggtgtccgtgtaccagggtgctgtgactttcggtgcccggcaagcggccggtatagcagacaagatccccttcattgggggcggcggaaagacgcggctcgaccgtcgtcaccatgtggtggacgccgcagttgtgacgttattggatgagtcggttgctcgtacacttgccgagcgcaacaatttgcgggtttcttcggactatgagccgaatcgtaatttcgattggcgcagctacgagggcagcgggccaaccgctatccagagattcactcagtggcgcatcaacatgaacagactggcagatctgttgactgctgttttcgacgacgatcgcatcgtagtgaaggaaaatgtgcgccttcggctgggcgacggaaaagctcaccttgacggaataagtccgttcgtaatccatcgagctgtgggcgattcactctcccgcgacgaaattgatgcggcgtcaacttccgcgatgtggactgctctgtcgcgtgacccagattatgacccggtcgaggggctgccagccaaccccgcgcggaggttgcgggtccatggcacacactatgaggcgcaagatgagctcgctttcttcgataaaccgagagcggccttggccgttcgtggcggctgggctgaacttggagattcgatccaccatgcgcgcatctatcggtgggaggaacgagaccaggtcaaatacgggatgctgcgggtgtttgcagctgatctgtatcggcaccgtcataaagatctattttcggttgaaccggatcaatcctggatttcaatgcgggcggctcttccttccatcggtcgggctgagctgtcagataaggagtaccttggctggctagtgcctggggacgagatgttgattgacatgtctcggcttctggacggcacactcggtgagttttcagctgccttttcgctgggcgcccggcagcggtggaaggtcacagggtttgaggacagtgggagagtcaacctggccccgctgtatttggcgaaggaagggctcgagaagttcatcgagctcaatcctggtgagtctcaacgcaggaagtctctggagagcgtatttaataagcggtggcgagttagcgtcaataagctgtttatgctcggtcgcccggtcgtggttcggcgtgattccttgggtcgcccgcggctggagtcgaaagcgaacctgccggtgtgctggagtgccaggtagtcatggcaaggggctggcgggttctcgacgcaacgactttcgaaggcgttgtcgggggtggtcgtgggcgtctaaccttcgccgcgcctggaaaacaggaagattcggttccggctgaggatgttgccgtgatcttgttgggccagcgagtgtcacttgactctgcagcgttgcattacgcagccaaacatgacgtcgctctgttgtttgccgactggcgaggagtgccttttggtggtctctatccctggtctgatcattcgagggttggtgcaagacatcttgcgcaggcgcagctgtcactgcctcgacgaaagaatgcctgggggcagatcattcgggcgaaagtcacgggccaagcgaatgtgctggctgaagtcgacccgcagggggcgcggcagcttcggcaactagttaaccaagttaggtctggggatccgggtaacactgaaggtgtggctgctcggttctactggtcacggctgttccaaagcgtgcggaggttcactcgtgaccaagatggtgaggacccgctgaatggcatgctgaactacggctataccgtgctgcgtggttttggaatccgggctgtcttgggtgcggggctttcaccaagtattgggatttttcaccgagggcgttctaattttttcaatctagttgatgatctgatcgaaccgtttaggccggctatcgactcggttgttgttggacttgggtcgtgttgttctttggaggacgctgagaccaaacgatcggtggtggctgctgctacgcagcagttctgtgacgatggcaccaggattcctgcggtattggatgatctcgcgcagcaatttggacggtatgcggagggtgaccggtctcagctggcggtgctggcatggccgggagtgccgcgtgcggtgcgggtggttgatgatggcgaagagtgacgagaacggaatgtggaacttggtgctgtttgacctcccggtgaagacccgtgagcagcggcgttgtgcaacgcagttccgcctcctgctactggacttgggttggtcgatggagcagttcagtgtgtatgtgcgttacattccgacaggtatgagcgttgtccccgaggttcaggagatcaagcgccgggtgcccgcccaagggaaagttgaaattgtcgggatcacggaccgccagtggtccaaggcaatcagattcttcaacgcagagcccgaattgccctccgagccgcccgcgcagctcacgattttttgagtcagttctccccggtagtcctagtcagctgccaaatttgcgcctataggaagtctatcggggagaactggagttgattcccagcagactgattcccaggtgcgcggtaaggcgaagtctatcggggagaactggagttgattcccagccattggacgggcgtgcggcccggactcagaagtctatcggggagaactggagttgattcccagcttcggtcctgtcatggcctggactgctggaagtctatcggggagaactggagttgattcccagctctattcggctgttggctcagctggcgtgaagtctatcggggagaactggagttgattcccagccccacaggcgtggccttgccgttgcggcgaagtctatcggggagaactggagttgattcccagctctcggttgcgccactcggactcggggagaagtctatcggggagaactggagttgattcccagccatccctcggtgaggtgaccgacgccgtgaagtctatcggggagaactggagttgattcccagcgagaagggcttcgggcgctcgagccagcgaagtctatcggggagaactggagttgattcccagcgcaacgcgggcgtggttgatgaggattcgaagtctatcggggagaactggagttgattcccagcagcacagtcctttgctgctgtgtggctggaagtctatcggggagaactggagttgattcccagctgcctcatgagggcactaactgcggtcggaagtctatcggggagaactggagttgattcccagcccggtcaccgacttcacgactggccactgaagtctatcggggagaactggannnnnnnnnnnnnnnnnnnnnnnnnnnnnnnnnnnnnnnnnnnnnnnnnnnnnnnnnnnnnnnnnnnnnnnnnnnnnnnnnnnnnnnnnnnnnnnnnnnnnnnnnnnnnnnnnnnnnnnnnnnnnnnnnnnnnnnnnnnnnnnnnnnnnnnnnnnnnnnnnnnnnnnnnnnnnnnnnnnnnnnnnnnnnnnnnnnnnnnnnnnnnnnnnnnnnnnnnnnnnnnnnnnnnnnnnnnnnnnnnnnnnnngaagtctatcggggagaactggagttgattcccagcggtttgggcggggtgcgtaggtggcccagaagtctatcggggagaactggagttgattcccagccgtcccacgtcgaggcctgcgactcgtcgaagtctatcggggagaactggagttgattcccagcctggagtgaagcgtgaagacttcgtggagaagtctatcggggagaactggagttgattcccagccgcgacgggatgcgcatcgatccggtcggaagtctatcggggagaactggagttgattcccagcttgtggagcggcggggtgtgacgcttcagaagtctatcggggagaactggagttgattcccagcgtgtttgcgtcctcgccgggctggtatagaagtctatcggggagaactggagttgattcccagcgaacaccgagacgggcatcccggaggtggaagtctatcggggagaactggagttgattcccagcatcgaaaggatggccatgatcgcagcaggaagtctatcggggagaactggagttgattcccagcgattaggtcaggcagcgtccgcttagttgaagtctatcggggagaactggagttgattcccagctcagtgggaggcttcggcttcacagcccgaagtctatcggggagaactggagttgattcccagcgcggccaccagccatgcgtgctgacattgaagtctatcggggagaactggagttgattcccagccacgacaggtgcggtgggcttcggttcggaagtctatcggggagaactggagttgattcccagctaccggttgagggtgtccttctcaccaggaagtctatcggggagaactggagttgattcccagcccgacgggcagccggtcggtaagccggtgaagtctatcggggagaactggagttgattcccagcaaaagtctgctgctgaactgatggccgagaagtctatcggggagaactggagttgattcccagccgggaggatttcgaggccttggtaggcggaagtctatcggggagaactggagttgattcccagccggctgcggtcactgtcaccgccgccacgaagtctatcggggagaactggagttgattcccagcatggtgttctccttgggtgtcggtggtggaagtctatcggggagaact

SEQ ID NO: 3262 - DNA, 14464 bp, synthetic construct
  source 1..14464: mol_type = other DNA
  misc_feature 1..14464: note = Synthetic
gcctccgagcgcggcgcgaccaaagttcgcagggaagcccatgacgccatcgcctccgacctcggggccgagtgcgtgttcaaggcctacatccggcacaccgagaaggtcagccaggacatgagcaagttcggccgattgtccttcgaattggagaaggaaatcgacaacaacccaaccttctggcagctgcggcggggtcaggtcaaccccgccgatgcggtcatcatcagcccggccgcgcggggggtcgccgaggactttcaggccctggcgaaggaggtcttgctgcgcgcggctgactgccgcgcggcggcgatcgagaaaggaaactggccatgagcctcacaccacaacagatgccggccgctgacctgcgcgacctcaccaccccggacgcgccggcagaaaagcgcggacacggcctagccaacctgatcgacgagctgccagcctccggggctacccgggcgagcacggcggtcgcccacgccgaggcacccaccccggcgcccggcgccgacgcgggccaggccgccgcgtccgagccgccccgggtggcagctggtgaaggcaaggaccgggtgcagatcgtcgtctacgtcacggccggagtgcgtaagcgcttcgacgactaccgacaccgtcagaggctcaccgccggccgggtaatgctggaagccatcagcgccaaaatcgacaccctcgccgataccgtcgcggcggcccgctacagcaccaccccgtcctctgcgctgttcccccccgaccccgccgccgtccgctacctcggcggcggcaccgttgccatcccggtcaccgtcaccccagagcagtgcgaggtgatcgccgatctgggccgcagcctgggcatcgaaactcgcagcacctggatcgccgcggttctcaacgactttcttcccgggcgcaaagaccggctgtccgcgtcggcaacccggcctggactgactagcgcgtgctgaacaacgggcctccgttaaagcctgcggaagtggccgggcgatttggctgaggcaggcgaagccttcatgcgcgatctcgggtcaggagccgtgagctccgactccgacggcgacacccaacgtgaccgcgacatccaacgggtcgccgacttcgtgcgccggttacggcgagtagccctacacccgcttgcgaccgacacggtggccggcgaggagccggcgatgcctggctccggcttgagaaaacttatggctggcgaagtccacgccgtagtacgcagcgacggcactgcgaccttcacgtcaagacttcccgacgaagcgctgttcgagtcgttagccgtccgggttcgaccattcaccctggacaaggaccggctgcactggcggaaggcccttaacgcactggataacctcaccggtaccgatgacgtggcgctgcggctatcgtctcaacggctgcgggaagaatggacatctgcaacggagcgatcgtcccggccgcgggcgtactggagcggctacgtggtggccggggaagacggcgacgaggaagaggcccgccagttcagcgatgtcgaactggcctacgcgtggctctatgaagatgcggcgcatggcgaccaggcgtcgactggctacttcgatatcaccgagcggtatcgcgccgcagttggggttttctcccacatcgcagtggtcgccatcgagacgctgcactacatcaacggcttggttgaactgggcgtgatcggcttaccccctgggactttcaccgatcgggtcgtggtcacagacaccgagtatgtggtggaaggccgggggtacgaagccccgatgggagctgacctcagcgccgtgccgatcggcggcccgctccccagcgacttccgaacagtgttcgacgctgttcaggagatcagccagcaaaggtccggccggaccgacaacgatgcgccgcccaacaaccggacgaacggcgtttgagcgcatgctggcagggaagcctggccggtggcccccgttacgcatggcttcgaagaatcctcagcgccagcagcacttctcggtgcatcccaaccggtccgcggtcagtctcgacaggcccggatacagcggtcactaccgagtggtggatagcgctgcggccgcgccccgggcccggttcaccgcgcgggtgatgctgccgccgcagcttcgtcactgcggtgccgaacgggtcggtgaccttcgcggggtcaacatggcgttttgtcgtcgccggcgcccggagcttcgcggtcgaccacagcgacaccgaggtgttgccgccgttcggttacaccgatcgcgctcgtgggccgggatggttttggtagctagcgcgcgagtctggtcaccgtggtcagtagttgaccgccgcgtcggactcgtagagcgccttcgcgtcgtgggcatcccggacggcctggcgcaccgccggtttggtcaggtcgagcacccgcagtgcgtcaccgaccttcgcgacggcctcgatccggccgtactgggcgccgaaggattcggcgaagtcggccagcccgcgcagtttggggatggcgtcggacatgtggtgtccgtggggatcgatgatgttggcggcgatagttccctcggcgcggcgggagaagaacagaaagtcggggcgcagcgccttgaacgtgttgctggccgggtctcggtaggcgatggccagggagtccttagcggagcgggacggattgcgccaccaggcgacgaatcccgatacgtccttctcctggtcgaacaccatggtctcccagtcgttgaggtgggcagggaagtctccgtgctcgtcgcagagcaggtgatgtcgtcggcggcggatctccgtttcgacgccggccgcgtcacgaactttggtgtcggcctgtccggtcctggggcgggtgagcagcacgggttgcggttgggttgtcatcgactccagttcgtcgtagaccgcttggcgttcgtcggtgagtcccttgcgctgcacccgggttttcagcagccagtcggcggcgagtttgttagcttcgtcgtcgaggtcttcggcgacttcggggaccaaggcgagggaggccagctgcacggtggcttcgcgcaggtcgtcctcatcggcgtcgtcgccggcgagatggctgacgtaggtgcgggccagctcggcgctgaacacgcgccctgccgcccggtaggagtcctggatggcgcggtggtcggcggtgtggggtatctgaatgccgcggcgatgtccgcgttttccgcctgtctcgccgcggcggccacctcgcctatcgcgggcggtgattcggagcctcagcccattggccagtcgaatgtcagagtattggccgcgtcggacaaccgaaatgcctcctggaggtggcgcagggtctcgaccgcgcgggcatcggatgcagcgacggcggccatgtagtcggcggcggcgcggcttcgctcggctttggctgtggcctcgctgatcgtggattcaacggctgcggccaacgcggcccgtagtccctgattagccaccagtgcttcggccagcggcccggtgcgagggttcatgtcggggggctgctgcgcccggggggcggtcgggtgcggtccgaacccgggggggaaggccgcgagattggagtcgaggaagtagcggggtcgctggccaccccggccttcgacatatccggcgatgtcgccggccaacaaccgttgcctcaaagccttcggactgcgtcggtgtgacgccgccacgcgcgacagcggcaggtagatgcgcgacgggtcggggggcgcagtcggcacccaccccgggatcaccgagtcgcggtcggcgctgctcataggaccgaaatctacccgttgggctcgatatcggaccaccacctgagccactttcgtccgatatcgacttatcgtgaccgatcacgacacccgcatcggtatatatcggtctttagcgtctccttgagtacacttggcgacatggccgcccccgcaacacaggcaccaacacgcgatatcactcgacgtcgcccccggtcggagagtcgccggctgaccgcaatgatgctgctgcgcatgaccgaggcccaacgcgccgcactggatgaagccgcgaccgtcggcggattccgcaacgcccaggaactcgtgatggccagactcgcacatgacctcgccggagccgcctccgcgtagggtccgcgcaacgcaagatccacttttgtctcatccgccccgcgtgtcggcggcggatatcttgcgtcgtcatgtcaccatcgccctcagtagttctctgagggaggtttcgatgcacactgcggatcgcgccgcgcccaaggattggggcacacgcggtccagctgtccgattcaaggcgacccgagagggcctgtctaacaagggctttcacaagaacagggcccctagtggctagctagagaccctgttctgacatttcgggaccgagtttggcgctcggcccgcacccccgagagggctgattgtctgttgcaagacaccactgaggatatgtcatgcgctgaacctggtcgagacgacacgcgcagcaccgcacaattccgtgaacgttccacggccgcaaccgtttcggcgcgcaccgacgccgccgcggaggtgtggtcgcagctggctgggctgctggcggcgagcccgcgggtacggctgtggaggcccgacaccggcttcgcggtcctgcgcccgctgaccaagcagctcccggtggccccggcggcggtcccgatctaccggagcagccgtgggcgcgccgggcgccgcgtgacccgcctgctcgtgctggactgcgacgccaaggccgtcgacagcgctacggtcctcaatgactatgtgcggcttgctcattggattgagcaagccggcggccgattcgtcgcggacgtgtccaccagcggcggccggcatctaattgtgccgctgaaacactctgtcagcgtcgacgaccttcgccccctgttgtcagcgttggcggcgcgctgcaccagcctggacaccacgccgatgctcaacgacgtcaccgggtgcatcaccgcgcccggctccgtgtgccgcgaaggcggtcaccgccaactcatcggctcgatctctgaggccctcgacgcactcgccgaacgcagcgccgccgatttcctgactcgcttcggcgagatcatcggcgcccctgtggccatcccgtcggcaggagacccgggttcggcgctgtcacgtgacgttagtggcgctctccctgacccgtcttcggtcttcgaggggcgcggcgatcagcgccggctgagaccttcctaccgtcgcaacgatcccatccacccggccgtagctgccttcgctcagagcggtgtcctgcccgccgatcgccgctggctcagccgctcggaggcccgccaatccgccatcgttgccgctgtccagtccggcatgaccctcgtcgacctactgaccgccatcgcaccgtctggtccctggtgccacggcctaggtgccgcctacgcccgccggccgtctcggcgcaagtcgtctgccgcccgcaggccagacccactcaccacagcgagacgactccgtcgcgactgggaaaaggcatgtcgctgggtcgagcacaccgtccaggttctccagcactgcacgcacaagacactgcacacagggggtgggggagaggtcgccgggacgctccccgctcaccggctctggctcgccaacgcgagctggtggtgcagcttctccctccggtcgcaggcgagtcgtacggcgactctaacggtgctccaggccgtcgccgtcatggcggcgcgcaccggacaggccgcccacggggtgcccacggttggtgtggggggccggtcgctgtcgctggcggccgggttgctgtcggagtcggcggtgtggtcggcgctacgccggctgcgcgacctccccggttcgccgctgctgctcatccgcaagggcagcgggcccgacgccgacctctacgcgctggtgacccccgacctcgtcgacccgcgtcccgacgcccctggccgcccgaccgtgtccccggtccatccagcctggatcgtcgtcggccaccaccaccgccgcatctacgagctcgtgatcgccgggctcaccactgccgaggcgctcagcgccgcggcgcatgcctcgcgctcatcggtgtacgcctctttggccgaactgcaacgccacggcctcatcacgcgcacccgcggccacattggcgccgggaaagtccacctcgacgacctagccgaagcccaccgactcgatgaggaacgcgagcagcggatcgccgatcaccagcacgcccgccacctctggcgccagtggcttcagacccgccgcgaccccggcgcagatactggagcccccgcggcagtgacgccgcctgccgagctctacctggacggatacgacaccaccccgtgcccggagtacctggctgcggtcttagcgaccggcccgccaccgccctggtagccgaaacggtcctcacgtcggggtgctgccgcgccgggcggccgtctccacaattttcgcgggcctcgcccacaaggtgctcgaatcattccggcgagcacccagcgccagggcgtccacaaccccgccttgcatggctggaacagatgatccggggcgatcgtgcgccgtgacgccgctgcgaccgcctaagcctcaactgttcgacgagcccgatgacgccggtctcccgtcgcggtttctcggcgtgtacgtgtcgaggatgtcgcgaagggtccgggcggtggcggtggcgtcggcggcgcgtagatccgcggcgtgggcgtggccgcgggcggcctcggcggcggcgcctgcggctgccgccgcggcttcgtgctggtctcgggatgcttcagcggcggcaagccggtcggtgagggtttggacgtcgcggcgtagttcggcgagctgggcttcggcggtctccgcgcgggtgaccgcggtctgagcttcggccaaggcgtcggcctcggcggcgatcagtgctgcccgttcggtggccgcggtctcggcggcttcatcgcgggcggccgataccgcggccgaccacagcgggtcaagcacactggccagcgcgtcggccggcatgtccggcacgtcgcgggccggccggttggtccgcagccaggctgcggcgctgtcggtggagactcgggctcgttcgcgcagcgcccgcacggtgaccggcgccccttcgacggtgagttcggcgaacgcatccgctagcgccgcggcggtggccgatgcggtagtggtcggcttggccatggggcctatccctcccgtgattgagcgaaagaaacggtatctgttacggaaacgtttctattgtacctacttgtggtgcccgaaagccttcgcgggcagcgcggatcgccgcgtcgcgcacagcgatttctgctgccaccgcatcggtccgccgctccgctgcccgcacggcggcagcggcggcagcggcccgcgccgcggtgtgcccgggcccacccagagcggccgcaccaccagcgcgggcgatcgcagcgcgttcacgctgctcgaactgctgggtgatgcgtgcgcgggcagcggcgagctcggcggcctcccgcgccaggtccagggcggccggttgcaccgtcaagtcgccgtgccaacgcagcatggctcccagcagcccgatcggccggtgcggtgatacgggaatccagccatggacacccgcccagtccgcaaccagcgtgtttacgtcacgagacgaccagcctgcttctgccggggcggccaatacgctgccccaggcatgctccgagtgccgcagcgcccatggcggcgatgctggatcagcccgccaccgcgcggccagccgactccccccgcggtccgggtctgtgcggcgcctcgcgccgcgtccaccggagcccgaagggccccggctcggtgtagtgagtacagataaaccagaaggtatctcaccaaaatgagaccctacggggtggggtgacagagcagatgatccgctggtcagggcgggggagtcgtgcagtgcccacaccgaagcccagccccggccgcggtcaccgacgcgccacgacgccatccgctcacgacgagtgcgctgacggccgcgcatgacctccgtggccaggcccagcaggagaagcgcagtatcggcacgctgcaccgtgcgatcgctcacgccggccacttcggcaagcgtctcgatcgtcgggcggcaattgcggccagtggagaaatccgcgaacgcggaccgggccgcggcaaccttcaggaacgaggcgcgaccaatggtgttggcgcccatccggggccgggcgtcgacggcgtagcgcaagtcgtaggcgaccgcggccgcgagcaaccaccgctcggaccgaccggtccagcacgcaacgccggcccacgccccggggtctagttcgaggacaatcgcaggcggcttcttcgccgcctgcgcctcaccggccacgccgcgtgtacagggcgcctgaccgatccgagccgcccacggccgcgtacgggcctcaccacggcggcgcagcgcggggctgcacccacggtaggacgcccggcgccgatcgtcgctgagcccgtcagggccaaccggcagagcagccagcggggccccgcgccgccaaacaggggcatcgccgctgtcgctgtcgatgcagtcagcgccgctggcgtttgcgtcagcggcgagagtcaccctcgctgaacaggagggcatggtgatgggccacagttattgcgcgccgggtcttttcctgaccgcgcgcatgaggtaccgtgatccctgcgcaggtagtgcaccaggaaccttccgaggtccaatgggtatggaacgcccagagccggagcggctaactccgactcgaaatctccgacgacgtggccccgcctctggtggggccttcgtcgtgacggaggggatttccgtacccgctattgagatgtcatcgtctgcccgagacaaaagccgggcgtgatgggctacatcgccagcggcaaagcctccttgcagtcgagttcacgcaccagcgtcggataacccgtgagccggcaaatgatgtcgctgagcagcgtggcccgcgcgatcccgcgcgcctcggcttcggcctcgatcagatcggccaccgcgtgaatgctggaatcgcggttcgcctcggtgaagtctgctgcgcccctgtgggtttcggcgaaacgcaggggctggggcagtcggcggaccaggtcctcgcggccatagaaccggcagactaggtcagtggtcagcgtgcaccgatccatcccatgggcggcggcatcagcctcggcggccagccggacgaccgcaggcacccgcacgggcctcacccaagtgcagctcgcggcagcggcggggatgtccacgacagtgctgtccgatttcgagcgtgccgaatcgcgctggtcgcccgccaaagccgcccggctcgccacggttctgggcgtcagcattgacgacctcgaacgggcctggcagcgcgcccgcacccgccctgccggggcgcctcgctgaaagtatcccgcgggaaacccatgcgtgttaacagcgtccaatacatgatgagcaatcagtaaacactatttgtgtgagggatgcactatccccgctggcattttggctagacgatatgaggggttggggccggaggcctcggctgcaaggtaagcgtgggtttgccagacggttgatgctggtagagccacattgcagaggtctggaggccactgttcgagggtgggaagtctaccgggccttgcaggcccgccagacggttgatgctggtagagccacattgcagaggtctggaggccactgttcgagggtgggaagtctaccgggccttgcaggccccgcccctctgggcgtagggtaggaaatgaactgattcctagtaagggcgctccttcgtttgggccgcctgaatgctccacggctctgccgtcacggggaggcccaaccgggcctcccttttttcttcgcttggtggccgaccgggttcggcggttttgtcggagccccgtgtaactatgcggtcatggcatcgaatcctgcgcgtgatcctcgttcctaccgcgtcggtatcgacgtcggcacacattcggccggcttggcggcggtcgagttcgacgagttgggcaggccgaccaaaatcttgagtgcgatcagctggatacacgactccggcgtgctcgacgcgaggaccgcgaagacccggcgtgcggaggccgggctggctaggcgggtacggcgcctgtatcaccgccgagacaagcggctccaggccctcgaccgatggttagccgagcggggctggtcgtcgttgcccgacgtcggcgatccgtatctggcgtggcgggccaggaagacgttggcgacggagaagatcgtcgatgaaactctgcgtaacgcgcatctggcgacggcgcttcgccacatggcacggcatcgcggctggcgcaacccgtttgccggtgtggcgtcgctgtatgaggtgtccacgccgagcacgttcatggtgggggagccagggacagccaagacgggtccggtgcccggtttccagcagcgcgttgaagcggcgacgggagcccgagccgccggcgatgtcacgatcgctgaactggctgtcgcggcgatcgacttcgacaaccgtgtcccgctgcgcgggggcaagaccacgaaccggcgggtgaagcgacgggtcgcgcgggtgttctcctacatcggcggcaagctgatgcagtccgacaacgccaacgagattcacgcctacgccctcactcaggggctcccgcgcgaggttgtccggcagatgatcgacctagtgttcgccgccgagtcgccgcgcggttcctggctgcacaaggtcggcaaagatccgctcaacggccagccgcgcgcaccgaaagccagtgacgctttccagcggttccggctcgtgtcgactctggccaacgtccgggtcaacgacgttgacgggcagcgcccgttgactcccggcgaactcaacgccgcctaccagtacctcctggccgtcgaccccggggaccggccgacatgggctgatatcgcccgggtgatcagacagccgcggcgttcgatcaccggcgccgccgacaccaaccctgacggcggtgaacgcctcccgttgcacccgcccgtgcatggcaccgatcacaacctgcgccagctccgcaagctgcgtccgctgcgagacggctgggccgctgccgacggcgaggttcgagatgccctcatcgccctgatcgtcgactcctacggagatgaatcgagcgcggtgggggtcaccgccgcggcgatcctgaacagcctcgacgagacggaactcggtgaactagaccggctcgatctcccggccggccgcgcggcgtactcgctggactccctgcgacgcctcgccgatcacatgctggctaccggcgatgaccttcacgtggcacgcaaggccgtgttcggcgtcgccgacgattgggtgccccccgccgacgccatcggggcgccggtcggcaatcccgcggccgatcgggtcttcaagatcgtcgcccgattcctgatggccgccgaagccgagtggggtgttcctcagcgcgtctccatcgaacacgtgcgtgacgccttcagctccgaagcgagactccgcgagatcgaccgcgccaaccagaagcggttccaagcgaaactcagtcaacgagagtccgtgggcgcctccgtcaaagccgaggggcgagtccgggagtcagatgtccgccgattcgaagcggttgagcggcagaacagccagtgcctctactgcggagagccgatcacctttgagaccgccgaaatggatcacatcgtgccccgccgcgggccgggctccagtaacacccgaaccaacctcgccgcggtgtgcatcacctgcaacggttccaagtcgaacatccccttcgcacggtgggctgaacaatgcggcacccctggggtttcggtcaaggaagcagtctcgcgcaccacgttttggcggcgcgacaacggggttccggtgaaggtgtggcagcggttccttagggatgtccgcgaccggcttgaacgaaccgaggaagatcccccgatcgacgcccgctcgatggagtcggtggcgtggatggccaacgagctgcgggatcggatcgccgcacacttcaagggcctcaacacaagttcgggaacacagcaggtgttcgtctacagaggcgcgctcaccgcggaggcccgcaaggctgccggtgtggaggaccgcatcccgtggatcgggggcggcgggaaaacacggctcgaccggcgtcatcacgccgtcgacgcggcgatcctgacgcttctcgacggctcggtcgcgtgcacgctggccgagcggatgagcatccgcgacgctcaacgattccaccgcgatggcatcgagacgtggaaaacctattcaggtgtcaatcctgccgcacaacaacggttttcaacctggcgatcgaacatgaaccaactcgccgaccacctcgcaatccacttcaatcaggatcgcgtcgtcgtcacagaaaacctgcgcctgaggatcggtaacggccgtgtccacgacgacacgatcaacccgatgacccgccgccgcgtcggcgacgcgttcacccgcgccgacatcgacgccgcctccacacctcaactctggatcgccctcacacgcgaccccgagttcgacgacaagaacgggctccccgagaacccgtcccgacgcctgcgtatccagggaacctggtacaccgcggacgaagaaatcccgttcttcgacagaccccgcgccgcgctcgccgtcagagacgggtgggcacaagccgacacgatccaccacgcccgcatctaccgatggcaagagaagggcgccacgaagtacgggatgctccgggtattcgccgcggacctccacaaacacgcccgtgaagacctgttcaacgtggcaccgcacccggcctggatctcgatgcgcaccgcccacccctccatcggccgttcgaacctcagcgacaaggaatacctcggctggctggtgccgggcgacgagattttgaccagggatgtcatccacactcccgcgggcttaggcccagtggccagatggaaagtacgcggtttcgaagaccattcccgattcaacgtcgaaccgtgttacctctccgaggagggcctggaccgcttcctggactccgctgaactcgaccccgatgccaaagacaacatccgcgagatcattgccggaaaaggccgaaggaacgtcaacagtttcttcaacacagcacgtccaatgatcgtgcggcgcgacgcgttgggccggtcgaggctgaaatcatcgtcggggctgccggtttgctggtcggttgagtaaacgggcatggcgcgcggctggcgagtgcttgacgccacatcctttcaaggggttgtcggcggtgcccgcggtcgcatcacgctgaccggccgcgacgggacgtttcagagcgttcccgccgaagaagcagcagtcctgctgattggaagcaaagcgtcagtcacctctgccgcgcttcactatctggccaaacacgacgttgtattgctcggaaccgattggcgcggtgtgcctttcgctggcctgtatccatggtcggatcacgggcgtgtcgcggcaaggcatctagcccaagcccgcttgacgctacctcgaaagaagaacgcatggatgcagcttgtccgagcgaaaatctccgggcaggccgcaactttagcaacggtcgaccatgtcggcgccgagtacttggcagaactggccaaggaagtacgctcaggggattcgtcgaatgccgaagcgactgcggcgcggttctattggcgacacctgtttgcagaggtcgaacatttcgttcgacaccaagatggtcacgacacattcaacgcgctgctgaactacggctacatggtgttgcgcggttacggaatccgtgcagtcgtcgccgccggcctatcgccgccactcgggctgtttcaccggggccggagcaactacttcaatttggttgacgatctgatcgagccattcaggccggcgatcgatcacaccgtggttcggctgggtcccgcagcgtcactacaggatgtttagtcggcgcttctggtagcgcctgtgtatcgatctggtagcaggggtgcggggatctggtagcggcccggaggatcgctttcaccgcagatgactgattaccggtatgtgatgggcctgctgttgcaggggttggcttataggcagatcgaggcgatggcgggttgctcacaccgggcgattgcccgggcgcgccgggtgctcgacgacgagcggttgacg

SEQ ID NO: 3263 - DNA, 5006 bp, synthetic construct
  source 1..5006: mol_type = other DNA
  misc_feature 1..5006: note = Synthetic
ccggcggcggcacttgtcgagggcgtcgccggcgaggcggacgacgtggaagggatccatcaccgcgaccgcgtcaggcagttcttcggtggtggcggtcttgaagccggtgaagccgtccatcgcgaccacttccacctggtcgcgccaggcttggtcgcgttcggacagccaggtcttgaacacgctcttggagcggccctcgaccatgtccagcaacctgaccggtccgctgttcgtccttgctggcgtcaggtcgatgatcacggtcacgtacttgtcaccgcggcgggtgtgtctccacacgtgctcatccacgccgatcgtggtgaccccggcgaaccgtgccgggtcgttgatcagcacccgcttaccctcggcaagaaccgcgtcgttcgccgtgttccaactgacgtccaagccttcggcgacccgggccaccgtcaggtgctggaccacgatcccttccagagcccaccgcaacccgcggcgcgacagccgcgccttgggctcggccgccttcgcggtgtcctggcgccacacatgagcgcagtcggcgcaccggtaccggcggacgagcacttccagcacggtcggtcgccagccgagcggttcgtgagcgagccgccgcaccaccgtgtcacgcaacagaccgtgctggccgcagcggtggcaccagtcgtccggatcgacaacccggcaggcgatgaccgcccgtccaggttcgagtcgttgaccaacagcgacgagccccaactcgtcgagccggcagaaggtggtcaggtcaggggcagcgaaggtagcgtcaggcacgtcgaggtcttccagatgttcggtgtgagaacctccatcctcggaagacctcgacccctaccccggcaccgacgcgccggccctgctcacaccccgcctacacccccgattgcgatgagccgccaaacccgcgcgccaaaggccaccgatgcgttccagcggttccgggttatctcggtacttgcgaatgtcaggatcaaggtaggcgccggccagcgcagcttgaccgtcggcgagcgccggtcagcatacgagtacctgatggcctgcacgccacgcactgacccaacatgggccgacgtagcaaagcatcttggcttgccccgtggcgcactcagcggaaccgcttctcgtgatgacgacgcgcaggaacgcatgccgttgcggccaccagtacactccaccaaccacgcaatcgagggggctggcaagaaactcaccatgctcaaggaatggtgggagatcgcagcggacgacgcccgtgacgcactcatcaaactgctcgttgacggtgagcaggacggcgacaccgcagccggtgtggctgcatgggagttcctcaatgaactcaacgaggaagcactctcggctcttgacggcctggatctggcagccggacgtagcgcctactccctgccctcgctacgcgctctgacacagcaaatgctcaataccaccgacgacctccacgcggcacgcaagtctgtgttcggtatcgatgactcatggacaccgccagccgaaccgatcggcgctccagtcggaaatccagctgtcgaccgagtgaccaagatcgtcgctcgctggctgcaggccgccgagtccgagtggggggctcccacagcgatcactatcgaacatgtacgcgaggcattcctctccgagtccgtagtgcgcgagcgggatcgagagatgcgccagcgattcgacgcaaacgagcgaacccgcctgatgctgaagtcgggtgaaagcgacccgacacgagtacgtaatgcggatgtccggcgctaccaggccctcgttcggcagaagggacaatgcgcctattgcggtgacacgatcaccctgacgacttcagagatggaccacgttgtaccccgcaagggggtgggctcgacaaacacacgcagcaacctcctcgccgcctgccttccgtgcaaccgatccaagggcaagatccccttcgccgtgtgggccgatcagtcaccccgacccggggtgtcggtcgccgaggccatcgctaggaccaagttctggacgaaggatcccggtgcaagtccacgctcatggcgcgtcttcttgaaggaagtccaggagcggttggcacgcaccgacgaggaccctgagatcgacgctcgctcaatggagtctgttgcctggatggcgaatgaactgcgggaccgcatcgctgcgcgattcaccaatgcgaaagtgtcggtctaccggggcgccgtgaccgctggagcccgagaagcggcgggcatcgccgagaagatccccttcctgggcggaggcggaaaaacgcgcctcgataggcgtcaccatgcggtagatgcggctgtcgtcgctctgctcgatgagtcggtcgcacgtaccctcgccgagcgcaacaacctacgcgaggcgcaatcgtataaacccgacccgagcaacgactggcgcgactaccgcggaaacggcccacaggctcgggcccgcttcgaaatctggcgttcccgcatggacaagctagcggcgttgctagcgaccgccttcgaagaggatcgcgttgtcgtcatggagaacctgcgtctacgcctcggcgatggcaaggtgcatgacgacactattcatcagctgtctcgccgccgcgtgagtgacgctttcagccggtccgagatcgacgcggcctcaacccccgctctctggactgcgctcactcgcgaccccgactactccgctgaagagggcctacctgcaaatcccaatcgccaactgcgactgcacggcacgcgcctcggtcctgatgatgtgatcgagttctttgacaagccccgcgcggcgctggcagtccgaggcggttgggcccagctcggcgactctatccaccacgcgcgcatctaccgctgggaggaacgaggcacggttaagtacgggatgctccgtgtattcaccgcagacctgcttcgccaccgtgacgagaacctattcacggtagagccaaagccgtcatggatctccatgcgagcggcgcacccatcgatcgggcgtgcggatctgtcagaaaaggagtatgtgggctggctagtacctggggatgagcttttggttgacaacctcgacgccccgattgtgcccgcagtcggatctgtccggcgatggcgagtgcgtggcttcgaagatgcctcgaggttcaacgtgtcaccggtagtacttgctgaggaggggctcgaacgattcctggcacgggtgcaactagacgaggaggagatcaagcaggtgaaagacgtcgtctgtgggaaggggcgacgcgcggtcacaaagttcttcgccagcaagcccgtggtgatccgacgcgacgctctcggccgtcctcgcctccggtcggacgcgggactaccgacctgctggcagaccaaatagcgatgcgcggctggcgggtgctcgacgccacctcattcgagggctccattggggcggctcgcgggcgaatcaccctcgcttcagagggcgggcccagtcacgaaattgccgccgaagaggtcgccatcctcattgtcggcgcaagaacaacgctgtccactaccgccctccattaccttgccaagcacgacatcgcgatgttggccgctgactggcgaggcgtcccgttcgtcgggatgtatccgtggagcgaccactcccgagtcgcggcgcggcacctttcacaggccgacttgtcgctcccgcgccgaaagaatgcgtggatgcgaatcgtgcgcgcgaaagtaagcggccaagccgcaacactacgtccgattgaccaagcgggtgccagtagactcgaggagctggtcaaaagggttcgctcgggcgatcccggcaatatcgagggagcttcggcccgtgtgtattgggcacgcctcttcgctgacgacgtcgccttcactcgggatcagctagataccgacacgcctaacgctgccctgaactacggctacacgatcctaagagggcacggcattcgcgcggtgctcagtgctgggctttcaccgcccctaggactgttccatcgtggtcgggggaactacttcaacctcgtggatgacctcatcgagcctttccgccctgctgtcgatcacacagtcgcgcacttgccagccgatgcaacactggatgatcctcaagttaagcgacgcctagtagaggccgcgaaccaaccgttcaacgatgagggctaccgaatacctgccgtcttggaaggcttcgcccagcaactaggcaggtacatagagggggaactcgagcggctgagcgtcccgacctggaccggacccaagagcacgtcggagaccgcgaacgatggcgaagagtgacgagaacggcatgtggaacctggtcatcttcgatctcccagtcatgaccaaggttcagcgccgggcagcaaccgggttccgcaagctccttatcgacctcgggtggtcaatggagcagtacagcgtctacgtccgatacgtccccactggaatgagcgtcgctccagaggtccagaccatacgtacccgggttccggcccaaggcaaggtgcagatcgtgtcagtgacctacaggcagtggtccaaggcgatcagattcgtgaacgcaatccctgaagagcctgcgggaccacccgacctgctaacacttttctagccggacgttccccccgaaaccccttgccagaagccatttttcgacctctaggaagtctaccggggggaacgtgaactgattcccagccgctcgaccgctggcaccactgccgtacgaagtctaccggggggaacgtgaactgattcccagcccgcagtacagttggtacggttctaggcgaagtctaccggggggaacgtgaactgattcccagcccagtcgggatgctgccctcgggtgcgcgaagtctgccggggggaacgtgaactgattcccagcagcttcgagcccgccggcgaccgctaccgaagtctaccgggggg

SEQ ID NO: 3264 - DNA, 23729 bp, synthetic construct
  variation 2801..2802: note = note, n is a, c, g, or t
  source 1..23729: mol_type = other DNA
  variation 15806..15807: note = note, n is a, c, g, or t
  variation 15963..15964: note = note, n is a, c, g, or t
  misc_feature 1..23729: note = Synthetic
  variation 15249..15264: note = note, n is a, c, g, or t
ggtgctggccctgaacatgatggacgaggtgtacaggaacggcggctcggtgagggtgaatgagatggaaaagctgctaggaatacctgtggtgcccatctccgccgcccggaacgaaggtttggacgagcttgtggagcatgccatgcatgtggccaaatatcaggagaggccgctgcgacaggatttttgcgacaaggaggagtgcgggggcgcggtgcaccgctgcctgcacagcatcatgcacctgattgaggaccatgcccagcgggccggcattccgttgcgcttcgccgcaggcaagctggtggagggcgacgatgtggtgctggaggctctgcagctggacaccaatgaaaaggagatgctggaacacataattctccagatggaggaggagcgcggccttgaccgtgccgccgccatcgctgacatgcgcttctcgttcatacgcaagctctgcagccggacggtggtgaaaccgaaggagagcagggaggcgttgcgcagccgtaaaatcgaccggctgctgaccgggcgttggagcgcgatacctgtttttgtggcggtcatctgccttgtgatctggctgagcatcgatgtgcttggcgcccctttgcaggactggctggaccagggcatcggctggatagccggacgctgtgaggcaggaatgcaggcggctgatgtaagtccggctgtggtttcgttagtgattgacggaattttcggcggggtgggcagcgtgctgagctttgtgcccataatcatactgcttttcttctttttaagtctgattgaggacagcggctacatggcgcgtatcgccttcgtgacggacaagctgctgcgtaaggtcggcctttcggggcggagcatcgtgccgctgcttatcggcttcggctgctccgtgcctgcagtgatggccacacggacgctgccgtccgcacgcgaccgtctgaaaaccattcttctgaccccgttcatgagctgttccgccaaaatccccatctacgcctttttcacctcggccttcttccccagacatggcgggctggttctgataggtttgtatctcttcagcatcatcatcggtattttgcttgccttggccaccaaacgtatcggcaacaggagcgaggcggcgccgtttgtgatggagctgcccaactacaggatgccgcaggcaaagaatatcgcccacctgctctgggacaagaccaaggattttgtgcagcgcgccttcaccgtcatctttgttgcgaccattgttatatggttcctgcagcatttcaatttccgctttgagcttgtggatgaggagggaagcatgctggcatggattgccggatggattgcgccgctgttcaaccccatcggtttgggcgactggcggattgtcaccgcactgatttccggcttcatggccaaggagagcgtggtcgcggtgatggaggtgctcaaccttacctcgctgttcaacccgctgactgccgcctcaatgctgatattctgcctgatgtacacgccctgtgtggctgccatcgcctccatacggcgtgagcttgggagccgctgggcgctgtttgtggttttcttccagtgcctgctcgcctggctgtgcgcaggtgccgtctattggctgctatgcctgattttttaattgttgatgaattaatatagaaggatatggatacaacacacgatcatcatgaacatcatgaacatcatgaacatcatgagcaccatggtcatcatcatagtcaccatcacgaggcgcatctgccggaaaagatgggtgcggtctatctgtttgcggtgacgctcaacctgctcttcaccgctgtggaggctgccgccggttggtgggggcagtcgatggggctgctttcggatgcgggtcataatcttagcgatgtctgctgcctgctgttagccatgctggccttcaggctttcaaggacaaaggccacacaccgcttcacctacggattccggaaaacctccgtgctgatttcgttggtcaatgcggttctgcttttggctgtagttgtggtgattattgttgagagcctgcaaaagttcgcccatcctgccgaagtcagcggtgcgctggttacatggacggcggctgccggcatcctgatcaacggcttcacagcctggctgctttccggtcataggaaacatgacatcaatacacagggcgcattccttcacatgcttacggacacgcttgtatcattgggcgttgtgatttcgggcattatcatctccgtgacaggatggaaccttgtcgaccccattatcggtcttgcgattgcggcggtgattctggtctccacggcgaaactgctgtgggagagtgtccgcctttcggtcgatgctgtgccggaggggatccatccggaggagattgtcctgaagatgaaaagtgtggaaaatgtgaaggatgtgcatcatctgcatatctggcctgtcagcaccactgagaccgcccttaccgcgcatgtcgtggtggcggaggaggcccgtattgctgaagtgacagcttcccttaaggctctgctggctgaggaggggattcgtcacagcacccttgagctggaaccgccgtcggtttcatgtcctgacatacattgcgagccaaaattaaagtgatactttagatgaatgcacctacaatactgatattaatattattgttaataataacagtgcttgttatccgctcgctgcacctgcagcggaagcggggcggctgctgcggaggctgcaacggttgcggcggctcctgcccnncggcccctgccgagactgccacatggattgcccgcacggcgcgaaaagggaaaaataggttagttttgcctgttttgtagttttttggttattggagaaggcagcgtaaatggctgccttctcttttattgtatggtaccaagaatccagtcgcaggcgtattcgataacgttgtccttgccggcggcggtggctgcagggtcaagaatcaccagacggtctggcggcacgccgttctcataattctgtttgtccaatgagaggttgcggctgatggagaatcggtaggtccagccgttcggcagctgccctccgttgggcagtccgaggccgcctcctgtggtgtcgcccaccagaatcacgttgtcgtatgccttgcagcagagtgcgaagaaggatgtcgcgctgtaggaacctctgtcaatcagcacggcgacaggttttgtgtaattgccgtatgaggtgtttgactccggtgcgtgtacctcctgcagcggggagaattcattgtgtgcggggcctgatttaatctggctgtagaatagcagctgcccgtggtttggcagcagtttcagcagttcgttcatgtacaataccgcgccgccgccgttctgccgcaggtcaagcacaataccctttgcgttggcgtagcgtttggtcaggtaggtgagcgatgcgctgtccactacgttggtgaatgagctgtagacgatgtaggccacatctccgttccgcagcgcatggtgagaaaagcctccggtgctgtggtagcggtcgtcggcgacatgcaggtagttcagggtcacaaccttgctgtccacgtttctgcgcctgtacatcttcctgtaaacgctgtcgctgtaggagcggtcgaacggtgccataaggttcgtgtgaccgtcgtccagtttgctgagcatggccgccagcacgttgaagaggctgtcgtcgctgatgtcgtcgctgaccaatgggcggtatgttttgtacacctcctgccagtcaacattcttgatgtcgaaaaaggcgaatttctggtcaacctggttccaaaggtaatcaaaggtttcggtgggtgtgccttcaggatcctcatccgtgaacagcttttcgcaggaggggagtgtcagaattgctgaaagggttattcccaaaatgatatgtttcctattcattttccctgtgtttgaagttaaaggtgaactcacattgtatcagatgctgggcgtagtcgaagcggtaggcccccttcttgcccgtgttgcggaaattccatccgtaggagagtgccacacggttctggttgcggagcctgtaggcgattccgagttccgtgctgatgccggaaaaggcctttccatggctttcgtaactttcgtccgtaagtctgaacttgcctacgtcgtgggcgtttgcattggggacataggcgtatcccggacggtgcatcgccgtgatgagcggcagctggagggctccgaatgcggtgtagcgcttttcctcacttttcttgaggattttgaaatccagctccaccctcgcgagaagctccacatcgaagaagttgcagtgcccgaaggaggcgttgcccatcgatgagttgacgtagatgaactgctggtcgccaatgccgccgccgacccatccgcggtaggagggacgttccggactgctccagcgatagaggtagtccacgctgccgtgccagtagccgccgtagcagcttgcgatagacttggaatccgaaaacattgcgacggagatgtcctgcctgcaggcaatgacattgcgcttccattcgaaggtgaggtcggtgccgaggttcagtccgatgccgttatagcgcagggggcttgtgccctcctcaaagaaattgttaggcccgacccctttgcggaaatctattgtgtagttcttgtaatgctgcgccatgcagctgccgccgcccatgaccacagcaagcagcacgattcgtgccaaaagccggcgggcaggcggtgagctttttcttcttgtcattttcgtccggttattattctttaacaaattttgcggtatggttgccgatcttcacaaagtacatgcctttgctcaaggaagagatgtccagttggatgtaatcttcattcccaaccacttcgtttaccatcacctgacggccggtggcatcatacacctttatcgtaccctcctttacattccggatgttgagcatgtttgtggcagggttcggatacacttcaagcgattgtgcgaggaagttcctgatggcaaccggattgtccgccgtgaacaggccggtgagctcaatccctttttcatttcccagaacaccgatcttttttgcctcgcccgtgttcacatccacgtagtacatgtaatacttctccccattgtcagtgcaggatgcccagaacagttcgccggtcttatagtcaaatgccatggactgcacataggcgacccctttcacaccggtgttgccgacaagcgtggtggctccgttgttcaggttcactttaagcaggttgccatatttcagagttataccgtatgcgtttcctttggaatcgatggcgaaggtctgcagggttgagtccatcagccccatcacggtgaaatgttcaatgtcgttcatgtccatacggtacagttttttatcgcccgctataaagtaaattttgccgtctgccggattgtatgacgtggatttcacattgtttgagagcgtgtcgtatgcaaactccgtggtttcaaagccgtaaatctttttgttggatttgtcaacaaaggctttgccgattttacgtggtgttgcaacagtgaaataccacattttactgtcggcgtatgtggcggcgtaatttttttctactttgttgtcagtggctgcggccaaattggcaagatcctgcatggtgaaggtgatgaacttgtcatccagactggagtccaagccatttgcagagtttgcgtagccataccattgtgcggttgatttcggggtgtattccggagttatctggttgcggatgcctgtgatattaagttttctgatggtcggtccaacgctgccgttggtgttggcaatgttgcgccatacaaaaatgagccggtagtttttcccttttgcggggttggcaattgtcgtggtcattgtctcattgttgcggttcactaattttgtaccggataatccttccccaaaatgaagaatatagggaaggtcatagacggtatgggcacttggtgaacccaaccactggcatgtggatgtccttaacggcatccagttggtgtcctgcggcacgaggaaggcgcatacataatcataattgacgttgcctgaagcgtatccgccgaccgtgacgttaaagctgattgtgatgctgtcatagtcgccaaggctgataaggcgctctgcagtcaccacctcatccttgttgccatagctgctgctgttcattatgccacagattagggcgccgttcatgtgccatgctgcatatttcgcactgtcctcccagttgttcctgagtgtccagttgccgatttcgcttccggtattgaaattgtaggagtatggtattgtcgcacccttgatgatggtatagccaagacgtatgttgggcctttgcttcggaatagttttaaatccatttattttactctggtataacacagggtttgaagggtctatattatatgagtcgttggcatagacaagcgaacggcttttagtgtcgtccgtatatctgaaataacggctcgaatatgcgcctgtgttgtcatcaatggtgattagcaggtggtttccggtcttgttcctatatgcgaaaggatatgtcagatttatggtaacccatccggctgaagttgcggtcacattgccggaatagacaaggtcggcctgggcttgtacggccatgcagtccaaagtgtcgtcaaaatggtcctttgtcacatttttcatgtaaattttcaggctgcgggtgtagttggtgtcgcttcctttcgggcctttgcctgtaaaatagaaggagatgcttgtgatgttcaggtcgcctccggaaggcatttcatcatatgtgtagatgatttggttgtaggagtatttgtatagggagtgagacgggaaacggtttgtggagtccgtacctgtgccgattgttttgtaactttgtgcgccggcagtcccaatgagtgctgcgcatgtgaacaaaaagagtagtttctttctcataatgcagttatttttagttatttgtttttattaaattcctatgtgcaaaaatagtcaaatttttgatacgcccacattttttttgttttttttatcgtatcacacgattggccattttctgtgcaatttttccgcttcgcggcgaagatatgcctccagctccggcgcgtcaacaatctccacctcgctgtgcagcccaagtatgaaacgcccgattcccttcacatcgcgcacatcggtaccgaaaatgaaatgctcgctgtcttcaggttcaagcagtcgtttcgatagtgggaactcctccttcagcaggttggccgcacgcatggtaagccgtagccggatatggatcagagtgtccgaactcatgccgaacaggtcgtaaggttcggtgcggtgttttttctcgaactgccagttttccggagtgacttccaccgtcccgatgcgcggaatcttgaaggtcttgacacggtggctgctgatttcatagcagtccacgcagcggttgccgttgcggaatgctatcggctccacacggcggtccgagacggtttcgctgtttgaggagctatattggtgcagaaccacctgcttctttccctcaatggctcttgacagatcgtggatgttccggctttcctgctgccggatcacaggcagttccgggatttgcccgcccatacgtccctcaattttccttttcaggccaggtttcagcggatcgtccaccgcatccagcgcatccgcaatcagccgccattcctttggcgtgacacctacgttgtcagttatgcgggcgaaatgttccggcaccgcctcaagatagatgttaccatgttccttcccgatgcggaatccgctctcccttaatgaccgcagatagcggtatgcagtgcgctccgtggtgttcattctggccgcgatgcccccaatgctgcaaccatctccggagagcagtgccagcacctgcagcattgtatccaatttaaaattcttgctttcagtattttcgttgttacgcttcatgactttcctgttttttgcaaaggtaggcaaaaattatttatggaaaaatcaaattttgtcaattcctgtcataatttcgcgtgtaattttgcagcggattttaaaatgtatttgtttttgggaaagtgtcccggacatacaattttccatacggattacacgttgtaaaatatgacattataaagtggactacgaaatataaccgattatggccgaaaaacatttgataagaaacagcaccgtagagttccttattttccagattgaaggaaaggaacaaggcattgaggtgtactacaagaatgaagacctctgggcaacacagaaggcgatatctactctgtttgattgcgatagaagtgtgataacaaagcacttgggcaatatttttgaatcaggagaactaaaggaagaacgagtatgtgcaaaatttgcacatactgccggtgatggaaaaacctatgacaccaagttctactccctagatgccatcatcgccgtgggctatcgtgtgaacagccgccgtgcaacccagttccggcagtggggtacaagtgtgttgcaccagtttgccatacgtggctatgtgatagacaagaaacgtatggaaaatggcactttcctgaatgaggactatttcgaacatctgctggccgaaattcgcgaaatacgtctcagcgagcgacgattctaccaaaaactaacggacatatatgccacttctttggactacaaccgcgacgctccgaccaccagacttttcttccaaatgatacaaaacaagatgcactttgccgtgcatggccatacggcggcggaattgataatggaaagagccgatgccgacaaagagcacatggggcttaccacttgggagaatgcacctgacggcaaaattgtaaaaaccgatgtttctattgccaagaactatctgaaacagatggaacttgaggatatgggacgcattgtaacggccgtgctcgaacttgccgaaagccgtgcaaaaaagcacatccctatgactatggaggactgggccaagcgtatcgatgcctatctgtccagcgacgagcgtccgttgctcgacaatgccgggagcgtaagccacgatgacgcagttcaacatgccgaaaccgaatttgaaaaataccgcatcgtgcaggaccgcctgttccaaagcgattttgacaaatatctgggggcgttgccgttagaaggggaatgcttagaaataacagaataacagtaaaataacattaaccgttaaataacaccaacctatgagtaacatcaaattattccaagacaagaaaatccgttccgtttggaacggtgaggaggatcagtggtatttctccgttgtggatgtggtggaggctttgaccgattcgccgaatcctaggcaatactggagaaaaatgaaagaccgtgatttaaaggaatttgagtcgtacccattttgggtacaactgaaattgcagagtgctgatggcaagaaatatgctaccgactgcgccaatgtcaaaggactattccgcatcatccagtccatcccgtcacccaaggcagaacccttcaagcagtggttggcggaggtggggtacgaacgcttgcaggaaattgagaacccggaactggcgcaggaacggatgaaggaactttttacacctcaatgcgaatgacgtgctattgcatcataaaaaattgaataaaagttagttgatatttgattcagttgtcaaagattctttgacaactgctaatgatgaaaagcaaaacttttttttaataataatgtactttatattgtaaaaatgactaattttgcagcactaaaaagtagcaattcacaataaggattattccgttgtgaaaacattcagggcggggatttttgttctcgccctttcttaaaacattataataatgaagaagatacttggattggatcttggcaccaacagcatcggctgggcagtggtgaatgcggatgagaatgggaaacctgtatcaatagaaagaatgggtagccgaatagtaccactttctccagatgatacgaatgagtttacaaaaggtaatgcgatttcgaaaaaccagtcgcgtacagaaaaacggactgcacgcaaggggtatgacaggtatcaattgcgtcgagaatatttaactgccgagttacgcaagtcaaatatgttgcccgatgaaagattgataaaactcccagttttagagttatgggaacttagggcaaaagcggctactcatgagattcaattgacattgccagaaatagggcgtgtgctttatcatatcaatcaaaagcgcggatataaacacgcaaaatctgatgaaagtgctgacacaaaacaaaaagcatacgttgccgaggttaatgcccgttatgcattgataaaagagcgaaatcagacaattggacaatactttgcggaaaagctgaaagaaaatgaaatagaaacacccaagggaaaattctatacctttaggataaaggaacaggtgtttccgagaagggcttacgaggctgaatttgaccaaattatggagtgccagaaggtgttttatccagaaatcttgaccgaaaaagaaattgataaattgcgcaatgaaatcattttctatcaacgaaagttgaagtcatgcaaacatttggtatccatttgtgattttgagaaacgtgaatatgaaaataaagagggtaaaatagtcttcggtggccctaaagttgctccgaaaagttcgcctttgtttcaaacatgcaagatatgggaagaggtaaacaatataactttgaaaaatcgcaagaatgatgaattgtatattacattggagcaacgtaaagcgatggttgatttcttggatactcacgagaaactgacattgaaagacctgtattccattcttgggatcagcaaacaagatggatggtggggaggaaaagccattggaaaaggattgcagggaaatactactaaaatagcattacaaaacgcacttggcgacttcgaaaatgcagaaaagttgttacaatttaatctaaagaatactgatagcgggttgacagatgagcttacaggtgaagttattcaagtgattgaagctaatgtggaaaaagaacctttatacgatttgtggcatactgtgtattcaatttcggatagagaagaattggccaatgccttaaaaaagaaatacaacatttatgacgaggatataataaacaggctttattccattgattttgtcaaacaaggatttggcaataaatctgcaaaagccatgcgaaggatcttgccgtatttgcagcaagggttgaaatatagtgatgcttgtgaatatgtgggtttcagacattcggatagtttgacgaaaacggaaaacgaagcacggcagttattagacaaattgcctcctgttaaaaagaatgcacttcgacagccggttgtagaaaagatcctcaatcagatgattaatgttgtcaatgcattaatggttgaatatggacaatttgattcaattcgtgttgagttggcaagagaattaaagcaaagtaaagacgaaagaaataccacattcttacagaatgaagcttatgaaagattaaatgagtctatagccaaacgattaaattctgaaggcataacgccaaccaaaaggattattgaaaaatacaaattcattttcccgacaaaaggttgcatcgacaaaaaaacaggaaagtttgtatcgaaaaactttgacgctttagcaacagttaatcaatgtatttattgtggaaaaccattctctttaagcgcagccttaaatggtgaaggctatgaaatagaacacattattccacgcgatttgatttgtgataattcccaaagcaacaagatattatcgtgtagaaactgtaattcaacaaaaaacaaccgtacagcgtttgattttatgcgtagccaagataaagccgtgtttgatgcttatattgaacgtgttgagaaatggtatgaagatggcattatttctccttcaaaacgtgagcgattattgctttcatatgaagattatttggaacgaaaaaagaaagggaaaacaactgaggaagataagaaatattgggaggagtttgtttctcgtcaagcgggtgaaacgcaatacatttcgcgtgaatcaattaggatattaaaacaatgttgtagaaacgtgaatgtcacaagcggaacagttactgccacattacgccatctttgggggtatgatgagattttgcatcaacttaactttgaaaggtacaagcaagctggattgacagaaatcgttacatggacaagcgatcatggtaagaacgaacactccaaagaacaaattgtagattggtcgaagcgaatcgaccataggcatcatgccattgatgccttggtggttgcttgtacccagcaagggtttattcaacgtattaatacgctaaatgctgatgatacaaaggatttgatgagaaaacaaattgaatcggcggggattaaatttgaagaaaaaaaggtgttgatggataaatatcttacatcgtttgttccgtttacgactaaagttgttgctgatgaggtgaaaaagattcttgtttcatttaaggcgggtaaaaaaactgcttcaaccggaagacgtgttaaatatgtcaaaggaaaaaaagaggtgttgcaagatggcattgttataccacggggtgcattacatgaggaaggcgtttatggacaaatcgagataaatggaaaaaaggagattgtaaagaaatacaagttaggcaagggtgcgcaaggatttgtttttactggtaaggaaacttatgagaaaaaagtaaataaaaagacagaggaagttcaggtcgttgataaggtagaggatgtccttggctctattgtagacggtaatatccgggctaagattttggaacgcttaaatcaaggatttgaagaggggaaagattataggaatgatgtgaagaaagccttggataatttgaacaacttggataataatccgatttatgcagacaagaataaaacaatacctattcgtactgttcgctgccgtacgggattgtcggctgttgttcctataaaacgtaatgaattaggcgagtctattggctttgtaaaaccaggaaataaccaccatattgccatatatcgagataaagaagggcagctccatgaacacactgtaacattttggcacgctgtggaacgcaagaaatatgggctgccagtaataattgacaatccaagtgaattttgggatagtataatggacaaacaacttcccgaatcgttcttggaaaagttgcctgatgtgaactggatttttgaaatgagcctgcagcaaaacgagatgtttgttttgggtatggaagatgaaatctttgaggatgctatacgctacaaggattattctatgataagcaagtatttatatcgtgtgcagagcatttcagggtcagattattggtttagattgcacgttgaaacgcaaaatgataaatcatcatctgcaaaagatgccatgaaatatcatagagttaaaagtttaaaagcgttatttgaacttcatccacgcaaagtgaatatttcagtggtaggcaaaataatagagttatgagcagcataaaactactattgcccaaagccgaaaattgggaagaagcgtagtgtcggacaaaaattttctcacaaacaagcaatgtaagagcgttaaatcttagtttgaacccatgatcaagcgcactctatatttcggcaatccggtttacctttcattaaaagacaggcaactggttgtcaaactgcctgaagttgaaaaaaacgatgcgctttccgcgtcactcaaggcgtatgcggcgaaaacggttccggtggaggatataggcgttgtcctgcttgaccaccaacaaatcactgttacacatgcgttgttggatgcactgacggaaaacaactgcgcggtgattacctgcaacagttcacatctgcctgccggactgctgctgcctctggaagggaacagcctccaacaggaacgctatgctgatcagattcaggcatccctgccattaaaaaaacagttatggcaacagacggtcgtggctaaaatccgaaaccaggccagagttttggaatttgtgcttaaggaagaacctcgaagtatgctattatgggcagaaaaggttaaaagtggtgacagtgagaatctggaagcgcgagcagccgcctattattggagccgtctgttccctgacattcctgattttgtccgtgatagggaaggggagtatcccaacaatcttttgaactacggttatgccattttacgtgcaattattgcccgtgcattggttgccagcggcttgctgccaactttaggcatccatcaccacaaccgctataatgcttattgtctggcggatgatgttatggagccttatcgtccctatgtggacaagctggtgattgctacaatggaaaagtatccgtcagaaacagaattgtccggaattgtaaaaagggaattgttgaccatcccggttttggatgtgacaatggagggtttgcgccgtccgctgatggtggctgcaagccaaaccgctgcatcattatacaagtgctatagtggggaattgcgtaaagtggtgtatccgataatggaataatattctaatttgtgatgtggaaaggttcagtgaatacaaaatcatgtgggttttcgttctttttgatttgccgacagagaccaaaaaggagcggaaagccgcatcggatttccggaaacagttggtgaaggacggttttggaatgttccagttctccatttatgtgcggcattgtcccagcaaggagaatgcggatgtgcatatccggcgggtgaaatcttttttacctgaacttggacagataggaattctttgcattaccgacaaacaattcggggaaatagaactttttatcggaaaaaaggagaaaaaggtggagcctccggagcagcagctggaattgttttttgaaccttattgatgcaaaaatcctgctcatcgagcaggatttttcagttctaaaacaccatttaaatcgttgtgttcatttgctttgcatgggttctgttgtaaaagaacgtgcaaaggtacnnnnnnnnnnnnnnnnacaaaaaaagtagcaattcacaactgtttgcgtcctactccgcaggcgccgcgagttgtaaaagaacgtgcaaaggtacaaaaaaagtagcaattcacaacgccggataactgtatttcgcttggcgaatcgttgtaaaagaacgtgcaaaggtacaaaaaaagtagcaattcacaactgcggctggaatcatatccagccgcagttagttgtaaaagaacgtgcaaaggtacaaaaaaagtagcaattcacaacggcgtaaccgttaagattgaacgtgtcggggttgtaaaagaacgtgcaaaggtacaaaaaaagtagcaattcacaacttgcaacgagcgcaggctggagcaacaagagttgtaaaagaacgtgcaaaggtacaaaaaaagtagcaattcacaacattggagttgcagccgattttgtgcccgttgttgtaaaagaacgtgcaaaggtacaaaaaaagtagcaattcacaaccctgcaatataattcggcacatgcggcgcagttgtaaaagaacgtgcaaaggtacnntacaaaaaaagtagcaattcacaactaaattcggggtcgcgttcgtttttatggagttgtaaaagaacgtgcaaaggtacaaaaaaagtagcaattcacaacccaatgtttaaaccatattaatctatgtagttgtaaaagaacgtgcaaaggtanntacaaaaaaagtagcaattcacaacctaatgcaaaggaggaatggctggatgttcgttgtaaaagaacgtgcaaaggtacaaaaaaagtagcaattcacaacatagtttgttcaatttttgtgttcctcattcggcgtaggagtgtcattgaatctgtgtcaggcacttgggagtgtccttgaattagcttaactacccagaaaactactacaaaaactacgacaaaaactaatacaaaaactacgacaaaaatgatgtttggccttgtattgtaattattttaaaatcacatatttgtgaccgtttactacactgaaaactacactgaaaactacacagaaaactacactgaaaaacaagggtgggtacaaattgtacctacccttaaaattcttgtattacatggttttaaatacgaaatagttttcagttgttaagttttacttaataactggtgattttttccaaagataattgtgcgctatctggggacaattgtccccagatactttcggcgatgcaagagaggggatgaggcttattggcttgtgattttttcgaactgtttccattggggaaatagttcgcattataaagttatacagtgtgtgcaaaatctgcacatactgaagatgtacgataacattgtatatctggattaactgcggagaaaaagccattaggggtacaacttgtaccccctgtagaaatgcaattcccgaaaaatattggggagaaaagtggttcgtatccgaaaaattgctacttttgcaacggattatatttcaattgctgaaagaaatgactgaaaatattttttaacataaaatcctgaatataatacactaacctaacgtgaacgatatcatatcctcttatttcattgtcatctgcatcttttgtggagagcaacatgagcgacatagcgcgggcgagaaggagttgctatgtgaaaatgacgcgacatcgaaaaacaactgcaatgtcaaaaatggctgtgtaaggtgtagtcaccggcttacggatgaaatgaggctacgtagaaaagaaatccggaaagtggcaaaaagtacgcttactggagtgatgttcggcaatccaaagtttaaaaagcctatagttataaagaacaagggaataaaagaatggatagaccagccttttgcgcaatatatggcgaaaaatgaagcactattgataatcggcgacctgatagcgaatgcattgtatcttggttggaagaaagacatacataacgaaaagtatgttgcccatatttttgaaacatgcattggtggatatgttgcatggattatcgtaagggaatcttacaatagagagtgttttattcatagtgtcactgatcttgaagccatcaaaaaaggcattcatcctttataaaaaataatcaaggggttatttatactgggaagtgcaatcccaaatataattagccccttgttttcagtttgcaaaggtacaacaatttttaacacaaaatcccaaacagttcaaatttttttcttcatgtgaaagttgtgcgattcatgaggtttagtttctgaaaaaatgggatggaaactttcatatatttttcccatccgattcagttgccgtgattttctcgtaaactgaatccttgacagttttcctgtttgctaagatattgttttttcaattcataaatatatattacttttaaaggtaattgtatttaaaaaagcagtacatttgcattttcaggaattgacaaaacaacttttgaaatatgagcaaaacctctgaactattcaacgagtgtttggcggctacgccgcaggatgtgaaacagcgtatcgactggtcgttccagattgccgacaagattgacagtgtgctgaaagaacgcggaataacgcagaaggagttcgccaagcagataggccgttccgaagccgaggtgtgccgttgggttggcggcacacacaatttcaccctggccacccttgcaaaaatctcatccgctttgggagtcccgctgattcatgtcacggtctgatttgggctgtcccaaaattctttgtcagttttttactcgaaaatatcagaatgcgttcctgtgtctataagcatgattgtaagggttatatcccaacgtttccataaaagtagccagtcattttggatatgacattcttgtacattgctaactattgagatattcaaacatttcctctttgttgtcaaatgaaacaacatttccctctgctatgtcggttatagcctctttaagtgattcacccattttgtcacttgatgtttcaagaagttttttcgcccattttttttcatccttatgaatgttttttttcacttccttagcaccgtgtttcaagagcattgcaatcaaatcttttgctatgctgcttctcgaatcataatccaatgttatagttgccattacacatatattttatgttgtttaacgtgagcgcaggtgtaatattgcattaatacgtttttttttcgcattttttcattgtttcatttcaggaagcgtatcttggaactaaagcgcaagggatacaaatttttttcttcatgtgaaagttgtgcgatttaggagttttggcttttgaaaaatatggctgatggagggggttcgtatcccgaaaaatgctacttttgcaacggattattaaaacagattttcaatatgaaacaaattgttaaaaaggccgttatgatcggcatggtttgcgcctgcatgtttttcagtgcggatgttttttcccaatggtatctgggcgggagcctgcgtagcatgaggggtaatccgggtgcaaagtctggtaattatacccaaattcgcttgatacctgaggcggggtatacattcaaccgctggggcatcggttttgcgccggagctgaactacatacattgggggtttaatcaggattatataatatcatatgcgaaaaattgggactttggtctgcgtctgtatgcacgttatactttgattaaaggcagtgccgtctccctgtttttggacggggaggggtatgtgtccagttgggatagtccccatatcggcataaagccgggagtggcttacaaaatgtcggagcattgtatggccacgatgcatttcggcatgttgggatacagcgaggatatgcttggcttggatttgagcggcaattcgttgggtctgtcgcttttttatgtcttcgggaaaaaaaatgaagatgttaagatgtgaaacaccttaacatcttcgcgttttaacaacttaacattatttcgagcttattccgcaggctgttccgccttcagctcctcatagtaatgggcgatagtggtttccatgtaaggattaacccacaaaaggccgatacccaaggtgagaatgctcagcagaatccatccgataaagctgagttccagtatgaacagctcccctttgtgtccgtccatcatctgtttgctggcctctatgcattcgtcaatgttgtattccggatggtctttggagatgaagtaggtcatgctgtatgcgagagcctttatgatgccgggtatgaccagcaataatgaccacaggattgtatacagtattaccataaaggatgttccgaaggctcttccataattcttgaaaaagctgaacagttttccaacaagtttttccttttcgcctctgatgaaatccagaaaaatcagcatgtagctataggccatgggcaggatgaaaaacagtgagaccagaaggcagatgccgctccaaactgtgaagtttgtctgcgtcgtctgaattccgtttgtgtaagtgtgttttacgtagggggtgtcgctaaagatggcagcaatcagcacgtaaaccaacgtggccagtacgggttgtgtccagttgcccttcaaatcgccgagggctttgtttttaagttcagaaaatgaagaaatcatgttttttgaaggttttaaaagttatatacaaatccgaatgccagagctttgccgttgttaacgcccaatccgaagttgttttcgaatgttatgtcatcaacagaggaatcctcattggatctgacctcgtgtttgaagtcgattgcaaacagtccaagataggcgtccacttcgaaatgctcgttcaccttgaaggcgatacccggtgtgatgctgatgtccaaaatgttggtcctatagcctttcggatcaacgttaatattctgcaagacatcatgatatttgaattttgaagtacctgtggaaaacatgccttccgcttccgtaaagatggaaaagccgcccacggacatgcagtagtagcggaagaacacgccggcacctatggtgttattactccattttttatcagtcaatatcggatcgttcggtgcttttgtgatttcactgccataggacagatccagtccgactgccattttgtcgttcagattgaatccgacgcggggtgcaatgctgaaatttatcgtgttggttggattggaggtgttggcgccttgttttgttttattggatttgaatccgaaatccgctttaccgccgacatagaattgggcgtctgcaactgtgcttgccgcaaaaagcacagtgaaaagaatcgctaactttttcatcttcaatagattttaatgtataatttgataaatttaattaatattcaaattattatatagcgcaaaaataatgccataaccatccgcaaaagagttggttctttttcgggagcgtattgtttttttgtctacttttgccaaaagaaaaataatacccttaaaaaatgtaatcaaatgaaatacacaacccttcaatggattggagatttcctgtccctcttttatccggactattgccccgcctgcggggaggttctgatgcggaacgagcgatgcgtctgcacaaattgctccattcatcttccccgcaccgaagacagcctcttttcgccaaaccacaccgaaaggctcttttggggccgtgtgcctgttgttgcggcggcggcgcttttcaagttcaagaagggtgggggcgttcagtccctgatacatcatctcaagtacaaggatcgtcccgacatcggacgctatttcggacggatgctgggggaggagttgcggcagaatccgcagttcctcacggtagatgcgctggtgccgatacccttgcatccgaaaaaactccggctgcgcggctataaccagagtgaggagattgcagccggaatcgccatggcgttggagaggcccgtttggccggatgtgctggtgcggcaggtggcaacctcaacccagacgaagcgttccgctttccagcggtgggagaatgtgcgcacggtgtttgccgtgccggatccggcgcggatagcaggtaagcaccttctgctggtggacgatgtcatcaccaccggctccacgatggaggccgccgccaacaagctccttgaagcccccaacgtgatcgtcagccttgccgccttagcggttgatgttgtatgagtattagcgaaactttacgttccaggagagggagggcaggatggggaagagcgacatctggtaggcctggctctgcagtgccatcttggtcatgtcctcgccctccattgtggtctgtatgctgatgaagaacggatttttacggttatacaggttatagaccgagaattgcaggctgtgctcgcagtgctccgtccggcggaacatccagctcagcgaaaaatccatacgatggtacggatccatcctgtaggcatttgtcccgctgtattccacaaccagattgtaacccacaaaatagtagccgacaggcaccgtcatcgtgttgccggtggcatagacccaaacgagggatgccgtcagctggggcaggatgtcgtaggccagcatcagcgaaacgtcgtggcgccggtcgttctttgcgcagaagaccttcccgctgttgagctgctcaaactgccggaacgaccatgagagcgtatagcctaaccatcctttccaacgtccgctgttcttctgggcgaaccattccaggccgtatgaccagccgtcgccctgcgtgtaggggtcggaatagccgtatgccgcctcattgtagggggaatatcccgccttgtattcggtaaggtggtgcatttttttgtaatatgcctccattgaggctgtaagatcctgtttcggaaagttctggaaccatccgattgcaacctggtcgcacgattggggcatggtgctctccgtggagggtatccaggcatcggtcggcagggagatgctcgacaggctcacctgctgcacatactggtagcagtggttgtaggccgccttgacagatttgtttgaatccagcgaatagcgcagcgaaatgcgcggctcaagccccatatagtcctttatccgctgcccggcgggggtgaagatggtgtcaacaacctggccgatttcgttcagcacataatgatggtatggaccggtgtgctggaagtaggaaaatcgcagaccggcctgtgctttccaacgcctgccaagctccagctgtgcggaggcgaaggcggcggcatcatgggcgaactgcgcttcgcgatcctgcaggtccatggcggtttctccggaatatgcctcgtaattgttggggatgaaatggtggtaggtgtattccgccccgtagtggaactgctgtttcccgatgctttggtcaacatcgcttcggaaatggtagtcccggatgccggaacgggctatgatctggtatatttccatcaccatatctgtgtagaaatcgtaattggtgaatgaaaaatggttgttgatgctggtgctggcgttgaaataatgcagccattgcagggaggtggctgtgttgtcccattggaaaaaggatgagatggcaccgccgttggttttgaaaccgtaagcgtcagaaccgttgtaggcggtcaggaacaggtggttgttaggattgattttccaggtgattttcccgttaaggtcataaaaatagaatttcatccccttcatggatgaggtctctttcaggaaaggctggataagcgcgtccacgtatgttcggcggcctgccaccagaaatgaggccttctccttgacaatggggccctccagaaaaatgttggagaaaatcaggccgacacccaacttgccgtgatagtgctggaaatctccgttgggggtgctgaccttcagtgcggaggatagtcgtccgccatattcggcgggaatgtcccccttcatcatttctgccgactgtacggcatccgcattaaagacggaaaaaaagccgaacagatggccgacattgtatagtttggtgtagtccagcagtatcaggttctggtcaatgccgcctccccgaacattaaatccggagtttccttcgccggaactctggatgcctggcagcagctggatgcttttcagcacatcgttctccccgaaaaaggcaggcattttccgcacctcctccatgtggagttctgtccttcccatctggctctcctccacatgctggcggattcgccggtcggttacggtgatggttttcccttcaaaatccttcgggcagagcagtatgttcagctgctggttatgtggccgcatccgcagggttatggtgcgtgtctggtatccgatgtatgagctccggagtgtataggtgccggtgtcgagcaggaggctgaagctgccgttgtctgtcgttgaggccccttgggaggtctgttcaatataaatgtgtgcgccggaa

SEQ ID NO: 3265 - DNA, 23633 bp, synthetic construct
  source 1..23633: mol_type = other DNA
  misc_feature 1..23633: note = Synthetic
aaaactcaacattcatttctgggtaagttttccaattatacggttcaggtaaaaatggtttgccttcatcgttgctattggcttttacccaatttagtaataattgatgccattcgtacagatgcacaaggacatcgcgcaagtttttatcccgacgccaatgtgcttctttaccagccgatgccatttcttctgcaaatgttgttatctgttgatcttcgctcataccatcaatgagttcccacattttttcgaattgcccattggcggatgtaagtaaatcaacttttgttgttgctcgtgccatattttcttactttaattttatgtattccttctattgttttcttgctctctaagtcggacattttcactcatcagaggtattgcctgtatcaacaaaataaatgtaatcaatctagcatggaaaaaatacccccctcatttttacttgttttgcgaagctcttctcacttttggagaggttgggagtggttttctttcgtttcagtcacgatgtgaggagtgcagttttttatttcgatgggaattgtttcgacagtagctgcaagacgagagatttttaattttacgatgcaggcacgcgtattgatgggcttggtttggtcgaagataaagttgccgatgctataataaatgcgacaacctttgtattcttcaacggtttgcagggtatgagtatggtgaccaattaaacaattggcacctgcatctattagttggcgagccgtttggcgttgagtgggtgtggggataagctgatgttcccacccccaatgcaggttaacgatgatgtaggcagagggttcttgttggcggatacggttgatacgggcacgcaatgtgtcgatgggttcttgacttacgcaggctttatcgggcagataagcatagttttcgagaggcaatcgcagcgaagccagtaggtaaacaggacgcggatgggtggccaatagtatgggttgggcggcttcgggcatattgttaccggccccgacaggtatcattcctgctgcctcgatattgtttttggtgtctaaaagtgctgcccgaccctgatcaatactgtggttattggccaaattaaggtgggtaaaaccatgccgttgaaggtcgaagagccactcgggttctgctctaaagatgtattttttgaataccggcgacttgattttagtagccggacactctaaatttcctacaactatatccgacgattgaaatgtttttcggatgcctgcgctgaacaatcggtcaatgcctacatattgaatacgggttctgacaccacgatcgagcagtacatcgcccgtaaaggtaacggttaacgtgtcgccggcgtggcccgaaaacatgatgagaaagaagagaagaaaagttaactgccctcttttttgccaccaaagagcctcgacaagctttatgaagacctttttttgtatcaacttttgttggtgtttagatgtttacccgtatatgtaaatatgcagaatacaggttatagaaagagccttaacctcctgttcaaagaggttaaggctctgaaaaaaagggtttagcaccccgaactgtaaaagatttcttcgttatcggtgggggtttgttccagcggaacggtgatttcttccatccatcggggtacacctaagaatggcttttgctttaacttctcctgccattcttcgtcggtgagtcgctgctggtcggtagattgctcaaactcacgataagaaaagactgcaccacgcattaagtacagttcgttattgatgggcacagccacgtaaatttcgtaggcaggacccgttgcttcgtaaagaatggagtgattggggttgttccgaaggttggcagtatatacatcggcaacaatcgcaatgcttttatctgcaccctctacattgtcccaaccgtcaagaaaagcatcatccgagcgcaccaaatcaagcgaaatattctcgaatgtagagcctataatctctatgttattatattcttcgtcagtcagcggtgtattttttgccagctctttttggctgattttcaagagaaattctgccatttcttttaccctttcggtggttctttcagccttatcggtcattaaaccatactttttaagcaccttttcaagcgttgttgttagttctaccgccttcgcccagaactttacattgggctcaacataccctttaacaaccggttcgggtggtcctcctgagccacattcggcacccatcggctgcttggcatacaaaatagcgtcgtgtttcagttcagcccacgaagccagcgaggtattcaaattcttcttatcccattgcggcgtgcgcataaaataaggtgcattgtcggtgggttggttcagctgtttcaatgcgtttatccatcgggtagccagcgttgcctgccagttgatctgtcccatacgcgtcttcatgctgtcgagcacagtggtaaaaagctcccagcgttttgcttcgccccgctcgttgagcaaaatacgttctgccgccgggcatcccatcgccgcaaaaacatccagtccgctgggcacattgcgctttgtgggcttgttaatggcatcgaccatctcgtttaaaacctctgcatcgggcatgtaacgttggggcatcaggttgattttatacggacttgtaagctcgtatttcggccggatacgtgtttgttttttcgccacctgttcgatttgttcgcgcagttgtgaaagcattttcttattggcgagcagcttttctacgttcggataggcggttttcatcaggtcgtaaacctgcataatagtgatgttgtcgggctcgccgaataaaaatgtgatgggctcgaacagtgcattgtaagccttttgcaggttggggtcgcttccaatggtgttggccagcaacgcagcacactttaattggtcggctttatctgtaccgaaaggtaccgtttgtagccacatcatggtgcggaaataatgctttatgcgttcagaacgcgtgtaatgaccgcgcggacggaacaaagaataagggaattgtacatctttataatcaagaaactctgaaccggcattttctgaagcatttactttttctacctcataggccgccatttctcggtaagtatcggtgatatcatcgggcaacttatccgtttcgagcgccaaagcaatgccaaaatacgcctgacaaaatgcggctgaacgacgtatttccttacctgttgcagcattggtaaccaacgttgtcatgcgtttatacatctcttggcagaataaagtagtgagcgagtcgagctttttctcttcaacatcgcgcaaaacagcatcaaaatataggtggaaaagctgtaaataaagatcggtagttacaaagctggggaagttagagtaatcgtttttctcgtagatatgaaacagttgaagcttattatcgggaacaatggcaaagccattacggcccaaagcctctttcaaacgagggtcgaaggtttctaattggaaaggattgagcaataaatcgaggttcacaatatgtcccttcggcaggtttgtgcggttctgaagaattttgttttcgtactgttttatcttgctaataaagtcgatttcttcttttttgagcgttaccggacgctgtccgtaagcgttgccgttgttctcatcgaacgtaccggctgcctcttcggcgtcaaaacgtttccacatcaacgagtcgtaccacgacgtttgcgagtagatactgcgtaaatcggcacttttaaagatgtaaccctgtcgtgcggcaaaggcatttcgcaacactcttaactcgctaagagacagcttcgagaggtccattttcaagtcgatacgcttgttaaacttctcaatgtcaagtcggccgttacccggtagaataactttcttgggcttggtttgcgcaaataatcccaccgtaagtgcgatacatgcggttaataaaatcgtttttctgaacatattgtatgaattttgattgtttaaatagtaaaaaatgaggtgtgaatgaagtggtgcgagcctattctttaaatgctttcaaggcctcatctcgctcaactttgacgacgataaagcgttcaaagcccatcccaaagccttgccatttatactcggcaacgacataatggccgtctgttgttgtttcaagacttcgtattttatcattgacaacgcgaaagtcttgcagtattccgcccagcttagagcctaaccaaagcggtcgtacacgtccttttttgtttttaaagataaacagccgtcggcccggttgtttgtaaaaacgggttatattgataactcccaccatcgcatcgatgcttccgtcgccgtcaatatctcctgtacaaaagcggtaaacaggatgaggcagcttccatttatcgagtgtagagtcggtttttaacgtgagataatacaagctgtcggttttcttttccagctgaaaaacctgcgcctgcataacggatgttgcaatgatgagtaaaaaaaagagagttatccgcatgtaacatctgtgttaatagtgcaaatatactgtttttcaaagagatattagcacattcgtaaaaatttaataactttgtaatcggtatgtatataatgaaataacagattatttttaaagtaaaatagatgtctaacaagccgttgaagtttgccgttttcggtaacgaatatcaagagaaaaacgagcgggtgatagaagaaatgctggcttgcttgagccgttatggtgcagaaatctatctcgacagtcgtttttacgaacgtgtttcgcagcaaaaaacacaacaaacccatatctcgggcgtgctgactgacgattgttttgaggcggatttcgccatttcgatgggcggagacggcacctttttgaaagcggcaagcagggttggagcgaagaatataccaattataggtatcaatttaggtagattaggctttctggccgatgtgcttccggctgaaatagaacaagcattaaccgccctttttaccggcgaatttaggctcgaaacacataccgtgatacaggttgaagctgatggagagggctgtgaaagcaaaccttacgccgtaaatgatattgcggtgctgaagcgcgacgaagctgcgatgatctcgatacatacgtatgtgaacggcgaatacctgataacgtatcaggctgatggtttaatcgtatccactccggcaggttctacggcttacaacctctctaacggcggtccgattatcgttcctggaaccaatgatttatgcttaacgccggtagcaccgcacagtttgaacatccgccctattgtgctaagcgatgatgtggagatagaattgatggtcgaaagcaggtcgcataacttcctcattgctgtcgacgggcgcagtgaaaagttagttgaaggcacgcgcatacgtatcaaaaaggccccctatacaattaaggtagtgcgccgaaacggacaaaactacttctctatgttaagaaacaagatgatgtggggtgcggataacagaagtaatttttaagaaatcatcctcaaccatttcatcttatgcgtttaaaatctctgcttagaatccccgaaaacaagtatcctgcaaagatcattttgcagtggttgtggcgtgcttcaaaaggaaatcggctgcaagcagtgctcaatgcctctatcggggtgttgcaagtagtggttagtttgtcgcaggtgtgggccgtaaagcatgccatcgacgttgcgtcgggggcttcaacggggtctatatactgggctgtggcactgatgggaacgcttattctctgcgactttgcattgagtatatcgagcacatgggtaagaaacatactcggaataaaggctcaaaataggatgcaacaacgtatgttagaccgtattttacgttcggaatggcatgggcgagagtcttttcactcgggagatgtactcaatcggctcgagcaagatgtcaatcaggtggttactttcttaaccgagaccatcccatcgtcgctttctgtgctcgctatgtttatcggtgcattctttgttctcttctcaatggaccggatgttagcgctcattacggtggcgattattcccatttttattcttgtaagcagaacttacgtagggcgtatgcgcaaacttacacgtcaggttcgcgactctgacagcaaagttcaaagtgttttacaagaaacaatacaaaacagaatgctcattaagacactcgaaagcgatgccattatggtcaataagctcgaagatacacaaagcgagctgcgccatcgggtggttcgtcgcactcgcttttctgttttttcgggtgtcattgttaacttcggctttgcgttgggctatcttattgcgttcctttgggcagccattcggatgtctgaacacacgcttacttttggcggaatgacggcctttttgcagctggttaaccgtatacaaacacccgcccgcaatcttaccaagttggctccggcgttcgtggcggtattcaccgctgccgaacgactgatggaattagaagaaaacccgctcgaagaacagggcgaacccatcttcttagatgctccatgcggcattcggctacgtggtgtaacctacgcttacagcagaaaagagcgcacaataattaaagacctgaactttgatttcagtcccggcagttgcacggcagtgctgggtgagaccggtgccggtaagacaacgcttatccgtttactgttagcgttggtgcttccaaagagcggaacggtggaaatatacaacccaacggaaacacaaacactgtcaccgctgatgcgttgcaactttgtttatgtgccgcagggtaacactttgatgagtggaaccattcgcgataacttactgttgggtaacatttcggccaccgacgaagagatgatagaggcgctacacaaaagttgtgccgactttgtgatggaacttcccgacggacttgatacggtttgcagtgagtcgggaggtggtttgagcgagggacaagcgcaacgtatcggcatcgctcgtgcccttttgcgcaaccgaagcattatgcttttcgacgaatcgaccagtgcactcgactcagaaacagagcgcagactgttgcaaaacattctggcaagtcatgataagacgattattttcattacgcatcgccttactgtggtagattattgcgaccaaacgctgcggttaaaccgactgaatgaaaacccgatagagggtagttaactgtcttgccatatatggcattaagataaaaaggagggatgaggagaggatgtatcttgctttttacttcttcattttgtttttcaagcaccatccaatcctaatccctcatccttaattcctgatctatcccaatactatttcaccacaattttcttgcttcctacgatataaacgcctttggctaagccttctgtggcgttggtagacttgacttggcgacgaagcagacgcccgtcaagggtgtaaacattggttagtgccataccatcgccagcttcaacgccgccaatagaggtcgttatcgcatcgacaacaccctgcaaaccggtgatgtcgtaatagcctccgttggtaaaaggcatatctatggtttgtggagtaccgttgttactgaagatgatacctgtgttggaagccgctgtagatgtaaaaaccttgttccaactccatttccataccccgtttccattggttgctgtgcctacgcgtgtgcaggcaacacccggccaaatgccgcccgtataattgccggtgttgtcccatcgccagcaataaacggtgctgttccatccccccggagcctcaaagaaagcgcaagtttcgtctttttcaaccttgcagaatgccggagcaacaaacgttgaagcatcatccttgatgtttttcagtgccgaaaggtctatgttttcactgacaaagtatttaaaattatcaccttctaccgccaactgataacccaacgtgctcacattgctcgtgtttccgagcagcagcaacacttttcctttcgttccctgaacatttagcacaaagcccgagccctgttccgacgcgctgataatagtactttggttgcttacacccgttgctttgcgcgataagataagtttctttatcaaggttttatacgatttccagtgacttaaaaacacgcagggcgtgccgggcatggccaaaatataggcgttggcagctgcgatgttggcattcaaacgcgaacctccttcgttagcaggacgtgccgtatcgtgattgtcaacaaaggttacggcataccgactatagttaggatcgttggctaatgcaccccatgtcagtttgttccacgttccgttgccaaacgcttcgttgatgtagaacttcagcggaaaatcaaatgccgcactctgaataacatttccgtgtcgcgttccttcaatccagtttttcaccggcacagggttgccgtcccaatattcgcccaccgagtaggtaggatgcgaagaggcgttatattcgcctgtatatctgggggcgtagcctttcaccatatcgtagcgaaaaccactgtaacccaaatcgttcaacaaaaagtcgagatacagtttgatattgttttgcacatttgccgatgtatggtcaaggtcgcgtccgccgccgaaatcgtcgcctgtatcagcggctccggtaacgttataaccctgatttcgggtgtttccaccgtcgtcattagcacaaatatctgccaaagtccacgacatggtataacctttccacgtctctgtggggaagtcgcaccagttggtattacccgctctgtggttgataaccacatcttcgataatgcctgtacccttatctttaaaggtcttaatcatcgttcgcaactgtgcttcggtaccaaacgcacttaaatggttaaaccaccatatcggcagatagcccatttgcatatgggtggtgttgcaatagcccgactggggcacccaaatcaggttaaaataagccgacagttcatcggcctgagatgtcaacttgctccattgcgtatcgctgtagctgtcccagtaaaagccttgcagcattacgccgtcatagttggcgggccatccttgcgcacgcgtcagtgtagaaaacgcgaataaagcggtgcataaagcgataaaaatttttctcataaatgcatagtgtttgatttcggatgctaagttacgcgcttttcgcgatgcccttctcttgatataagtcaaatatagcgatgtgcgtgtgcaatcgtttgctttcatgttttctctttacataacccatcccacctacttacaaattgtaagtttgaggattgtctggaaatcggaaggtatttcgcgagagtgtcaacgaaatcatccaacttgttcttaggtcataaaaacgtaaggattttacggttacatatgtcgctgataattagttttttgcaagtttagaggtggattttgtatattatttattcctctaaaactccctaagactatgttttttgttttgcaaaagcataagttttgctgtgtaaaagcataggttttagtctctaaaagatgatgttttgcatgccaaaagcatagcttttgcaactcaaaacctatgcttttattttttgatacatacacttaaagataataataactacttttgattatgttaaaataccttttgtgctaattgtttggaattgttaaaacaatctactatttttgcgaatggtaccgaatgaaaataaaaggcccatgaaagaaaaacgaaataaagcggtaagggtatggtatcaatacaaggcgaggcaagtaatcttgccccaccctaaatgtttacacaacggaattatccttattgtgatttgcttgaatttatgttgcaaatataatacttctcaattactcaaccaaataaaaacaaaagaaatatgaaattagttttaggcttagatttaggtgtaggttcagttggatgggcccttatctttataacagatagtggtgagccaataaaaattctagcattaggggagagaattgtatctatggaccctgacaattcaaaagaattttctgcaggtgctacttgtaccttaaatcaaaaaaagacaaaggcaaaaagtgttcgtaagggttattcccgatatgtgcaaagacgggatgctcttactgcggagttgaggcatataggcatgatgcctgatgaaacattgataaaactacctgtacttgatttatggcagttgcgggcaaatgcagctacggaaggtaagaaattgtctttagctgagattgggagagtgttgtatcacatcaatcaacgacgcggttataagcatggaaagtcggatgtgtcttcagataataagcaaaaaggatatgtgaaagcggtcaatgagcggtattgtatgatacaagaacggcagcagacaatcggtcaatattttgctttgaaattaaaagaaacagctgttacaacagagaaaggaactttttacacttttcgtattaaggatcaagtgtttcctcgtgaggcgtatgaggaagaatttgacaggataatagaatgccagaaaaagttttacccagaattacttacagagaaggttatcgataagttgcgtaattatattattttttatcagagacatggtaagtcatgtaagcatctcgtctctgtgtgtgattttgaaagaaagccctataaggatgaaaatggaaaggttttctataatggacccaaggtggctgctaagtctaatccactctatcagatagagaagatatgggaggaagtgaataatatttctttgcgtaataagaaaggtgaagagttagaaattactcttgtccagaagagagaactctttaattatcttaatacgcatgaaatactcagacttactgtgctttacaagattctcggtattagcaaacgagatggatggtctgccaatgatgcggtaaaaagagggcttaagggcaatacaacatttgtgcaattgcaaaaggctcttcaaggagttgaagattgtgaagaactgttgagatttcagttgaataacatgccaaccgttgtatgcgatgaggtgacgggagagtcgttacaaatggtaaatcccgattgtattggacagcctttgtatcgtttatggcacgcaatttactctcttaaggataaaagacagttgaaagatactttacggaaaaattttaagatagaggatgatgaaattatagatctgttgtataatatagactttacgaaagatggctacggcaataaatcagtgaaggtaatcagacgtcttttaccttatttgcaggcaggattgaagtataatgaggcatgtgagtatataggaattaatcattcgaatagtttaacgaaagaggagaatgcgcaaagggtattgttggagaaactgcctcaaattggtaagaatgaacttcgacaacccattgtagagaaaattcttaatcagatgatcaatgtagtcaatgctattattgctaaatacggtaggcctgacacgattagagttgaacttgcgcgtgaattaaaacaaagtaaggaggagcgaaaattgatgagtgatggtattgctgctcgggaaagagagaagaaaagagacggtaagattttagaagaggagggaatacaccctactaaaaatcgattggaaaggtatcgtctttggaaagagacaggagagagatgtctgtattgtggtaacggaattaacctgaatgaatttttacgtgggggggaagtagaaacagaacatattattcctaaggccttgctctttgataatagctattcaaataaaacatgctcttgcagggagtgtaatagaaagaaggggcggaggacagcttatgagtatgtaagttcattgggtgaagaacgttttgaagtctacttgaatgtagttaaaatgctttatgacgaaggaaaaataagtaagaaaaaaatggattggctcttaatgaagtcagaagatataccacaggattttataaacagagatctcagacagacacaatatatttcccgaaaggccatggagttattgcaaaaggtttgttatgatgtgactgtaacatcaggtcatgtaactagcttcatcagacatatttggggatatgatacaatcttacataagttgaactttaatcgatacaaacaaggtggacttactgaagttgttcagtttgaacatcggggtggcaagcatgaaagagaggtgatttctggttggagcaaacggttggatcatcgccatcacgccatagatgccttggttattgctatgacaaaacaatctgtgattcagcgtcttaatacgttgaatacatgtcgtgacgagatgtatcaagaagtggagagtgaaaagaaggaatggcgggatgattattctttgttagaacaatggctgcgtgagttgaaacattttagtgtagaagaagttcaaagggtgattgcaaagacattagtatcttacaaagtcaacaaaaaaattacttctccaggaactcgagcagtgtactctaaaaggaaaaagaaagtggttcaaaggggaattcttattccaagaggtgtgttgcatgaagattctgtgtatggaaagatcaaaattcaaggggacttggacccggtctatgtcataaaatataaattaggtgtaggtgctatgggatttgtctttacaggaaaggaaacatatgaagaaacaattaaatccaataagaaaacgggattagaagaagtcaaagtaaaagacgatatagggaatacactcatgagtattgttgatggaaatataagaaatcgcatcaaacaacgccttaatattggatttcctgaaggcgaagactataggaataatccccaaaaggctttggaaaacctaaaagatttagataattatccattatatgctgatgacgcttgtaaaattcctattaagtcagtgcgatgtcgtaccggactatctgcagttgttcctctacgctataatggagaaggacaagctgtaggctttgtaaaaacaggaaataatcatcatgttgcaatttatagagacagagatgggggctatcatgagagcatcgttacgttttggcaagctgtaagtagaaagaggtttggtattcctgctatcatagagcaacctccagcgttatgggagtcaatttctagcggtttgcaacgagaaatcccaaaatctattttagaaacatttcctgagccagaatggacatttattgtaagtatgcagaagaatgaatcttttatcctaggaatggaggaagacgattatcaacgtgcgatggaggaaaaagattatgcagcattgggaaataatctctatgttgtacaaaatatttcaagtatggtttatcgcttttgcctctctactacaaccatattcgattcccagaaaatgaataagccagataaaagattcctaaatattcaaagttttcaagccttctttgataaaaatccgcacaagataaagatagacttactgggtgagattgttaataattaaagttttggaaagatgataaagaagacactttgtttcagtaaccccgcttacttaagtttgcgggatgcacaattgctgattcggttacctgaggtagaaacgaatgagatactgacagagagcttcaagaaagagtcggaacgtaccatcccgatagaagatatcggggtggtggttctcgacaatcgtcgtattacaattacatccagtgtacttgaagccctgctggaaaataatgcagctgtcattacatgcgatcagcgtagcatgccggtaggtcttttgctgcctctctgtggaaatacaacacagaatgagcgctttcgtgaccagttagaggcatctgtccctctgaaaaagcaattgtggcagcaaacagtcaagcagaaaatacagaatcaggcatatgtgttagctcaggttacggggaaagaagagaagggtatgaacgtgtgggcagataatgtacgtagcggagatcctgacaatatcgaagctcgtgcagcagcatattattggcgttatcttttttcggatattccaatgttcgtaagaggcagagaaggtgaaccaccaaataatctgcttaactatggctatgccattttaagggcggttattgcacgtgcattggtgggcagcgggttgcttcctacgttaggaattcatcatcacaatcgctacaatgcctattgtcttgctgatgatataatggaaccatatcgaccgtacgttgatcaacttgttattgaaatcattagaaaagttgacaactacgccttactgacaaaagaaattaagatggaattgcttggtattcctatgcttgatgtggtgatagctggcaaacgcagtccgctaatgatcgctgctcagcagacaacagcatctttgtataaatgcttctctggtgaattgcgtcgtatcagctaccctgaaatgtaagataaaatgcctgattttgatcgattaagcgagtatcgagttatgtggatattggtcttcttcgatttgcctacggaaacaaagaaagacaagaaagctatatagactttcgtaaatctctgcaacgtgatggtttcaccatgtttcagttttctatttatgtacgtcattgtgcaagtatcgagaatgctgaagttcatatgaagcgtgtgcgaaatcttttaccaaaatttggaaaggttggaattctttgtatcactgacaagcagtttgctaatatccagctattttttggtgagaagccccaaaagcccaatgctcccggtcaacagctcgaactattttaatttatatacaggaagtttttctaagcaacttttccacctaaagtaaaattttcaataataaggaaacgaaggatagtacattatttaggaataaaaaatcccgctcatatagagcgggatttcacgtttgtactatcttttttatttttctgttttaccttttaactttctgaatattaggaatatacacgtattctgttgttgcttatagtacaaaggtattaaaattcaagcaaatcacaacccgtcattcttagctaacagtgtgcgttctgttgttgcttatagtacaaaggtattaaaattcaagcaaatcacaacgctctaatgattcttacttcggagattatagttgttgcttatagtacaaaggtattaaaattcaagcaaatcacaacgttctaatgtgttgagttcttttgttggtggttgttgcttatagtacaaaggtattaaaattcaagcaaatcacaacaaccgatagttgatgaagctactggagagcgttgttgcttatagtacaaaggtattaaaattcaagcaaatcacaacttaagttgttgtcttcttctgtttctccatgttgttgcttatagtacaaaggtattaaaattcaagcaaatcacaacaccgacaaacacactgtctagccaatgagggttgttgcttatagtacaaaggtattaaaattcaagcaaatcacaacccctttttatacaaaacggctggtaagatcgttgttgcttatagtacaaaggtattaaaattcaagcaaatcacaacggtgtggtaaacgtatttacgacacgtaccgttgttgcttatagtacaaaggtattaaaattcaagcaaatcacaaccgcttattcgaaactcttcgctttattgtgttgttgcttatagtacaaaggtattaaaattcaagcaaatcacaacactatctttgtaatataaataatacaataagttgttgcttatagtacaaaggtattaaaattcaagcaaatcacaacaaattaaagtgcaagatttggctaataagagttgttgcttatagtacaaaggtattaaaattcaagcaaatcacaaccaaagtgaccaatgttgtggatgctatacgttgttgcttatagtacaaaggtattaaaattcaagcaaatcacaactaacaactcaagtaaccgacgtgcagaggcgttgttgcttatagtacaaaggtattaaaattcaagcaaatcacaacagctgacttagtagagtatacaatggaaaagttgttgcttatagtacaaaggtattaaaattcaagcaaatcacaacgatgcgcctatacaagtaggtgacgttactgttgttgcttatagtacaaaggtattaaaattcaagcaaatcacaactaacaactcaagtaaccgacgtgcagaggcgttgttgcttatagtacaaaggtattaaaattcaagcaaatcacaacgatgcgcctatacaagtaggtgacgttactgttgttgcttatagtacaaaggtattaaaattcaagcaaatcacaactaaaagaaactttgcataactttcatacggttgttgcttatagtacaaaggtattaaaattcaagcaaatcacaacattaataaaaatatacagccacaggaagctgttcttgcttatactataaaggaatctaagcaattacctgaaccccgcattaccctcatcataggatgctaaacgcccttgcactgcgtgtgcaagggggcgtttggtatgaaacgaaagaccactgtgtaactttaacgtaacgtctttatatactacggcagaatcagatgtaccttcatcgttttctccaccccatctacagccgtttcgttaaccgatgtcagtctatactttatgtcgaggaaataaccctttttctctgctcctataacctcaatctgaggctcttcaaggtaaatgtcacgatcttttgtctcgctgctcgtcggaatccacgccgttacgttatagtttccgttctcgcttttcacttttacgggttctaagtctacataaccgctacctcgttttatcgacatttgtacaaggtttatccacaacctcgaatctatgcgttttacttcttcactcttatcgccatcagctgtattcctaaatttctttccaaagaattggtttacctctgttttgccagctatagcccactctttgttcaagtcggaaagcggtttaaagcctgtaagcgtcaatgtaaactgcgccagttctgtttcagagccatctttgggagtaagtttgatcgttaggtcgatggtgttgttgccatcgctcttctgcttaccttctaaaagcggagcaaacttatcagtatcgtacttaattaacgagccatagaatacgtcaagatgtcgatacacgccacgcatatacagcttaccggtggcatcggtatctacggtaaattgctttgcataataaaggttcttatcaatggtaaggcttggtgctccattgcttccgctacccgtttttccctgaatgccgttgtaggtgatggtaaacaagatacggcctgaatgactattgttgggcacatacttcacatcgctaatggtggttttgccccaatcgtcggctgtaaaggtgtaatgattgtttccatcgggtgtagatgaaatgaggtcgacaaattttgcaaggtaagccgcagtaaacttgtcggtctttttcaagcgaaaaagcgtgtcgaaatcgaactccgttaagtagtctacatcctctttccattttgcataggcgcgtatcgccatatcttggttggttggtttctgggcaaagccagaaaaatcggcctccatttcgaaaggttttgcacctacagttcccgctactttaagggtgaacgtacctttttggtcatcgcgtttcatctcagttacggctgtaacgtttatttccttgccgtcgatagttttctttccgaggtcgacttttgccttttctaaggcttgggatacgttaagctgtttgtcgaggttgaaatatttcacgatgtccgcggcttttacctcagacgtttcttcttgtgttggtggtttttgtggtgtgggggttggtccatcatcgcctccacaggcagtgaaaagtatgattatggctaccgaaaaaagaattttcttcatttgttaatcctgttttaatactaaactggtgcacctttctctctcttgtatataggcctttgcaaaaataacacagaggcatcgggtaattgtggtgcacaataattaaaatacaaagataatgaaaataattgatattttggtaatttaacgagcgcattaacataatgtgtggttgaatagaaagtgaaaatgggcaatggagagatgtaaaatgcacctcatttatttctgtgcctacgccttaatatattaagatgtagaaagaaagtgttgcattgacccagagataaggcaggttttcaagttgttatttgtggtacaaagattttgaatgcaaagtaaatcaggacttcaatgattatgttacgaggtcaacgaagtacacgaacattcatccacctacttacaaattgtaagttttcgccttgtcaagaaatcggaagcaacttcgcgagagtgccaacaaaatcatctaacttgttcttggctcgtaaaaacgcaagaattttacggttgcgcatgttgttgataattaattatttgcgcgtttttggatagattttgctttctttttgctctcttgaaacgccctaaaatcgtgtttttcggggtgtaaaaacataggttttaccctccaaaagctgatgttttgtatgctaaaagctatgcttttgcaactcaaaacctatgctttgggaaaatcaatgctgatttttcgcttttttatcccttatttttctctggattggaaatgtgatttgtaaggaaaagagaaaactaaaagtgttcttaaacgttaaaaaagtaacaaattgaaagcaccctaaaaggtgaaaaagtaaaaaggtgaaagggtatttcctggatgaaggaggaaagaataaggatgaaagtttatatgtctctccgtcttctgccacctacttcaaccaaccatgccccaccttacttacccaagtaaaagtgaaaaggttaaaaggtgaaggttgaaaaggtgaaaaattgaaacgatacagacgccacacaaaagaccaataatcaattaagaaacgaaattcgacgttagtgagccaaaagagaataattaaaaatggaaagaataaggatgaaatcgaaataagaatatttagcaattaaaagttggaaggtatgaaataaatacctaactttgccacaaaataaaccataataagagttttagagcattaattccgacaacaaatgcagctgtcggaatttatttattatatcacctgaaaacgagaataataatttaaaatattaaagatatggcatatatgtcacaagagggctacgacaacctcgtagcagagctaagacggctcgaatcaattgagcgtccgaaagcatcggcggcaatagccgaagcaagagacaagggcgatttaagtgaaaactccgagtatgatgcagctaaggaggcacaggcacatctggaggataaaattaaccgtttgaaagtatctatcaacgaagcaaaggtgatagatacatcgcgtttgagtactgatgctgtacagattttgtcaacagtagagatgactaacctggcaacaaaggctaaaatgacgtacaccatcgtgagcgagagcgaggctaaccttaaagaaggaaagattgctattactacgcccatagctcagggactgctgaacaagaaagagggtgacgaggtggagattactattccgcgcggaaccattaagttgagaattgacaaaataacggtagcatagacgtatggatatattttcaaagattgccgcaggcgaaatacccagttacaaatgtgcagagagcgagcgattttatgctttcctggacattaacccattggtaaaagggcacacattggttattccacgtcgcgaggtagattatatcttcgatatggaagatgaggaattggccgaatatcaagtgtttgccaagaaggtggcaaaggctgttaaggctgcgtgtccgtgtataaaggtggctgaagtggtaataggtttagaggtaaggcacgcacatattcatcttattcctatgaattcggaggcagatgtggactttaaacgcgaaaaattaaagccaagcgaaaacgaattgagggagatttcggatagaatttacacagaatttatgaagctgaagtagggttctaaccgagcttatcgaaaaatattgcccccgaaaagtcttttatcaacttttcgggggcaacgtttatttaccttcttttctatttttgagaaaccgataaagcccctgacgcacagagcgcaacccaaattgctcggtgtgaatatcgttgggcgagagccacatacattctgctgcgtcgtccatcgctttgagttgtgtgtcgtcttccacttcacaaagaaaaaataaatcgagtgttcggatattcatacccgaataaagatacacgttgggcagactgaaaaggtagtggcaagacgtaacttttagtcctgtttcttcaaagacctcgcgtataactccttcttcggcagtttcaccaaggtctgcaaagccacccggtaaatcgagtgtgccctttcccggatcgtttttgcggcgctcaaccaatagctctccctttgcattcagaataaaagcaacgttcgcactactgggatttaaaaagtattcgaagccacaaccggtacattttttacttttttcggtgttctcttcaaagtgtttgctaccgcaattgggacaataactgaacttttctaacgggtgcataccctttgtaatgattgcaaatggttagtgttctaagtttttacccaaccagccgtctatagaataacgccccggtcctgtaaaaaacaagaagataaaaacgataagataagcgaaggctaactcgccttcggtaatcgaaccatggtgagcgtagaagaaagcaacggacattgtgaaaatgatgggtattaaagccaagcgagttaatacaccaaatatcagcgctaatgaacacaccaattcgccaaaaatggctaaaacgagcgatatttcgtgtccaacgccaatcggatcagaaaaattctctcccatcatattaaagttttgcagcttttgaaagccgtgaaaagccaacaataaaccgaatattacacgtgccaaaaacaatgatatggcagttttaaaactctgttcgctcgatgggaacaataaatgaaatactttcatacgtttgcatttaaaagatgaatacctttattttatatcataatttaccaccgtaacataggtcgccggcatctccaaagcctggaacaatatatttatgttcgtttaaacccgggtcgatggctgcacaccaaatggtggtttggtcttcaggaaaagtatttttgatatgtgagatgccctcgggcgacgcgataacgcaagccacatgaatgcgtttgggtgtacctttggtaagaaaagccttgtatcccagctccatagaaccacctgttgccaacatcggatcagcgataataagattttttccctcaatactgggtgtagcaagatactctacatgtatgccaactttggtgtgttcgtcgtttacatactcgcgataggcagatacaaaagcgtttccggcgtgatcaaaaatattgagaaagccgttgtgaaaaggaagtcctgcccggaaaatagtagctaaaaccatctcgtctgttggtacggcaaccggcgatacgcctaatggtgtggtgatattctttgtttcataatcgagcgtcttactgatttcgtatgcttctaattcgcctatccgctgaatgttgttacgaaagagaagtctgtttttctgatattctacgtcacgaatctctgccagatactgattgataatcgagttctgttcactaaaatttactatctgcatagcgttgttgggaataaataggttgttttgactgcaaaaatatgaaatttcggcttatttttgtaaagcccaaattacaaaagtgttggtacaaaaaagttttttatattctttaacctaaaatcaaaacccaagatgtttttttatttattgaaacttgttgcttctttactaatttgttaactttgtgcccacaacgatagtggaactatcctaagacaaaagttttacatttaatacatttataaaatggcaaagtttgacaagtcagtacttgaaaagtacggaattacaggaacaacagaagttgtttacaacccttcttatgagatgttgttcgaagaagaaaccaaagcaggtctcgaaggttttgaaaaaggtcaggtaacagaattgggcgcagtgaacgtgatgacaggtgtttataccggtcgttcgcctaaggataagtttatcgttgacgatgaaaattctcacaatacagtatggtggacatccgatgaatataagaatgataaccatcgtgcaagcaaagaagcttgggatgttgtaaacaaattggcaaagaaagagctgtctaacaagcgtttgtttgtagttgatggcttctgtggtgccaacaaagatacacgcatgaagattcgcttcattgttgaagtggcttggcaggcacactttgttactaatatgtttattaagcctatcaaccaagaagagcttgatcaagaacccgacttcatcgtttacaatgcttcaaaggctaaggttgaaaactacaaagaattgggtctgaactctgaaacagcagttgtattcaacgtaacaaccaaagaacaagtaattttgaacacatggtacggtggtgaaatgaagaaaggtatgttctcaatgatgaactactacctgccgctaaaaggcattgcttctatgcactgttctgccaacaccgaccttgaaggcaaaaatacagcaatcttcttcggtttgtcgggtaccggtaagacgacattgtctaccgatccgaaacgtttgcttatcggtgatgacgagcacggatgggacgacaacggcgtattcaacttcgaaggcggttgctatgcaaaggtaatcaaccttgacaaagagagcgaacccgatatctacggtgcaatcaaacgcaatgcattgctcgagaacgttactgttgatgcaaacggaaagattgactttaccgatggaagcacaaccgagaatacccgtgtttcttaccctatcaaccacattaagaatattgtgaagcctatttccgcaggtcccgcagccaagcaggttatcttcttgagtgcagacgcattcggtgtgctccctcccgtatctatcctcagccccgaacaaacgaagtattacttcctctcaggcttcaccgcaaagcttgcaggtacagaacgtggcatcacagagcccactcctaccttctcagcttgcttcggacaagcattccttgagttgcatcccaccaagtatgcagaggaacttgtgaagaagatgaataagaacggagctaaggcttatcttgttaataccggatggaacggtactggcaagcgtatctctattaaagatactcgtggta

SEQ ID NO: 3266 - DNA, 22647 bp, synthetic construct
  misc_feature 1..22647: note = Synthetic
  variation 16680..16681: note = note, n is a, c, g, or t
  source 1..22647: mol_type = other DNA
tgttgtccgtgatttttccactgatgctcgaagtggtcacctgggccatcaagctaatggaggcaatcatagccacgaaaaaagtaagtaactttttcatagataataatttaatgttaataattaagttgattgtattgattatcatttcgttccgtttccaatttggcctattaaaccgtgcaaatataagccattccttttaattcccaaaccatatttcaataactatttccgatttttcacgaaaagaaatcaacatgctttgtttataacttgtaattagttgatagttaatagttaatagttgatatttgggagtcgtcggaccacaaaaatgcaccttatattaaataaacgggatacaagacgcatcgaaattcttgtttctttctgccaaagtctcgttttttttgtgtatttttgaagcctgaaaaaccaaacctatgaacagactatcgattataactttgctgacggctttggtgcttggcctgtgcgcttgtggcgaaaaaacatccaagcagttcaaggctatggaagaagaagtgaaaaccattgaaagccaaatcaatgcctcagaggattgcgacgatttgcagatgtcgaacttcagcatcctcggccttcgctctgacttggacaacctgattcaggccgccgagattcccgatgaggaaatcaataagctcgatgagatgctgactggcctcgaagccacttggggcggcaaatgggcctccctcggctgcgaccaaatcatcaatgacgaagagatggacacctctggcgaagaggatggcgattaccaggactacaatgtcttgtaagttgctccttttttggtatttttgcaccttataaaaatcacgacaatgggattcttctatcgacataaccccaagaaattcaattataaaccccgctatttcgatcctgaaatgcaagaatgggaggagaaaaaggccgctgcaggccttgattctaaattgacgcacgaggaacaacttagaatcaagatgcgcaagagctggagtgtgcaaaaagacgaggaaagcaaggaggaacaacgcgccaagctgattcgcagaatcgtgttgggtgtctttgtggctttcctgttctatttcattttctgcacgccgttgatgaccaatatcgtccgcggtttgatgggtaagtaaagttatgcaggacatcattaaattattgcccgatagcgtcgccaaccaaattgcggcaggcgaggtaatccaacgtcccgcatcggctgtcaaagagctgatggagaacgccttggacgctggtgccacgcaaatcgacttggtggtgaaagacgctggcaaggctatgattatggtcgtcgacaacggctgtggcatgtcggagaccgatgctcgcctttgcttcgagcgtcatgccacttccaaaatcagtaaggcggaagacctatttgccattcgcaccatgggatttcgtggcgaggctttggcgagtatcgctgctattgcacaggtagagctgaagacgcgccgcaaggaggacgaagtgggggtgaagattgtcaacgaaggctcggtggtgaaggaacaaagcctcgtgccgatgcagcctggcaccacgtttacggtgaagaacctgtttttcaatgtccccgcaagacgtaacttcctcaagtctgcgcaagctgagatgcgacacatcgtggaagaatttacccgtgtcacgctgatgaatcccgagattggcttcacactcaccagcgacggcaaggaaatctatcacctgtatccaggcaacctcaagcagcgcatcatgggtctgtttggtaataattacgaggaacgtctgctgcacgttagacaagaggccgagcgagtgcgcatcgacggttacatcgtcaaggcggaatatgctaagaagactcgtggcgagcagtatttctttgtgaacaagcgcttcatcaagcatccttatctgcatcatgccatcgagaacgcctacatggagatgatttccagcgacagttttccgggctatttcctgaatattgaggtggatcctgccgacatcgacattaacatccatcccaccaagacagaggtcaactttttggatgtcaagctggtgtatgccattttgcatgctgccgttcgtaaggccatcggccagcataacctctcgccgatgattgacttcgacgagtccgccgacctgaacaatgacttcaccttagccatgggtatgtcgcaacctctttcgatgcccaatgtgccgatagacccgaatttcaatcctttcaggaaagaatcggcaccgcgtgaaacgcattgggatacctcgatgcccaaggaaagcaaccacactcctggcgactggcgcatcctttacggtgagcgtaacgacatagaagaaccaatcgagtcaaagcaggaaacgaaatcacagtatctgcaagtaaatcagtcgtatatcgttacggcagtgaagtcggggctgctggttgtggatcagaatctggcacatttcagggtgctgtttgagaagtatctgaaagagatggaaaaccacgacggtgtttcgcagcaggaacttttcccgcaggccttgacgctcaatgtgaacgatgcctcgctgttgaaggagatgctgcccgagttggaaaacctcggctttgtgcttgaacaagccaatccgacgacctttatgattaacggcacgcccgccgatgccgcaggaaacgacgctgtggctttgctggaaaagattttggacaattacaagatcaaccgcactgacttgcagctggatagaaaacttaatttggccaagactatggcatcgcaattgtccattaaggcgcaaacaaaactctctgaattggagatgcaaaaccttgtggacgaattgtttgcctgtagtgtggccgaaattgcacctaatggaaagaaaatttatgtcatagtaacgacagaagaacttttagccaaattcaataaatcttgaaatgcaaagcattgattacatcgaatcttcgatttcaacgaagttaaatttgaaatttgaaattttgaaattagaaatttgaaatacaacaatgaacgaacaatacagtccaacaggttttagggtactccctttggtggttaaaaacctactgatcatcaacatattgatgtttgtagccgctttcacttttgaacgcttcaatatcgacctgaacaatatccttggcttgcatttcttcaaagcctcggacttcaggatttaccagctcttcacttacatgttcatgcatgccaatttcgggcatctgtttttcaacatgttcgcattgtggatgtttggtaacacgctcgaaaacatctggggctcaaagcgtttcttgttgttttacatggtgtgtggcattggcgctggactgtgtcaggagttggtgcagtatattcagtacacctcatcgttggcacaatacgaaactgtcaatttgagcggtcgcatcatttcgatggacgcctatttgaacatgatgaacaccgtcggagcctcgggtgccatctacggcttactgttggccttcggcatgatgttcccagattcgaggatttacctgtatttcctgtttcccatcaaggcgaagtggttcgtcatcggttatgccgtgcttgaactgatcatgggtatcggtggtgccgacaacgttgctcatttcgcacatcttggcggcatgttgttcggtctcatcttgattttgtattggaacaagcatggcgtcaacggaccgaattttgacttgaataaatggaagggatggttctggaagtttaagaataggaagaaatacacgcgttacgaggaaatcaaggatgagatgccgcgttccgatgatgattataactatcaaaaggctcagaaagagcgtgatatcgatgccatccttgacaaggttgccaaaaacggctatgatagtttgacgaaagaagaaaaagagttcttgttcaaaaacagcaaatgacatggaaagtcgggagagaggttttttcgggaaactgctggtgttcatctttgcactgctggcctttgttggcttggtggcgatggcactcagcgtccttaatgcctatatcgacccgacccgttttgtctggaccacgttttttggcttggccttttgggaaatcctttgctacaacatattgatactcatgattttgttgtcgctgaaatcgcgcaaggcctggattgcagtgttggcactaatgattgccattccaggcttcagcaagtcctattcgagaggaaagaaagtggaagccgacagcagcatccggattatgagctataatatgcacaattttgatcattttgatgacaagattgatagggagagttttgcatatcaagtaatgaacatggtgcgcgaccaaggtcctgatattctgtgttgtcaggagttcgcagggttcctgcccaaaataacgcgacaagcatgtattgatagctttgcagtaggtgccggattcccatacgtgtattataataggaaaagcaattatggtggcaatgtcatcttttccaaatatcccatcaaaaaagtatcggaggtttccgtcatcgccgaggagcatacttatggcatcatggtatcggtggatgctggcgagaagggcaaatttcatgtcgccaatatccatcttctttcatataagattactgacgatgagatagagagcctgaggacaccgcaagaacggcagcaatatgaggcgttggggaagaccttgatgcacaaattgaattttgcgttccaacgtcgcagcgaggaattgcaacaggtgttgaagggactttctcctattgaagggcccgtcattgtttgcggtgatttcaatgagccaccgctgtcgtacaactaccgtcagatgcagaaggcagggtttgtggacaccttcactaaggtcggacatggcatcaagccgacatacgctggcaaactgccgctgctgcgcattgattacatttggggcaatgatggtgtcacgccactcgatttcaagcgccaccgttggaaggcatcggaccattatccaatcatgttagattttgcaataaacgaataaaatatatgagacgcaaacattgcgtctctataacaattcaacgattcaacaattaaacaatcaacataaaatgacactaattaaatccatatccggcattcgtggtaccattggcggccagccgggcgacaacctcacgccaatcgacatggtgaaattcaccgctgctttcgtcaaattcgtgcaacaccataaaggtgtgaaacgccctcgtatcgtcgtcggtcgtgacgcgcgcctttcgggattcctcgtcaatcaggtggtctgcggcactttgcaagccatgggtgccgacgtgctcgacatcggattgagcaccacacctacgacggaaatcgccgtgacaggcttgaaagccgacgctggcatcatcctgacagccagccacaaccccgcacagtggaacgccttgaagctcctcaacgagaagggcgagttcatctccgccgccgaaggcgcttggctgcttgatgtggctgccaaggacgacttcgacttcgttccgatcgaggaaatcggcagctatcagctggtggacggctggatggacaagcatgtggaaatggtgtgccaactgcccttggtcaacaaggaggtgattgccaaggccaatttcaaggtggctgtggatgcagtcaactcgacgggcggtatcgccattcctaagatgttgcgtgccctcggcgtgaaagaggtgctggaactcaactgcgagcctacgggcaagttcgcccacacgccagagccgttggcccagaaccttactgacatttgccgctacgtcaaggagcaaggttgtgacttcggcgtggtcgtcgaccctgatgtggaccgtcttgtctttgtcaaagaagatggtgaactgttcggcgaggaatacaccctggtctcggtggccgacttcatcttgaagcatacccctggcccgacggtgagcaacctgtcttcaactcgtgctttacgtgacgttacgcaaaagcatggacaacagtactttgccgctgccgttggcgaggtgaacgtggtggagaagatgaaggaagtgggtgctgtcatcggtggcgaaggcaatggaggtgtcatctatcccgagttgcactatggtcgtgatgccctcgttggcacggctttgttcctgacccagcttgccgagaagaaggtgaaatgctccgagctgaaaaaggaatatcctgcctatttcatgtcgaagaacaagatccaacttacgcccacgaccgatgtggacggcatcttggccaagttcgccgagaagttcaagaacgagcaggtgaccaccattgacggcgtgaagatcgactttgaggaaggctgggtgcatctgcgcaaatcgaacaccgagccgattattcgcatctattctgaaggcaagaccgaggccgaggccgagcgtttcgccaatatgatactggaagaagcaaagaaaatggtgtaataagtcggccttttgacaagctcaacggccttggttttacaggtctctgagcttgtcgaagggccgtgtcaaaaaaatgaaatatgaaaagagggttcggaagcgacaaccattcgggtgtgtgccccgaggtattagaggccattgcccgcgtgaacaaagaccatgccgtagcttacggtgatgatgaatattgcgccgccacggaagcgaagttccgtgaacagttcggcgagcaggcgagggtgttcttcgcctttaatggcacgggatgcaacaccttgtgcatcgatgccatggtgcattcgcacgaggccgtggtttgtgccgagaccgcccacatcaacgtggacgaatgcggtgcgccgcagcgcattgtgggctgccgccttctgacggtagatacccccgacggtaaattgacgccagcgttgatcaagacgcgtctgcatggctttggcttcgagcaccactcgcagcctaagctgattagcatcacccagcctaccgagttgggcaccttgtacaccttggacgaaatcaaggccatcgtgggattggcaagggaatacaatatgtatgtccacatcgacggtgcccgtttgggcaacgctgccgtggccttgggttgtaccttcaaggagatgaccaccgacctcggcgtggatgccgtctcgttcggcggcaccaagaacggcctgatgatgggggaggcggtggtgctgctgaatcccagcgtttgtcccgatttcaaataccgtcgcaagcaggccatgcagctttgctcgaagatgcgtttcatcgcagcacagtttgatgcctatttcgagaacgacctgtggaagcgcaacgccgagcacagcaaccgcatggcgcagctgctgtacaaggcggtgaaggacatccccggcgtgaatgtcgtctatcccgtgcaggctaacggtgtcttcgcacagctgccccgcaaggtctggaaggaactgcaaaaccattatttcttctacgattgggacgaagacgccgacgtggttcgttggatgtgcgcgtttgataccaccgaggaggatattgcgcagtttgtgggggtgttgagggagatgatgatgaggcaatagctattcatatcttttcactgctgcaaccagctcatcatgaatcttatgccttaatgatagcggttcgatcacttctaattcgttgccttcttttaggatggcttgtcggaaatcgaaggtcggggcaagatggtattcaaaatctgtgtatgtgtcggtcttgcatacttctttttgcgagtgatgcaaggggagggtgcgcagtaggttgggcatgttacaataggcccgtaaaacaatgcgttggacagggatttcctctccgatgaacacgccaaaataattcttgaaaaaggtctcagcatcgaaatcggcagctaattcgtatggtgcatctgtttcggttaattccgtcatacggtcgagggcgtagatggccaatttgtagccttttctttcgcttttcccgagcaggtaccagcgttggtggaaaagtttcaagcaataaggctcaattagtgttgtgtagggcacggagtcgttgaatttttggtagcccatttgaagggtgtggtggtctttgagggcgttgatgatggtttcgaggtgctcgaggccagcgggtatgtcttccagtatgatttggtttttgatggagagactgtcaaataggatgccattaacggtaagtgtgcggagcatccagttctgagtagagttgtcacaaagtgtttctgggttgctgatgtagtattggttcaaattatcgcattcgatatggatgccaaacatatctccgatggactgccgaagtcgatagaaagtggtgcgagataaaggtttcccgtcgtttaaatcgctgttgatccattgttgacagatgcgttcgaggctgattcgtttggcacgttgaatggtgttgacaagccatgtgtactgtctgaaagtgtcggtgtttctcataatccgttgtattttggggacaaaattagaaaaaaatcgtaagtgtttcatgttctgaaacagaagggttgtatttttggcgcgtgtaaccttattaaactaggtatgaacagcgacgagatttgggcaaaaaaagacgaggcgactgaaatcgccccgaacttgatgttttcacaacggaataatccttattgtgaattgctgcataacttgtgctgcaaaaatagatattttttcaatatgacaagtgttttttgaaaaaaatagtaattttgaccatctatttaggaattgataaataattgacaaatgaagaaaatattaggacttgacttaggtaccaacagtattggttgggcggtggtgaatgcggatgacaattggaaacctatttcaatagaaagtatgggtagccgaattgttccactttctccagatgacactaatgaatttaccaaaggtaatgctatttcaaagaatcaatctcgaacggaaaagcggactgcacgtaaaggatatgatagataccaattgcgacgggagtatttgaccttggaattgcgcaaattgaatatgcttcctgatgaaaaactgataaagctaccaatattggaattgtgggaactcagatccaaagctgcaacaaaaggaaatcaattgtcattgcctgaaataggacgtgtgttgtaccatatcaatcaaaaacgcggttacaaacatgcaaagtctgatgaaaatgcagatacaaaacaaaaagcctatgtagcggaggtaaatgctcgttatgcaatgattaaagaacgaaatcagacaattggacaatactttgctgaaaaattgaaagagaatgaaattgttacaccaaaaggcaaattatatacctacagaactaaggaacaagtatttccacggatggcttacgaggaggaatttgacaaaataatggaatgtcaaaaagagttttatcctgaaatcttgactaatgcggaaatcactaaattacgcaatgaaattattttctatcagagaaaactaaagtcttgcaaacatttggtgtcagtttgtgattttgaaaagagagaatacgagactagagaaggtaaaactgtcttcggaggtcccaaagttgctcccaaaagctctccgttgtttcaaatctgcaagatatgggaagaggtaaataatataactttgaagaatcgtaaaaacgatgaattatatattacattagaacaacgtaaagcgatggttgattttttggattcacacgagagattgaccttaaaagatttgtattccatccttggaatcagcaagcaagatggctggtggggcggaaaatctataggaagaggattgcagggaaatactactaaaattgcattaataaaagcattaggcgaatttgaaaatgccgaaaaactacttcaattcaatctgacgaattctgatagcaatttggttgatgaggtaactggtgaaattatccaaatcgttgatacgaaagtggaaaaagaaccattatatgatttgtggcataccgtttattcgatttcggataaagaagaattggcaaatgcattaaaaaagaaataccacatatatgatgatgacataataaatcaactctatgcaattgattttgtcaaacaaggctttggcaataaatcaactaaagctatgcgtagaattctaccttatttacagcaaggattgaaatatagtgacgcttgtgaatacgcaggatttagacattctgaaagtttgaaaaaagcagaaaacgaagcgcggcagttattggaaaagttgcctcctatccagaaaaatactcttcgtcaaccgattgtagaaaagatacttaaccaaatgattaatgttgtcaatgcgttgatggttgaatttaatacgtattttgactcaattcgtgttgaattagcaagggaattaaagcaaagtaaagatgatagaaatgccactttcttgcagaacgaggcaatgcaaagattaaatgaatctatagcaaagcgtttaagctctgaaggaattaagcctaccaaaagaatcatggaaaaatacaaattcattttcccaaccaaaggttgcattgacaaaaaaactggaaagtttgtaacaaaaagttttgatagtttatcaactgtaaatcaatgcatctattgtggaaagccgttttctttagctgctgcacttaatggagaggagtatgaaattgagcatattattccgcgtgacttgctttgcgataattctcagagtaataaagtcttgtcttgtagaagctgtaattcaaagaaatctaataagacagcatttgattttatgcgtaaccaagatgaagtcatgtttgataactatattaaacgagttgagaaatggtacgaagagggtattatttctccttcaaaacgagagagattattgctttcgcatgaggattatttggagcgaaaaagaaaaggtaaggttactgatgaagacaagaaatattgggaggagtttgtttctcgtcaagcgggagaaacacaatatatttcgcgcgaatcaattaggatcttaaaacaatgctgtcgaaatgtaaatgctactagtggaacagtaacagctacattacgccaactgtgggggtataatgatattttgcatcaacttaacttcgaaaggtacaaacaagccgggttgactgaaactgtgacatgggaaagtgaccatggcaagaacaagcactccaaagagcaaattgcggattggtcgaagcgaatcgaccataggcatcatgctattgatgccttggttgtggcttgcactcaacaaggttttattcagcgcattaatacgctaaacgcagatgaaacaaaggatttgatgagaaagcaagttgaatcggctgggattaaatatgaagaaaagaaagctttattggataagtatcttttatcatttaagccatttaatactcaaacggtagctgatgaagtcgataaaatattagtttcatttaaggcaggaaaaagatcggcttcaacgggaaagcggatagaatataaaaaaggtaaaaagcaaattgtacaagagggtgttgtcgtgccacgcggtccattacacgaagaaggcgtatatggtcagataacaataaacggagaaaaggagattgtaaagaagtataaaatgggtaaaggtgcccaaggttttgtttttacaggaaaggaaacgtatgagaaaaaagagaaacttgataaaaagacaggtgaagttcagataatagtagaagataagattaagaatgctcttgactctattgtggatggtaatatccgtgctaaggttttgcaacgtttgaactatggctttgaagacggaagagattatagggacgatgtgaagaaagccttggataatctgaacaacttggataaaaatcctattttcgcagatgagagcaatactataactattcgaactgttcgatgccgtacaggattgtcggctgttgttccaataaaacgtaatgaacaaggtaaacctattggttttgttaaaccaggaaataaccatcatattgctatctatcgggacaaggagggacatgtcaaggaacacgtagtgacattttggcacgcagtagaacgtaagaaatacgagatcccagtagttatatacaatcctagagatgtatgggatagtattatggataaacaactacccgaatcgtttttggaacaattgcctgatgtaaattggacttttgaggagtgtctacagcagaatgagatgtttgttttgggaatggatgatgaatcatatgaaaaagctgtacgagataaagactatgctatgataggtaaatatctatatcgtgttcaaagtgtctctgaatcagattattggtttaggctgcatattgaaacccaaaacgacaaaacagcatctgcgaaactagcgaagaaatactatagagtaaagagtataaagggcttttatgaactccatccacataaagtatatatttcaataataggcaaaattaaggaactttgagaaagcgtaaaataagcggttatgaccaacataaaactatttcaagataagaaaatccgttccgcatggaacgatgaagaggaacaatggtatttctccgtggtggatgtggtggaggcattgactgactctcctaatccgcgtcagtattggagaaaaatgaaagaccgggacctgaaagaatatcagtcgtacccattttgggtacaactgaaattgactagtacagatggcaaaaagtatagtaccgattgcgccaatatcaaaggcctgttccgtatcatccaatccatcccctcgccaaaggctgaacctttcaagcaatggctggcaacggtgggctacgaacgtatgctggaaatagagaatcctgaactggcacaggatcgcatgaaggaactctacgaaaaaaaaggctatccaaaagattggatcgacaaacgccttcgtggtatggccatccgccaaaatctgaccgatgaatggaaaagaagaggcattaccttggaacaggattatgccattcttaccgcagagatttccaaggccacctttggcatgacaccctctgaatacaaggagttcaaaggcttgaccaagaagaaccagaacctccgcgaccacatggacgacttggaactgattttcaccatgcttggcgaacgcgtcacaacggaaatctcacaaaaagaagatcctgagacttttgaggagagccgaaagatcgcaaaacgaggcggaaatgtggcgggcgtggcaagaaaggaaacggaaaaagagcttggtcgcagtgtttcaacccccaataactatttgccaacacaaaacaccttggaattggaatctgatgattaaacgcacccttttcttcggcaatcctgcctatctctccatgcgcaacgcacaattggtgattaaactaactgatgcccagacgcaagaggaggccgtgaaaaccgtgcctatcgaggacatcggtgttgtgatactcgaagaccgacaaatcaccatcaccaatggtgcaatggatgccttgctccaaaacaattgtgctgttatcacctgcgatgagaaacacatgccagcaggtttgttgctgccgctcgaaggccatacagtacagagcgagcgcttccgttggcagattgaggcttctttgccgttaaagaaacaactgtggcaacagaccgtccaagccaagatccgaaatcaggcgtcggttttgaggcggttgagtggggcggaggtggggtgcatgatagcctgggccaacgatgtgaagagtggcgatagtgaaaacctcgaaggtcgggcggcagcttattattggaagtctgtttttccggaaatggaacggtttgtccgcgaccgcgagggtgaggcccccaacaacttgttgaactatggctatgccatcgttagggcagtgatagcccgttccttggtggccagtggcttgttgcccactttcggcatccatcatcacaatcgctacaacgcctattgtttggcagatgatgtgatggaaccctatcgaccatacgttgatgaattggtgattgagattttgcgtagcggcgttgattgtggtgagctgactacggatttgaaacgtaagctgttgggccttccagttaaggaagtagtcatcgacggtcaccgtagccctctgatggtggcagcatcgcaaaccacagcctcgttagcgaagtgttttggtagggaattgcgaaaagtggtttatccaatgatggaattatgatggaccgtttcagtgaatacaggattatgtgggtgctggtgctttttgatttgccgacggagacgaagaaagagcgcaaggcgtatgctgactttcggaagcgtatcatggccgatggcttcacaatgttccagttttccatttatctgcggcattgtccaagctatgagaatgccgaggtgcatatcaagagggtaaagtcgttcatgcctgagtttggcgacatcggcattatgtgtatcaccgacaagcaatttggcgatatggagattttcagcaactgcaagcctaaggcggtggacacgccttgccagcaattggagctgttttgaatcgggaaaaatggtcataacaaagaaaaatccaactcaaatgagctggatttttcttttctgaaacaacttctaaattgttgtggctctttgttttatccatatcgtgttgtttcaaagagcaaagatacaagttaaatgcaagcaattcacaacaagaagcgtgaatattacctccgttcttagttgtttcaaagagcaaagatacaagttaaatgcaagcaattcacaacttcattccacaaaaattattcatgcaaaggttgtttcaaagagcaaagatacaagttaaatgcaagcaattcacaacaaacgtttcaatcatatgaaaaatttatgtgttgtttcaaagagcaaagatacaagttaaatgcaagcaattcacaacacgtgaaggacgatgttctcccttacaattgttgtttcaaagagcaaagatacaagttaaatgcaagcaattcacaacgttatgtcaactgctaacggttcaacgagtgttgtttcaaagagcaaagatacaagttaaatgcaagcaattcacaacgcaccatattgagcaagtgcacgatcaatagttgtttcaaagagcaaagatacaagttaaatgcaagcaattcacaacttcggacttattatgagtttttgcgaacttgttgtttcaaagagcaaagatacaagttaaatgcaagcaattcacaactgatgcgcgaatttgatgatagatattttgttgtttcaaagagcaaagatacaagttaaatgcaagcaattcacaacagtgcatccttgatgtgaaacagcggctccgttgtttcaaagagcaaagatacaagttaaatgcaagcaattcacaacattctaaaaatgatattcttccttataattgttgtttcaaagagcaaagatacaagttaaatgcaagcaattcacaacaaagtaccgtctttacgtttgaccttgtggttgtttcaaagagcaaagatacaagttaaatgcaagcaattcacaactggtttgtcccttgctcgtaatggtcttgatggttttagttctgcttttaatgtagatagttattgtcgtcgttataatcttgaaatggataagattgattctgaaattaacgctgaaaatgcccgttttgaaaatcttcgacagttgactaatgtttatcgtagccaggctcaattagaagctgaaaaggctatgcatgaaaatattcttaggcagtttgatgataaaaagcttcaagttgcaaagaaatatgaggctatgtttgctgatggtgaaggtttacagcagtttattcttgctcaggattttggatataattccaaggagtatcaggcttatatgaagtttattcaggataagttttataatcaaggtcttggtagttatgaggcccaggttgagaaagcctttgacctctttaaaaatcaggttcaaggctctgacgctggtaagcgtgtcaatgccgaatattttgctaagcttgaaaattataagtatctctttggtgaaattgctcatatgtatttctcgggtgatggtagttttgaggccttggcgcatcgttttgtttcaattatggctgcctcgcttaatttaggcgaggaagagttggaaaaactgattaaagatgcatttcatccatcaagcgagtaatataatacatccaatcattaaggctataattccaataaagcctattacaagcaatcttctaatagttcgataaaatttgtccttttcgttcataactctttaaatttagcgattatggttgcaaagatagaaaattctgattatccgtgtgcaatttgtcattattatgatatttataatgatgaatgtatgttagatgctccatgtcctattgacttggatattgaagtttattgaccttaaaccgccgattactttgtcggcggtttttttnnaaccgccgattactttgtcggcggttttgttcttgtctctatatgtgtaggtgaaacaagtcattttatcttgactttttcattgtggaaacaatctgagcggtaagacgataattcttgtctcgctcaaagacctttataatgttatgccctgctttcatccaattacaatagtaaaccctacaaaatacgtatcacttaaatatcgtgataggttcactttgcgtgtgccttgcggccagtgcgcttattgtcaagaagcaaaaaagcgagaatactatttgcgctcttattatcatgcgcaacaatgtctttctgctggtggcttcgtgttatttgatacattaacttatgcgcctgtgtacctcccgaaaattagcgattacttcccaacgaaatataattatccctgttttgatagtatgcatattaggaagtttattgcgaaattacggcaaaggtgcaaacgtggttataagtcaaatttcgattttatgctttcttcagaatatggcagctcggagtttcatcagcatcgacctcattatcatatattgttttttgttacgggcaaaattgatcctttaactttcagctccttggttgcggattgttggttttatggtcgcaccgatggaaagccttataagagtgattactacgtgataaacaacgttcttaatggagattcggccaaaaagatacgtgtgctcaaatatgtcacaaagtacatatcaaaaagttgtctctttactaaggaaatcaataaacgtatcaatgctatagtctttgaaatggcgaatatgtacggcagtaagcgtgatgagtggcttaattctctcggtgctgctaaatttcgtgagcagcttaatagatggatgggtcagtttcatcgccaaagtactggttttggtgcttgcctattggaaaacctagatattaacgaagtctttaaagatggtagacttaaagtagtggataatgagaagattattctttcaattcctcttcctacctattataagcgtaagttgttctatcagcagttagaagtagatggcacaaagatatggtcgccaactgaattgggtgtgcaatatcttcaaactcaaaacactcgtttaaagaagtatcttaaagactactattctgctgctgctgcccagtgcaagctggatatagacactactgctctctcggaatacgttgtagactatcgtggtagaatcaaagcacctaacccagaaagtaccattgaacagcgattgttgtttcaaagagcaaagatacaagttaaatgcaagcaattcacaaccctgaaatagctgctatggaattaggcttagttgtttcaaagagcaaagatacaagttaaatgcaagcaattcacaacgcaattcccaatatttgaacacttacactgttgtttcaaagagcaaagatacaagttaaatgcaagcaattcacaactactttgttgacgctatgggtctggtggcgttgtttcaaagagcaaagatacaagttaaatgcaagcaattcacaacctgccaatccatcactgtctttgacagcgtgttgtttcaaagagcaaagatacaagttaaatgcaagcaattcacaacgaaagtattatcttttcgttatccactactgttgtttcaaagagcaaagatacaagttaaatgcaagcaattcacaacgaaagtattatcttttcgttatccactactgttgtttcaaagagcaaagatacaagttaaatgcaagcaattcacaacgcggtaacggcgatgacggtcagcgtttgtgttgtttcaaagagcaaagatacaagttaaatgcaagcaattcacaaccacaacagcaacaggaaatagcagatagacgttgtttcaaagagcaaagatacaagttaaatgcaagcaattcacaactatgccgcagcagtttttcactttcttgccgttgtttcaaagagcaaagatacaagttaaatgcaagcaattcacaacctaatattgacgttcttaaaggtcagtatggttgtttcaaagagcaaagatacaagttaaatgcaagcaattcacaacactcagttgcatgataagattaatggcttcgttgtttcaaagagcaaagatacaagttaaatgcaagcaattcacaacagttctgctgctggtgcgcctgctggctctgttgtttcaaagagcaaagatacaagttaaatgcaagcaattcacaactgaaatgagttttgttctaaaggatgaaatgttgtttcaaagagcaaagatacaagttaaatgcaagcaattcacaacaacccgctcactgctgcaggtggtattgttgttgtttcaaagagcaaagatacaagttaaatgcaagcaattcacaacgctggaaatggtacttcttctgcggttcaagttgtttcaaagagcaaagatacaagttaaatgcaagcaattcacaacgtgtcggcggttcggcggaacgagagccaggttgtttcaaagagcaaagatacaagttaaatgcaagcaattcacaacggacaccggcacacgggaaacgcagaagggttgtttcaaagagcaaagatacaagttaaatgcaagcaattcacaacaggttcagccattaaccaccaataggattcgttgtttcaaagagcaaagatacaagttaaatgcaagcaattcacaactgtacggcgcaaaacgtgatgaatggcttagttgtttcaaagagcaaagatacaagttaaatgcaagcaattcacaacggcggacttatagatgatgcctttggtactgttgtttcaaagagcaaagatacaagttaaatgcaagcaattcacaacctaccgaatctgaacgtattgagtataatagttgtttcaaagagcaaagatacaagttaaatgcaagcaattcacaacttgctcaatatggtgttctgcttgatgctggttgtttcaaagagcaaagatacaagttaaatgcaagcaattcacaacgcaggagacgatttcccgatttatgataatgttgtttcaaagagcaaagatacaagttaaatgcaagcaattcacaaccgctatgattgcagccctgcaatcgagacagttgtttcaaagagcaaagatacaagttaaatgcaagcaattcacaacccacaggctatcaactctgcggagttccacgttgtttcaaagagcaaagatacaagttaaatgcaagcaattcacaacgaagaggttcagcttgccgcgcttgcgctcgttgtttcaaagagcaaagatacaagttaaatgcaagcaattcacaacccaggggcgtgaggtcacgcttgcagcgttgttgtttcaaagagcaaagatacaagttaaatgcaagcaattcacaacgacgcgagcctggccatcgacaacagcgacgttgtttcaaagagcaaagatacaagttaaatgcaagcaattcacaacggaggccgtgaccctcgacagcttcagactgttgtttcaaagagcaaagatacaagttaaatgcaagcaattcacaacagcgtttcaagatactcatcatacaaacctgttgtttcaaagagcaaagatacaagttaaatgcaagcaattcacaactgtacttcgtttaaatgttccttcaataatgttgtttcaaagagcaaagatacaagttaaatgcaagcaattcacaactatgttctttgataacactgcttgcacctgttgtttcaaagagcaaagatacaagttaaatgcaagcaattcacaacaggctgttatccttgtaaaatatcggatttgttgtttcaaagagcaaagatacaagttaaatgcaagcaattcacaacggccttactggcaagatgcaaggtaagtatgttgtttcaaagagcaaagatacaatattagaacgcacacgtgggtgcgccccgacaatttttttcaaaattccataaaaaccaaaaattttttacctttgtcactgcaaaacaccttaaatattgccccatgaatagaaaaatgcatatccaagaagaggcggcgcgctgcctgttgtgtgccgaagcgccttgcagtaaggcctgcaagaatggcgacccggcgcgcgccatccgtgctattagattcggtaacgaggccattgccggacaatgggtcgagaattgtaacgaggcagaattgcaagccgccgaagaggcctgcatccattacgacaggcctatccgcattagggaactgatggcggctgtcaaagggacgaaggtgcagaaggatttgcccagcctcgccatcgatttttgcggcatccattgcgagaatcctttcttccttgcttcatcagccgtatgtaccaactacgaaatggtggcgcgagcctttgaagcaggatgggcaggcgtgttctacaagaccatctgcatggaggatatccatgaggtgtcgccgcgcttcgatgctgtcaacgagttgggaaggtcggatttcttcgggttccgtaatatggaacagctgagcgagaaccccgtggagatggatttcgacatcctgcggaggctgaaacagaactatcccacgaagatcgtcgtagcttccatcatgggcaacaaagaaacggactggattactttggcgaagatggccgaggaggctggcgtcgatgccgtggagctgaatttctcctgcccacagatgcgtctggctggcatgggcagcgatgtgggacagaaccctgaactggtgcttttctacacggcatacgtgaaacacagcgtcaagatccctgtcatccccaagatgacacccaatatcacccagatcaaccaacctgccatggccgcccacttcgccagtgctgatgcgatctcggccatcaacaccatcaagagcgtgaccatgaccgatcgcagcgccgtcgccgacaagaagaccatctcgggactctcgggacgggcagtgaagcccattgcgttgcgctatatctgtgagatggcgactaaccccatcatctacgacaccacactgggcaaacgcatcgaactaagtggcatcggcggcattgagacttggcgtgatgccttggagtttatccaattgggatgcaacaacgttcaggtatgtaccgccgtgatgcaatacggctaccgaatcatcgatgacctcattctgggtatgcagcattatatggcctcacgtggcgttgagcacctgtcagacttggtgggagaggagctgccgaatttcgtcacccccaccaacctcgaccgcgacaccatcgtgtatcccactttcgaccgagagaaatgcattggctgcggtcgttgctacacttcctgccaagacggtggccatcaagccatcacttttgataccgacctgcgccaacctcgtctcgacggaaagcgttgcgttggctgtcatctctgccgcctcgtatgtcccacgggtgctatcggcgtggcaaagcgtatcgaaaagagagaaaaacaaaataattaaccatgaaaaacaacctattaaaaatcggtgtgttggctttgttgctgacagtcatgggtcaaggtttttcccaaatccagaatttcgaatggcaaggtgttcagcgtcagtatttggtgaggtctcctcagcatactgaaaaagccacagtgccagtgctgtattttctccatggatggacggataatattacccatgttgacaatgagtttcatttccaacagattgcagatgcgtttgaatggacaattgttattccgcaggctcttgacgaagggtcggggacaatgtggaatgctggcctgaatgcaagcaataccgacgactcaggctttctgatggcgttgctcgattcgttggtcgaaccttataacctcaaccttgacagtgttttcttcacaggcttttctatgggtggtttcatgacccaccg
